United States Patent Application Publication US 2025/0305002 A1 - sequence listing, part 5

SEQ ID NO: 6301 - protein, 2091 aa, synthetic construct
MPAAKRVKLDGGDKKYSIGLDIGTNSVGWAVITDEYKVPSKKFKVLGNTDRHSIKKNLIGALLFDSGETAEATRLKRTARRRYTRRKNRICYLQEIFSNEMAKVDDSFFHRLEESFLVEEDKKHERHPIFGNIVDEVAYHEKYPTIYHLRKKLVDSTDKADLRLIYLALAHMIKFRGHFLIEGDLNPDNSDVDKLFIQLVQTYNQLFEENPINASGVDAKAILSARLSKSRRLENLIAQLPGEKKNGLFGNLIALSLGLTPNFKSNFDLAEDAKLQLSKDTYDDDLDNLLAQIGDQYADLFLAAKNLSDAILLSDILRVNTEITKAPLSASMIKRYDEHHQDLTLLKALVRQQLPEKYKEIFFDQSKNGYAGYIDGGASQEEFYKFIKPILEKMDGTEELLVKLNREDLLRKQRTFDNGSIPHQIHLGELHAILRRQEDFYPFLKDNREKIEKILTFRIPYYVGPLARGNSRFAWMTRKSEETITPWNFEEVVDKGASAQSFIERMTNFDKNLPNEKVLPKHSLLYEYFTVYNELTKVKYVTEGMRKPAFLSGEQKKAIVDLLFKTNRKVTVKQLKEDYFKKIECFDSVEISGVEDRFNASLGTYHDLLKIIKDKDFLDNEENEDILEDIVLTLTLFEDREMIEERLKTYAHLFDDKVMKQLKRRRYTGWGRLSRKLINGIRDKQSGKTILDFLKSDGFANRNFMQLIHDDSLTFKEDIQKAQVSGQGDSLHEHIANLAGSPAIKKGILQTVKVVDELVKVMGRHKPENIVIEMARENQTTQKGQKNSRERMKRIEEGIKELGSQILKEHPVENTQLQNEKLYLYYLQNGRDMYVDQELDINRLSDYDVDHIVPQSFLKDDSIDNKVLTRSDKARGKSDNVPSEEVVKKMKNYWRQLLNAKLITQRKFDNLTKAERGGLSELDKAGFIKRQLVETRQITKHVAQILDSRMNTKYDENDKLIREVKVITLKSKLVSDFRKDFQFYKVREINNYHHAHDAYLNAVVGTALIKKYPKLESEFVYGDYKVYDVRKMIAKSEQEIGKATAKYFFYSNIMNFFKTEITLANGEIRKRPLIETNGETGEIVWDKGRDFATVRKVLSMPQVNIVKKTEVQTGGFSKESILPKRNSDKLIARKKDWDPKKYGGFDSPTVAYSVLVVAKVEKGKSKKLKSVKELLGITIMERSSFEKNPIDFLEAKGYKEVKKDLIIKLPKYSLFELENGRKRMLASAGELQKGNELALPSKYVNFLYLASHYEKLKGSPEDNEQKQLFVEQHKHYLDEIIEQISEFSKRVILADANLDKVLSAYNKHRDKPIREQAENIIHLFTLTNLGAPAAFKYFDTTIDRKRYTSTKEVLDATLIHQSITGLYETRIDLSQLGGDGGGSSGSSGGTLNIEDEHRLHETSKEPDVSLGSTWLSDFPQAWAETGGMGLAVRQAPLIIPLKATSTPVSIKQYPMSQEARLGIKPHIQRLLDQGILVPCQSPWNTPLLPVKKPGTNDYRPVQDLREVNKRVEDIHPTVPNPYNLLSGLPPSHQWYTVLDLKDAFFCLRLHPTSQPLFAFEWRDPEMGISGQLTWTRLPQGFKNSPTLFDEALHRDLADFRIQHPDLILLQYVDDLLLAATSELDCQQGTRALLQTLGNLGYRASAKKAQICQKQVKYLGYLLKEGQRWLTEARKETVMGQPTPKTPRQLREFLGTAGFCRLWIPGFAEMAAPLYPLTKTGTLFNWGPDQQKAYQEIKQALLTAPALGLPDLTKPFELFVDEKQGYAKGVLTQKLGPWRRPVAYLSKKLDPVAAGWPPCLRMVAAIAVLTKDAGKLTMGQPLVILAPHAVEALVKQPPDRWLSNARMTHYQALLLDTDRVQFGPVVALNPATLLPLPEEGLQHNCLDILAEAHGTRPDLTDQPLPDADHTWYTDGSSLLQEGQRKAGAAVTTETEVIWAKALPAGTSAQRAELIALTQALKMAEGKKLNVYTDSRYAFATAHIHGEIYRRRGLLTSEGKEIKNKDEILALLKALFLPKRLSIIHCPGHQKGHSAEARGNRMADQAARKAAITETPDTSTLLAGKRTADGSEFEKRTADGSEFESPKKKAKVE

SEQ ID NO: 6302 - protein, 2089 aa, synthetic construct
MPAAKRVKLDGGDKKYSIGLDIGTNSVGWAVITDEYKVPSKKFKVLGNTDRHSIKKNLIGALLFDSGETAEATRLKRTARRRYTRRKNRICYLQEIFSNEMAKVDDSFFHRLEESFLVEEDKKHERHPIFGNIVDEVAYHEKYPTIYHLRKKLVDSTDKADLRLIYLALAHMIKFRGHFLIEGDLNPDNSDVDKLFIQLVQTYNQLFEENPINASGVDAKAILSARLSKSRRLENLIAQLPGEKKNGLFGNLIALSLGLTPNFKSNFDLAEDAKLQLSKDTYDDDLDNLLAQIGDQYADLFLAAKNLSDAILLSDILRVNTEITKAPLSASMIKRYDEHHQDLTLLKALVRQQLPEKYKEIFFDQSKNGYAGYIDGGASQEEFYKFIKPILEKMDGTEELLVKLNREDLLRKQRTFDNGSIPHQIHLGELHAILRRQEDFYPFLKDNREKIEKILTFRIPYYVGPLARGNSRFAWMTRKSEETITPWNFEEVVDKGASAQSFIERMTNFDKNLPNEKVLPKHSLLYEYFTVYNELTKVKYVTEGMRKPAFLSGEQKKAIVDLLFKTNRKVTVKQLKEDYFKKIECFDSVEISGVEDRFNASLGTYHDLLKIIKDKDFLDNEENEDILEDIVLTLTLFEDREMIEERLKTYAHLFDDKVMKQLKRRRYTGWGRLSRKLINGIRDKQSGKTILDFLKSDGFANRNFMQLIHDDSLTFKEDIQKAQVSGQGDSLHEHIANLAGSPAIKKGILQTVKVVDELVKVMGRHKPENIVIEMARENQTTQKGQKNSRERMKRIEEGIKELGSQILKEHPVENTQLQNEKLYLYYLQNGRDMYVDQELDINRLSDYDVDHIVPQSFLKDDSIDNKVLTRSDKARGKSDNVPSEEVVKKMKNYWRQLLNAKLITQRKFDNLTKAERGGLSELDKAGFIKRQLVETRQITKHVAQILDSRMNTKYDENDKLIREVKVITLKSKLVSDFRKDFQFYKVREINNYHHAHDAYLNAVVGTALIKKYPKLESEFVYGDYKVYDVRKMIAKSEQEIGKATAKYFFYSNIMNFFKTEITLANGEIRKRPLIETNGETGEIVWDKGRDFATVRKVLSMPQVNIVKKTEVQTGGFSKESILPKRNSDKLIARKKDWDPKKYGGFDSPTVAYSVLVVAKVEKGKSKKLKSVKELLGITIMERSSFEKNPIDFLEAKGYKEVKKDLIIKLPKYSLFELENGRKRMLASAGELQKGNELALPSKYVNFLYLASHYEKLKGSPEDNEQKQLFVEQHKHYLDEIIEQISEFSKRVILADANLDKVLSAYNKHRDKPIREQAENIIHLFTLTNLGAPAAFKYFDTTIDRKRYTSTKEVLDATLIHQSITGLYETRIDLSQLGGDGGGSSGSSGGVLNLEEEYRLHEKPVPSSIDPSWLQLFPTVWAERAGMGLANQVPPVVVELRSGASPVAVRQYPMSKEAREGIRPHIQRFLDLGVLVPCQSPWNTPLLPVKKPGTNDYRPVQDLREINKRVQDIHPTVPNPYNLLSSLPPSHTWYSVLDLKDAFFCLKLHPNSQPLFAFEWRDPEKGNTGQLTWTRLPQGFKNSPTLFNEALHRDLAPFRALNPQVVLLQYVDDLLVAAPTYRDCKEGTQKLLQELSKLGYRVSAKKAQLCQKEVTYLGYLLKEGKRWLTPARKATVMKIPPPTTPRQVREFLGTAGFCRLWIPGFASLAAPLYPLTKPSIPFIWTEEHQKAFDRIKEALLSAPALALPDLTKPFTLYVDERAGVARGVLTQTLGPWRRPVAYLSKKLDPVASGWPTCLKAVAAVALLLKDADKLTLGQNVTVIASHSLESIVRQPPDRWMTNARMTHYQSLLLNERVSFAPPAVLNPATLLPVESEATPVHRCSEILAEETGTRRDLKDQPLPGVPAWYTDGSSFIAEGKRRAGAAIVDGKRTVWASSLPEGTSAQKAELVALTQALRLAEGKDINIYTDSRYAFATAHIHGAIYKQRGWLTSAGKDIKNKEEILALLEAIHLPKRVAIIHCPGHQKGNDPVATGNRRADEAAKQAALSTRVLAETTKPAGKRTADGSEFEKRTADGSEFESPKKKAKVE

SEQ ID NO: 6303 - protein, 2091 aa, synthetic construct
MPAAKRVKLDGGDKKYSIGLDIGTNSVGWAVITDEYKVPSKKFKVLGNTDRHSIKKNLIGALLFDSGETAEATRLKRTARRRYTRRKNRICYLQEIFSNEMAKVDDSFFHRLEESFLVEEDKKHERHPIFGNIVDEVAYHEKYPTIYHLRKKLVDSTDKADLRLIYLALAHMIKFRGHFLIEGDLNPDNSDVDKLFIQLVQTYNQLFEENPINASGVDAKAILSARLSKSRRLENLIAQLPGEKKNGLFGNLIALSLGLTPNFKSNFDLAEDAKLQLSKDTYDDDLDNLLAQIGDQYADLFLAAKNLSDAILLSDILRVNTEITKAPLSASMIKRYDEHHQDLTLLKALVRQQLPEKYKEIFFDQSKNGYAGYIDGGASQEEFYKFIKPILEKMDGTEELLVKLNREDLLRKQRTFDNGSIPHQIHLGELHAILRRQEDFYPFLKDNREKIEKILTFRIPYYVGPLARGNSRFAWMTRKSEETITPWNFEEVVDKGASAQSFIERMTNFDKNLPNEKVLPKHSLLYEYFTVYNELTKVKYVTEGMRKPAFLSGEQKKAIVDLLFKTNRKVTVKQLKEDYFKKIECFDSVEISGVEDRFNASLGTYHDLLKIIKDKDFLDNEENEDILEDIVLTLTLFEDREMIEERLKTYAHLFDDKVMKQLKRRRYTGWGRLSRKLINGIRDKQSGKTILDFLKSDGFANRNFMQLIHDDSLTFKEDIQKAQVSGQGDSLHEHIANLAGSPAIKKGILQTVKVVDELVKVMGRHKPENIVIEMARENQTTQKGQKNSRERMKRIEEGIKELGSQILKEHPVENTQLQNEKLYLYYLQNGRDMYVDQELDINRLSDYDVDHIVPQSFLKDDSIDNKVLTRSDKARGKSDNVPSEEVVKKMKNYWRQLLNAKLITQRKFDNLTKAERGGLSELDKAGFIKRQLVETRQITKHVAQILDSRMNTKYDENDKLIREVKVITLKSKLVSDFRKDFQFYKVREINNYHHAHDAYLNAVVGTALIKKYPKLESEFVYGDYKVYDVRKMIAKSEQEIGKATAKYFFYSNIMNFFKTEITLANGEIRKRPLIETNGETGEIVWDKGRDFATVRKVLSMPQVNIVKKTEVQTGGFSKESILPKRNSDKLIARKKDWDPKKYGGFDSPTVAYSVLVVAKVEKGKSKKLKSVKELLGITIMERSSFEKNPIDFLEAKGYKEVKKDLIIKLPKYSLFELENGRKRMLASAGELQKGNELALPSKYVNFLYLASHYEKLKGSPEDNEQKQLFVEQHKHYLDEIIEQISEFSKRVILADANLDKVLSAYNKHRDKPIREQAENIIHLFTLTNLGAPAAFKYFDTTIDRKRYTSTKEVLDATLIHQSITGLYETRIDLSQLGGDGGGSSGSSGGTLNIEDEYRLHETSKEPDVPLGSTWLSDFPQAWAETGGMGLAVRQAPLIIPLKATSTPVSIKQYPMSQEARLGIKPHIQRLLDQGILVPCQSPWNTPLLPVKKPGTNDYRPVQDLREVNKRVEDIHPTVPNPYNLLSGLPPSHQWYTVLDLKDAFFCLRLHPTSQPLFAFEWRDPEMGISGQLTWTRLPQGFKNSPTLFNEALHRDLADFRIQHPDLILLQYVDDLLLAATSEQDCQRGTRALLQTLGNLGYRASAKKAQICQKQVKYLGYLLKEGQRWLTEARKETVMGQPTPKTPRQLREFLGTAGFCRLWIPGFAEMAAPLYPLTKPGTLFNWGPDQQKAYQEIKQALLTAPALGLPDLTKPFELFVDEKQGYAKGVLTQKLGPWRRPVAYLSKKLDPVAAGWPPCLRMVAAIAVLTKDAGKLTMGQPLVILAPHAVEALVKQPPDRWLSNARMTHYQAMLLDTDRVQFGPVVALNPATLLPLPEKEAPHDCLEILAETHGTRPDLTDQPIPDADYTWYTDGSSFLQEGQRRAGAAVTTETEVIWARALPAGTSAQRAELIALTQALKMAEGKKLNVYTDSRYAFATAHVHGEIYRRRGWLTSEGREIKNKNEILALLKALFLPKRLSIIHCPGHQKGNSAEARGNRMADQAAREAAMKAVLETSTLLAGKRTADGSEFEKRTADGSEFESPKKKAKVE

SEQ ID NO: 6304 - protein, 2096 aa, synthetic construct
MPAAKRVKLDGGDKKYSIGLDIGTNSVGWAVITDEYKVPSKKFKVLGNTDRHSIKKNLIGALLFDSGETAEATRLKRTARRRYTRRKNRICYLQEIFSNEMAKVDDSFFHRLEESFLVEEDKKHERHPIFGNIVDEVAYHEKYPTIYHLRKKLVDSTDKADLRLIYLALAHMIKFRGHFLIEGDLNPDNSDVDKLFIQLVQTYNQLFEENPINASGVDAKAILSARLSKSRRLENLIAQLPGEKKNGLFGNLIALSLGLTPNFKSNFDLAEDAKLQLSKDTYDDDLDNLLAQIGDQYADLFLAAKNLSDAILLSDILRVNTEITKAPLSASMIKRYDEHHQDLTLLKALVRQQLPEKYKEIFFDQSKNGYAGYIDGGASQEEFYKFIKPILEKMDGTEELLVKLNREDLLRKQRTFDNGSIPHQIHLGELHAILRRQEDFYPFLKDNREKIEKILTFRIPYYVGPLARGNSRFAWMTRKSEETITPWNFEEVVDKGASAQSFIERMTNFDKNLPNEKVLPKHSLLYEYFTVYNELTKVKYVTEGMRKPAFLSGEQKKAIVDLLFKTNRKVTVKQLKEDYFKKIECFDSVEISGVEDRFNASLGTYHDLLKIIKDKDFLDNEENEDILEDIVLTLTLFEDREMIEERLKTYAHLFDDKVMKQLKRRRYTGWGRLSRKLINGIRDKQSGKTILDFLKSDGFANRNFMQLIHDDSLTFKEDIQKAQVSGQGDSLHEHIANLAGSPAIKKGILQTVKVVDELVKVMGRHKPENIVIEMARENQTTQKGQKNSRERMKRIEEGIKELGSQILKEHPVENTQLQNEKLYLYYLQNGRDMYVDQELDINRLSDYDVDHIVPQSFLKDDSIDNKVLTRSDKARGKSDNVPSEEVVKKMKNYWRQLLNAKLITQRKFDNLTKAERGGLSELDKAGFIKRQLVETRQITKHVAQILDSRMNTKYDENDKLIREVKVITLKSKLVSDFRKDFQFYKVREINNYHHAHDAYLNAVVGTALIKKYPKLESEFVYGDYKVYDVRKMIAKSEQEIGKATAKYFFYSNIMNFFKTEITLANGEIRKRPLIETNGETGEIVWDKGRDFATVRKVLSMPQVNIVKKTEVQTGGFSKESILPKRNSDKLIARKKDWDPKKYGGFDSPTVAYSVLVVAKVEKGKSKKLKSVKELLGITIMERSSFEKNPIDFLEAKGYKEVKKDLIIKLPKYSLFELENGRKRMLASAGELQKGNELALPSKYVNFLYLASHYEKLKGSPEDNEQKQLFVEQHKHYLDEIIEQISEFSKRVILADANLDKVLSAYNKHRDKPIREQAENIIHLFTLTNLGAPAAFKYFDTTIDRKRYTSTKEVLDATLIHQSITGLYETRIDLSQLGGDGGGSSGSSGSSGGTAPLEEEYRLFLEAPIQNVTLLEQWKREIPKVWAEINPPGLASTQAPIHVQLLSTALPVRVRQYPITLEAKRSLRETIRKFRAAGILRPVHSPWNTPLLPVRKSGTSEYRMVQDLREVNKRVETIHPTVPNPYTLLSLLPPDRIWYSVLDLKDAFFCIPLAPESQLIFAFEWADAEEGESGQLTWTRLPQGFKNSPTLFNEALNRDLQGFRLDHPSVSLLQYVDDLLIAADTQAACLSATRDLLMTLAELGYRVSGKKAQLCQEEVTYLGFKIHKGSRSLSNSRTQAILQIPVPKTKRQVREFLGTIGYCRLWIPGFAELAQPLYAATRPGNDPLVWGEKEEEAFQSLKLALTQPPALALPSLDKPFQLFVEETSGAAKGVLTQALGPWKRPVAYLSKRLDPVAAGWPRCLRAIAAAALLTREASKLTFGQDIEITSSHNLESLLRSPPDKWLTNARITQYQVLLLDPPRVRFKQTAALNPATLLPETDDTLPIHHCLDTLDSLTSTRPDLTDQPLAQAEATLFTDGSSYIRDGKRYAGAAVVTLDSVIWAEPLPIGTSAQKAELIALTKALEWSKDKSVNIYTDSRYAFATLHVHGMIYRERGWLTAGGKAIKNAPEILALLTAVWLPKRVAVMHCKGHQKDDAPTSTGNRRADEVAREVAIRPLSTQATISAGKRTADGSEFEKRTADGSEFESPKKKAKVE

SEQ ID NO: 6305 - protein, 2096 aa, synthetic construct
MPAAKRVKLDGGDKKYSIGLDIGTNSVGWAVITDEYKVPSKKFKVLGNTDRHSIKKNLIGALLFDSGETAEATRLKRTARRRYTRRKNRICYLQEIFSNEMAKVDDSFFHRLEESFLVEEDKKHERHPIFGNIVDEVAYHEKYPTIYHLRKKLVDSTDKADLRLIYLALAHMIKFRGHFLIEGDLNPDNSDVDKLFIQLVQTYNQLFEENPINASGVDAKAILSARLSKSRRLENLIAQLPGEKKNGLFGNLIALSLGLTPNFKSNFDLAEDAKLQLSKDTYDDDLDNLLAQIGDQYADLFLAAKNLSDAILLSDILRVNTEITKAPLSASMIKRYDEHHQDLTLLKALVRQQLPEKYKEIFFDQSKNGYAGYIDGGASQEEFYKFIKPILEKMDGTEELLVKLNREDLLRKQRTFDNGSIPHQIHLGELHAILRRQEDFYPFLKDNREKIEKILTFRIPYYVGPLARGNSRFAWMTRKSEETITPWNFEEVVDKGASAQSFIERMTNFDKNLPNEKVLPKHSLLYEYFTVYNELTKVKYVTEGMRKPAFLSGEQKKAIVDLLFKTNRKVTVKQLKEDYFKKIECFDSVEISGVEDRFNASLGTYHDLLKIIKDKDFLDNEENEDILEDIVLTLTLFEDREMIEERLKTYAHLFDDKVMKQLKRRRYTGWGRLSRKLINGIRDKQSGKTILDFLKSDGFANRNFMQLIHDDSLTFKEDIQKAQVSGQGDSLHEHIANLAGSPAIKKGILQTVKVVDELVKVMGRHKPENIVIEMARENQTTQKGQKNSRERMKRIEEGIKELGSQILKEHPVENTQLQNEKLYLYYLQNGRDMYVDQELDINRLSDYDVDHIVPQSFLKDDSIDNKVLTRSDKARGKSDNVPSEEVVKKMKNYWRQLLNAKLITQRKFDNLTKAERGGLSELDKAGFIKRQLVETRQITKHVAQILDSRMNTKYDENDKLIREVKVITLKSKLVSDFRKDFQFYKVREINNYHHAHDAYLNAVVGTALIKKYPKLESEFVYGDYKVYDVRKMIAKSEQEIGKATAKYFFYSNIMNFFKTEITLANGEIRKRPLIETNGETGEIVWDKGRDFATVRKVLSMPQVNIVKKTEVQTGGFSKESILPKRNSDKLIARKKDWDPKKYGGFDSPTVAYSVLVVAKVEKGKSKKLKSVKELLGITIMERSSFEKNPIDFLEAKGYKEVKKDLIIKLPKYSLFELENGRKRMLASAGELQKGNELALPSKYVNFLYLASHYEKLKGSPEDNEQKQLFVEQHKHYLDEIIEQISEFSKRVILADANLDKVLSAYNKHRDKPIREQAENIIHLFTLTNLGAPAAFKYFDTTIDRKRYTSTKEVLDATLIHQSITGLYETRIDLSQLGGDGGGSSGSSGSSGGTAPLEEEYRLFLEAPIQNVTLLEQWKREIPKVWAEINPPGLASTQAPIHVQLLSTALPVRVRQYPITLEAKRSLRETIRKFRAAGILRPVHSPWNTPLLPVRKSGTSEYRMVQDLREVNKRVETIHPTVPNPYTLLSLLPPDRIWYSVLDLKDAFFCIPLAPESQLIFAFEWADAEEGESGQLTWTRLPQGFKNSPTLFNEALNRDLQGFRLDHPSVSLLQYVDDLLIAADTQAACLSATRDLLMTLAELGYRVSGKKAQLCQEEVTYLGFKIHKGSRSLSNSRTQAILQIPVPKTKRQVREFLGKIGYCRLFIPGFAELAQPLYAATRPGNDPLVWGEKEEEAFQSLKLALTQPPALALPSLDKPFQLFVEETSGAAKGVLTQALGPWKRPVAYLSKRLDPVAAGWPRCLRAIAAAALLTREASKLTFGQDIEITSSHNLESLLRSPPDKWLTNARITQYQVLLLDPPRVRFKQTAALNPATLLPETDDTLPIHHCLDTLDSLTSTRPDLTDQPLAQAEATLFTDGSSYIRDGKRYAGAAVVTLDSVIWAEPLPIGTSAQKAELIALTKALEWSKDKSVNIYTDSRYAFATLHVHGMIYRERGWLTAGGKAIKNAPEILALLTAVWLPKRVAVMHCKGHQKDDAPTSTGNRRADEVAREVAIRPLSTQATISAGKRTADGSEFEKRTADGSEFESPKKKAKVE

SEQ ID NO: 6306 - protein, 2085 aa, synthetic construct
MPAAKRVKLDGGDKKYSIGLDIGTNSVGWAVITDEYKVPSKKFKVLGNTDRHSIKKNLIGALLFDSGETAEATRLKRTARRRYTRRKNRICYLQEIFSNEMAKVDDSFFHRLEESFLVEEDKKHERHPIFGNIVDEVAYHEKYPTIYHLRKKLVDSTDKADLRLIYLALAHMIKFRGHFLIEGDLNPDNSDVDKLFIQLVQTYNQLFEENPINASGVDAKAILSARLSKSRRLENLIAQLPGEKKNGLFGNLIALSLGLTPNFKSNFDLAEDAKLQLSKDTYDDDLDNLLAQIGDQYADLFLAAKNLSDAILLSDILRVNTEITKAPLSASMIKRYDEHHQDLTLLKALVRQQLPEKYKEIFFDQSKNGYAGYIDGGASQEEFYKFIKPILEKMDGTEELLVKLNREDLLRKQRTFDNGSIPHQIHLGELHAILRRQEDFYPFLKDNREKIEKILTFRIPYYVGPLARGNSRFAWMTRKSEETITPWNFEEVVDKGASAQSFIERMTNFDKNLPNEKVLPKHSLLYEYFTVYNELTKVKYVTEGMRKPAFLSGEQKKAIVDLLFKTNRKVTVKQLKEDYFKKIECFDSVEISGVEDRFNASLGTYHDLLKIIKDKDFLDNEENEDILEDIVLTLTLFEDREMIEERLKTYAHLFDDKVMKQLKRRRYTGWGRLSRKLINGIRDKQSGKTILDFLKSDGFANRNFMQLIHDDSLTFKEDIQKAQVSGQGDSLHEHIANLAGSPAIKKGILQTVKVVDELVKVMGRHKPENIVIEMARENQTTQKGQKNSRERMKRIEEGIKELGSQILKEHPVENTQLQNEKLYLYYLQNGRDMYVDQELDINRLSDYDVDHIVPQSFLKDDSIDNKVLTRSDKARGKSDNVPSEEVVKKMKNYWRQLLNAKLITQRKFDNLTKAERGGLSELDKAGFIKRQLVETRQITKHVAQILDSRMNTKYDENDKLIREVKVITLKSKLVSDFRKDFQFYKVREINNYHHAHDAYLNAVVGTALIKKYPKLESEFVYGDYKVYDVRKMIAKSEQEIGKATAKYFFYSNIMNFFKTEITLANGEIRKRPLIETNGETGEIVWDKGRDFATVRKVLSMPQVNIVKKTEVQTGGFSKESILPKRNSDKLIARKKDWDPKKYGGFDSPTVAYSVLVVAKVEKGKSKKLKSVKELLGITIMERSSFEKNPIDFLEAKGYKEVKKDLIIKLPKYSLFELENGRKRMLASAGELQKGNELALPSKYVNFLYLASHYEKLKGSPEDNEQKQLFVEQHKHYLDEIIEQISEFSKRVILADANLDKVLSAYNKHRDKPIREQAENIIHLFTLTNLGAPAAFKYFDTTIDRKRYTSTKEVLDATLIHQSITGLYETRIDLSQLGGDGGGSSGSSGSSGGVPWILKKPLELTIKLDLEEQQGTLLNNSILSKKGKEELKQLFEKYSALWQSWENQVGHRRIRPHKIATGTVKPTPQKQYHINPKAKPDIQIVINDLLKQGVLIQKESTMNTPVYPVPKPNGRWRMVLDYRAVNKVTPLIAVQNQHSYGILGSLFKGRYKTTIDLSNGFWAHPIVPEDYWITAFTWQGKQYCWTVLPQGFLNSPGLFTGDVVDLLQGIPNVEVYVDDVYISHDSEKEHLEYLDILFNRLKEAGYIISLKKSNIANSIVDFLGFQITNEGRGLTDTFKEKLENITAPTTLKQLQSILGLLNFARNFIPDFTELIAPLYALIPKSTKNYVPWQIEHSTTLETLITKLNGAEYLQGRKGDKTLIMKVNASYTTGYIRYYNEGEKKPISYVSIVFSKTELKFTELEKLLTTVHKGLLKALDLSMGQNIHVYSPIVSMQNIQKTPQTAKKALASRWLSWLSYLEDPRIRFFYDPQMPALKDLPAVDTGKDNKKHPSNFQHIFYTDGSAITSPTKEGHLNAGMGIVYFINKDGNLQKQQEWSISLGNHTAQFAEIAAFEFALKKCLPLGGNILVVTDSNYVAKAYNEELDVWASNGFVNNRKKPLKHISKWKSVADLKRLRPDVVVTHEPGHQKLDSSPHAYGNNLADQLATQASFKVHAGKRTADGSEFEKRTADGSEFESPKKKAKVE

SEQ ID NO: 6307 - protein, 2125 aa, synthetic construct
MPAAKRVKLDGGDKKYSIGLDIGTNSVGWAVITDEYKVPSKKFKVLGNTDRHSIKKNLIGALLFDSGETAEATRLKRTARRRYTRRKNRICYLQEIFSNEMAKVDDSFFHRLEESFLVEEDKKHERHPIFGNIVDEVAYHEKYPTIYHLRKKLVDSTDKADLRLIYLALAHMIKFRGHFLIEGDLNPDNSDVDKLFIQLVQTYNQLFEENPINASGVDAKAILSARLSKSRRLENLIAQLPGEKKNGLFGNLIALSLGLTPNFKSNFDLAEDAKLQLSKDTYDDDLDNLLAQIGDQYADLFLAAKNLSDAILLSDILRVNTEITKAPLSASMIKRYDEHHQDLTLLKALVRQQLPEKYKEIFFDQSKNGYAGYIDGGASQEEFYKFIKPILEKMDGTEELLVKLNREDLLRKQRTFDNGSIPHQIHLGELHAILRRQEDFYPFLKDNREKIEKILTFRIPYYVGPLARGNSRFAWMTRKSEETITPWNFEEVVDKGASAQSFIERMTNFDKNLPNEKVLPKHSLLYEYFTVYNELTKVKYVTEGMRKPAFLSGEQKKAIVDLLFKTNRKVTVKQLKEDYFKKIECFDSVEISGVEDRFNASLGTYHDLLKIIKDKDFLDNEENEDILEDIVLTLTLFEDREMIEERLKTYAHLFDDKVMKQLKRRRYTGWGRLSRKLINGIRDKQSGKTILDFLKSDGFANRNFMQLIHDDSLTFKEDIQKAQVSGQGDSLHEHIANLAGSPAIKKGILQTVKVVDELVKVMGRHKPENIVIEMARENQTTQKGQKNSRERMKRIEEGIKELGSQILKEHPVENTQLQNEKLYLYYLQNGRDMYVDQELDINRLSDYDVDHIVPQSFLKDDSIDNKVLTRSDKARGKSDNVPSEEVVKKMKNYWRQLLNAKLITQRKFDNLTKAERGGLSELDKAGFIKRQLVETRQITKHVAQILDSRMNTKYDENDKLIREVKVITLKSKLVSDFRKDFQFYKVREINNYHHAHDAYLNAVVGTALIKKYPKLESEFVYGDYKVYDVRKMIAKSEQEIGKATAKYFFYSNIMNFFKTEITLANGEIRKRPLIETNGETGEIVWDKGRDFATVRKVLSMPQVNIVKKTEVQTGGFSKESILPKRNSDKLIARKKDWDPKKYGGFDSPTVAYSVLVVAKVEKGKSKKLKSVKELLGITIMERSSFEKNPIDFLEAKGYKEVKKDLIIKLPKYSLFELENGRKRMLASAGELQKGNELALPSKYVNFLYLASHYEKLKGSPEDNEQKQLFVEQHKHYLDEIIEQISEFSKRVILADANLDKVLSAYNKHRDKPIREQAENIIHLFTLTNLGAPAAFKYFDTTIDRKRYTSTKEVLDATLIHQSITGLYETRIDLSQLGGDGGGSSGSSGSSGGLLGRDLLTKLKAQIQFSTEGPQVTWEDRPAMCLVLNLEEEYRLHEKPVPPSIDPSWLQLFPMVWAEKAGMGLANQVPPVVVELKSDASPVAVRQYPMSKEAREGIRPHIQRFLDLGILVPCQSPWNTPLLPVKKPGTNDYRPVQDLREVNKRVQDIHPTVPNPYNLLSSLPPSHTWYSVLDLKDAFFCLKLHPNSQPLFAFEWRDPEKGNTGQLTWTRLPQGFKNSPTLFNEALHRDLASFRALNPQVVMLQYVDDLLVAAPTYRDCKEGTRRLLQELSKLGYRVSAKKAQLCREEVTYLGYLLKGGKRWLTPARKATVMKIPTPTTPRQVREFLGTAGFCRLWIPGFASLAAPLYPLTRPKVPFTWTEAHQEAFGRIKEALLSAPALALPDLTKPFALYVDEKEGVARGVLTQTLGPWRRPVAYLSKKLDPVASGWPTCLKAIAAVALLLKDADKLTLGQNVLVIAPHNLESIVRQPPDRWMTNARMTHYQSLLLNERVSFAPPAILNPATLLPVESDDTPIHICSEILAEETGTRPDLRDQPLPGVPAWYTDGSSFIMDGRRQAGAAIVDNKRTVWASNLPEGTSAQKAELIALTQALRLAEGKSINIYTDSRYAFATAHVHGAIYKQRGWLTSAGKDIKNKEEILALLEAIHLPKRVAIIHCPGHQRGTDPVATGNRKADEAAKQAAQSTRILTETTKNAGKRTADGSEFEKRTADGSEFESPKKKAKVE

SEQ ID NO: 6308 - protein, 2094 aa, synthetic construct
MPAAKRVKLDGGDKKYSIGLDIGTNSVGWAVITDEYKVPSKKFKVLGNTDRHSIKKNLIGALLFDSGETAEATRLKRTARRRYTRRKNRICYLQEIFSNEMAKVDDSFFHRLEESFLVEEDKKHERHPIFGNIVDEVAYHEKYPTIYHLRKKLVDSTDKADLRLIYLALAHMIKFRGHFLIEGDLNPDNSDVDKLFIQLVQTYNQLFEENPINASGVDAKAILSARLSKSRRLENLIAQLPGEKKNGLFGNLIALSLGLTPNFKSNFDLAEDAKLQLSKDTYDDDLDNLLAQIGDQYADLFLAAKNLSDAILLSDILRVNTEITKAPLSASMIKRYDEHHQDLTLLKALVRQQLPEKYKEIFFDQSKNGYAGYIDGGASQEEFYKFIKPILEKMDGTEELLVKLNREDLLRKQRTFDNGSIPHQIHLGELHAILRRQEDFYPFLKDNREKIEKILTFRIPYYVGPLARGNSRFAWMTRKSEETITPWNFEEVVDKGASAQSFIERMTNFDKNLPNEKVLPKHSLLYEYFTVYNELTKVKYVTEGMRKPAFLSGEQKKAIVDLLFKTNRKVTVKQLKEDYFKKIECFDSVEISGVEDRFNASLGTYHDLLKIIKDKDFLDNEENEDILEDIVLTLTLFEDREMIEERLKTYAHLFDDKVMKQLKRRRYTGWGRLSRKLINGIRDKQSGKTILDFLKSDGFANRNFMQLIHDDSLTFKEDIQKAQVSGQGDSLHEHIANLAGSPAIKKGILQTVKVVDELVKVMGRHKPENIVIEMARENQTTQKGQKNSRERMKRIEEGIKELGSQILKEHPVENTQLQNEKLYLYYLQNGRDMYVDQELDINRLSDYDVDHIVPQSFLKDDSIDNKVLTRSDKARGKSDNVPSEEVVKKMKNYWRQLLNAKLITQRKFDNLTKAERGGLSELDKAGFIKRQLVETRQITKHVAQILDSRMNTKYDENDKLIREVKVITLKSKLVSDFRKDFQFYKVREINNYHHAHDAYLNAVVGTALIKKYPKLESEFVYGDYKVYDVRKMIAKSEQEIGKATAKYFFYSNIMNFFKTEITLANGEIRKRPLIETNGETGEIVWDKGRDFATVRKVLSMPQVNIVKKTEVQTGGFSKESILPKRNSDKLIARKKDWDPKKYGGFDSPTVAYSVLVVAKVEKGKSKKLKSVKELLGITIMERSSFEKNPIDFLEAKGYKEVKKDLIIKLPKYSLFELENGRKRMLASAGELQKGNELALPSKYVNFLYLASHYEKLKGSPEDNEQKQLFVEQHKHYLDEIIEQISEFSKRVILADANLDKVLSAYNKHRDKPIREQAENIIHLFTLTNLGAPAAFKYFDTTIDRKRYTSTKEVLDATLIHQSITGLYETRIDLSQLGGDGGGSSGSSGSSGGTLNLEDEYRLYETSAEPEVSPGSTWLSDFPQAWAETGGMGLAVRQAPLIIPLKATSTPVSIKQYPMSQEAKLGIKPHIQRLLDQGILVPCQSPWNTPLLPVKKPGTNDYRPVQDLREVNKRVEDIHPTVPNPYNLLSGLPPSHRWYTVLDLKDAFFCLRLHPTSQPLFAFEWRDPGMGISGQLTWTRLPQGFKNSPTLFNEALHRDLADFRIQHPDLILLQYVDDILLAATSELDCQQGTRALLLTLGNLGYRASAKKAQLCQKQVKYLGYLLKEGQRWLTEARKETVMGQPTPKTPRQLREFLGTAGFCRLWIPGFAEMAAPLYPLTKPGTLFNWGPDQQKAYQEIKQALLTAPALGLPDLTKPFELFVDEKQGYAKGVLTQKLGPWRRPVAYLSKKLDPVAAGWPPCLRMVAAIAVLRKDAGKLTMGQPLVILAPHAVEALVKQPPDRWLSNARMTHYQAMLLDTDRVQFGPVVALNPATLLPLPEEGAPHDCLEILAETHGTRPDLTDQPIPDADHTWYTDGSSFLQEGQRKAGAAVTTETEVIWARALPAGTSAQRAELIALTQALKMAEGKRLNVYTDSRYAFATAHIHGEIYRRRGWLTSEGREIKNKSEILALLKALFLPKRLSIIHCLGHQKGDSAEARGNRLADQAAREAAIKTPPDTSTLLAGKRTADGSEFEKRTADGSEFESPKKKAKVE

SEQ ID NO: 6309 - protein, 2094 aa, synthetic construct
MPAAKRVKLDGGDKKYSIGLDIGTNSVGWAVITDEYKVPSKKFKVLGNTDRHSIKKNLIGALLFDSGETAEATRLKRTARRRYTRRKNRICYLQEIFSNEMAKVDDSFFHRLEESFLVEEDKKHERHPIFGNIVDEVAYHEKYPTIYHLRKKLVDSTDKADLRLIYLALAHMIKFRGHFLIEGDLNPDNSDVDKLFIQLVQTYNQLFEENPINASGVDAKAILSARLSKSRRLENLIAQLPGEKKNGLFGNLIALSLGLTPNFKSNFDLAEDAKLQLSKDTYDDDLDNLLAQIGDQYADLFLAAKNLSDAILLSDILRVNTEITKAPLSASMIKRYDEHHQDLTLLKALVRQQLPEKYKEIFFDQSKNGYAGYIDGGASQEEFYKFIKPILEKMDGTEELLVKLNREDLLRKQRTFDNGSIPHQIHLGELHAILRRQEDFYPFLKDNREKIEKILTFRIPYYVGPLARGNSRFAWMTRKSEETITPWNFEEVVDKGASAQSFIERMTNFDKNLPNEKVLPKHSLLYEYFTVYNELTKVKYVTEGMRKPAFLSGEQKKAIVDLLFKTNRKVTVKQLKEDYFKKIECFDSVEISGVEDRFNASLGTYHDLLKIIKDKDFLDNEENEDILEDIVLTLTLFEDREMIEERLKTYAHLFDDKVMKQLKRRRYTGWGRLSRKLINGIRDKQSGKTILDFLKSDGFANRNFMQLIHDDSLTFKEDIQKAQVSGQGDSLHEHIANLAGSPAIKKGILQTVKVVDELVKVMGRHKPENIVIEMARENQTTQKGQKNSRERMKRIEEGIKELGSQILKEHPVENTQLQNEKLYLYYLQNGRDMYVDQELDINRLSDYDVDHIVPQSFLKDDSIDNKVLTRSDKARGKSDNVPSEEVVKKMKNYWRQLLNAKLITQRKFDNLTKAERGGLSELDKAGFIKRQLVETRQITKHVAQILDSRMNTKYDENDKLIREVKVITLKSKLVSDFRKDFQFYKVREINNYHHAHDAYLNAVVGTALIKKYPKLESEFVYGDYKVYDVRKMIAKSEQEIGKATAKYFFYSNIMNFFKTEITLANGEIRKRPLIETNGETGEIVWDKGRDFATVRKVLSMPQVNIVKKTEVQTGGFSKESILPKRNSDKLIARKKDWDPKKYGGFDSPTVAYSVLVVAKVEKGKSKKLKSVKELLGITIMERSSFEKNPIDFLEAKGYKEVKKDLIIKLPKYSLFELENGRKRMLASAGELQKGNELALPSKYVNFLYLASHYEKLKGSPEDNEQKQLFVEQHKHYLDEIIEQISEFSKRVILADANLDKVLSAYNKHRDKPIREQAENIIHLFTLTNLGAPAAFKYFDTTIDRKRYTSTKEVLDATLIHQSITGLYETRIDLSQLGGDGGGSSGSSGSSGGTLGIEDEYRLHETSTEPDVSLGSTWLSDFPQAWAETGGMGLAVRQAPLIIPLKATSTPVSIQQYPMSHEARLGIKPHIQRLLDQGILVPCQSPWNTPLLPVKKPGTNDYRPVQDLREVNKRVEDIHPTVPNPYNLLSGLPPSHQWYTVLDLKDAFFCLRLHPTSQPLFAFEWRDPGMGISGQLTWTRLPQGFKNSPTLFDEALHRDLADFRIQHPDLILLQYVDDILLAATSELDCQQGTRALLQTLGDLGYRASAKKAQICQKQVKYLGYLLREGQRWLTEARKETVMGQPVPKTPRQLREFLGTAGFCRLWIPGFAEMAAPLYPLTKTGTLFSWGPDQQKAYQEIKQALLTAPALGLPDLTKPFELFVDEKQGYAKGVLTQKLGPWRRPVAYLSKKLDPVAAGWPPCLRMVAAIAVLTKDAGKLTMGQPLVILAPHAVEALVKQPPDRWLSNARMTHYQAMLLDTDRVQFGPVVALNPATLLPLPEEGAPHDCLEILAETHGTRPDLTDQPIPDADHTWYTDGSSFLQEGQRKAGAAVTTETEVIWAGALPAGTSAQRAELIALTQALKMAEGKRLNVYTDSRYAFATAHIHGEIYRRRGLLTSEGREIKNKSEILALLKALFLPKRLSIIHCLGHQKGDSAEARGNRLADQAAREAAIKTPPDTSTLLAGKRTADGSEFEKRTADGSEFESPKKKAKVE

SEQ ID NO: 6310 - protein, 2094 aa, synthetic construct
MPAAKRVKLDGGDKKYSIGLDIGTNSVGWAVITDEYKVPSKKFKVLGNTDRHSIKKNLIGALLFDSGETAEATRLKRTARRRYTRRKNRICYLQEIFSNEMAKVDDSFFHRLEESFLVEEDKKHERHPIFGNIVDEVAYHEKYPTIYHLRKKLVDSTDKADLRLIYLALAHMIKFRGHFLIEGDLNPDNSDVDKLFIQLVQTYNQLFEENPINASGVDAKAILSARLSKSRRLENLIAQLPGEKKNGLFGNLIALSLGLTPNFKSNFDLAEDAKLQLSKDTYDDDLDNLLAQIGDQYADLFLAAKNLSDAILLSDILRVNTEITKAPLSASMIKRYDEHHQDLTLLKALVRQQLPEKYKEIFFDQSKNGYAGYIDGGASQEEFYKFIKPILEKMDGTEELLVKLNREDLLRKQRTFDNGSIPHQIHLGELHAILRRQEDFYPFLKDNREKIEKILTFRIPYYVGPLARGNSRFAWMTRKSEETITPWNFEEVVDKGASAQSFIERMTNFDKNLPNEKVLPKHSLLYEYFTVYNELTKVKYVTEGMRKPAFLSGEQKKAIVDLLFKTNRKVTVKQLKEDYFKKIECFDSVEISGVEDRFNASLGTYHDLLKIIKDKDFLDNEENEDILEDIVLTLTLFEDREMIEERLKTYAHLFDDKVMKQLKRRRYTGWGRLSRKLINGIRDKQSGKTILDFLKSDGFANRNFMQLIHDDSLTFKEDIQKAQVSGQGDSLHEHIANLAGSPAIKKGILQTVKVVDELVKVMGRHKPENIVIEMARENQTTQKGQKNSRERMKRIEEGIKELGSQILKEHPVENTQLQNEKLYLYYLQNGRDMYVDQELDINRLSDYDVDHIVPQSFLKDDSIDNKVLTRSDKARGKSDNVPSEEVVKKMKNYWRQLLNAKLITQRKFDNLTKAERGGLSELDKAGFIKRQLVETRQITKHVAQILDSRMNTKYDENDKLIREVKVITLKSKLVSDFRKDFQFYKVREINNYHHAHDAYLNAVVGTALIKKYPKLESEFVYGDYKVYDVRKMIAKSEQEIGKATAKYFFYSNIMNFFKTEITLANGEIRKRPLIETNGETGEIVWDKGRDFATVRKVLSMPQVNIVKKTEVQTGGFSKESILPKRNSDKLIARKKDWDPKKYGGFDSPTVAYSVLVVAKVEKGKSKKLKSVKELLGITIMERSSFEKNPIDFLEAKGYKEVKKDLIIKLPKYSLFELENGRKRMLASAGELQKGNELALPSKYVNFLYLASHYEKLKGSPEDNEQKQLFVEQHKHYLDEIIEQISEFSKRVILADANLDKVLSAYNKHRDKPIREQAENIIHLFTLTNLGAPAAFKYFDTTIDRKRYTSTKEVLDATLIHQSITGLYETRIDLSQLGGDGGGSSGSSGSSGGTLNIEDEYRLHETSKEPDVSLGSTWLSDFPQAWAETGGMGLAVRQAPLIIPLKATSTPVSIKQYPMSQEARLGIKPHIQRLLDQGILVPCQSPWNTPLLPVKKPGTNDYRPVQDLREVNKRVEDIHPTVPNPYNLLSGLPPSHQWYTVLDLKDAFFCLRLHPTSQPLFAFEWRDPEMGISGQLTWTRLPQGFKNSPTLFNEALHRDLAGFRIQHPDLILLQYVDDLLLAATSELDCQQGTRALLQTLGDLGYRASAKKAQICQKQVKYLGYLLKEGQRWLTEARKETVMGQPIPKTPRQLREFLGTAGFCRLWIPGFAEMAAPLYPLTKPGTLFNWGPDQQKAFQEIKQALLTAPALGLPDLTKPFELFVDEKQGYAKGVLTQKLGPWRRPVAYLSKKLDPVAAGWPPCLRMVAAIAVLTKDAGKLTMGQPLVILAPHAVEALVKQPPDRWLSNARMTHYQALLLDTDRVQFGPVVALNPATLLPLPEEGLQHDCLDILAEAHGTRSDLMDQPLPDADHTWYTDGSSFLQEGQRKAGAAVTTETEVIWARALPAGTSAQRAELIALTQALKMAEGKKLNVYTDSRYAFATAHIHGEIYRRRGWLTSEGKEIKNKDEILALLKALFLPKRLSIIHCPGHQKGNSAEARGNRMADQAAREVATRETPETSTLLAGKRTADGSEFEKRTADGSEFESPKKKAKVE

SEQ ID NO: 6311 - protein, 2094 aa, synthetic construct; identical to SEQ ID NO: 4505

SEQ ID NO: 6312 - protein, 2094 aa, synthetic construct; identical to SEQ ID NO: 4505

SEQ ID NO: 6313 - protein, 2088 aa, synthetic construct
MPAAKRVKLDGGDKKYSIGLDIGTNSVGWAVITDEYKVPSKKFKVLGNTDRHSIKKNLIGALLFDSGETAEATRLKRTARRRYTRRKNRICYLQEIFSNEMAKVDDSFFHRLEESFLVEEDKKHERHPIFGNIVDEVAYHEKYPTIYHLRKKLVDSTDKADLRLIYLALAHMIKFRGHFLIEGDLNPDNSDVDKLFIQLVQTYNQLFEENPINASGVDAKAILSARLSKSRRLENLIAQLPGEKKNGLFGNLIALSLGLTPNFKSNFDLAEDAKLQLSKDTYDDDLDNLLAQIGDQYADLFLAAKNLSDAILLSDILRVNTEITKAPLSASMIKRYDEHHQDLTLLKALVRQQLPEKYKEIFFDQSKNGYAGYIDGGASQEEFYKFIKPILEKMDGTEELLVKLNREDLLRKQRTFDNGSIPHQIHLGELHAILRRQEDFYPFLKDNREKIEKILTFRIPYYVGPLARGNSRFAWMTRKSEETITPWNFEEVVDKGASAQSFIERMTNFDKNLPNEKVLPKHSLLYEYFTVYNELTKVKYVTEGMRKPAFLSGEQKKAIVDLLFKTNRKVTVKQLKEDYFKKIECFDSVEISGVEDRFNASLGTYHDLLKIIKDKDFLDNEENEDILEDIVLTLTLFEDREMIEERLKTYAHLFDDKVMKQLKRRRYTGWGRLSRKLINGIRDKQSGKTILDFLKSDGFANRNFMQLIHDDSLTFKEDIQKAQVSGQGDSLHEHIANLAGSPAIKKGILQTVKVVDELVKVMGRHKPENIVIEMARENQTTQKGQKNSRERMKRIEEGIKELGSQILKEHPVENTQLQNEKLYLYYLQNGRDMYVDQELDINRLSDYDVDHIVPQSFLKDDSIDNKVLTRSDKARGKSDNVPSEEVVKKMKNYWRQLLNAKLITQRKFDNLTKAERGGLSELDKAGFIKRQLVETRQITKHVAQILDSRMNTKYDENDKLIREVKVITLKSKLVSDFRKDFQFYKVREINNYHHAHDAYLNAVVGTALIKKYPKLESEFVYGDYKVYDVRKMIAKSEQEIGKATAKYFFYSNIMNFFKTEITLANGEIRKRPLIETNGETGEIVWDKGRDFATVRKVLSMPQVNIVKKTEVQTGGFSKESILPKRNSDKLIARKKDWDPKKYGGFDSPTVAYSVLVVAKVEKGKSKKLKSVKELLGITIMERSSFEKNPIDFLEAKGYKEVKKDLIIKLPKYSLFELENGRKRMLASAGELQKGNELALPSKYVNFLYLASHYEKLKGSPEDNEQKQLFVEQHKHYLDEIIEQISEFSKRVILADANLDKVLSAYNKHRDKPIREQAENIIHLFTLTNLGAPAAFKYFDTTIDRKRYTSTKEVLDATLIHQSITGLYETRIDLSQLGGDGGGSSGSSGSSGGTLQLDDEYRLYSPLVKPDQNIQFWLEQFPQAWAETAGMGLAKQVPPQVIQLKASATPVSVRQYPLSKEAQEGIRPHVQRLIQQGILVPVQSPWNTPLLPVRKPGTNDYRPVQDLREVNKRVQDIHPTVPNPYNLLCALPPQRSWYTVLDLKDAFFCLRLHPTSQPLFAFEWRDPGTGRTGQLTWTRLPQGFKNSPTIFDEALHRDLANFRIQHPQVTLLQYVDDLLLAGATKQDCLEGTKALLLELSDLGYRASAKKAQICRREVTYLGYSLRDGQRWLTEARKKTVVQIPAPTTAKQVREFLGTAGFCRLWIPGFATLAAPLYPLTKEKGEFSWAPEHQKAFDAIKKALLSAPALALPDVTKPFTLYVDERKGVARGVLTQTLGPWRRPVAYLSKKLDPVASGWPVCLKAIAAVAILVKDADKLTLGQNITVIAPHALENIVRQPPDRWMTNARMTHYQSLLLTERVTFAPPAALNPATLLPEETDEPVTHDCHQLLIEETGVRKDLTDIPLTGEVLTWFTDGSSYVVEGKRMAGAAVVDGTRTIWASSLPEGTSAQKAELMALTQALRLAEGKSINIYTDSRYAFATAHVHGAIYKQRGLLTSAGREIKNKEEILSLLEALHLPKRLAIIHCPGHQKAKDPISRGNQMADRVAKQAAQGVNLLAGKRTADGSEFEKRTADGSEFESPKKKAKVE

SEQ ID NO: 6314 - protein, 2088 aa, synthetic construct; identical to SEQ ID NO: 6313

SEQ ID NO: 6315 - protein, 2099 aa, synthetic construct
MPAAKRVKLDGGDKKYSIGLDIGTNSVGWAVITDEYKVPSKKFKVLGNTDRHSIKKNLIGALLFDSGETAEATRLKRTARRRYTRRKNRICYLQEIFSNEMAKVDDSFFHRLEESFLVEEDKKHERHPIFGNIVDEVAYHEKYPTIYHLRKKLVDSTDKADLRLIYLALAHMIKFRGHFLIEGDLNPDNSDVDKLFIQLVQTYNQLFEENPINASGVDAKAILSARLSKSRRLENLIAQLPGEKKNGLFGNLIALSLGLTPNFKSNFDLAEDAKLQLSKDTYDDDLDNLLAQIGDQYADLFLAAKNLSDAILLSDILRVNTEITKAPLSASMIKRYDEHHQDLTLLKALVRQQLPEKYKEIFFDQSKNGYAGYIDGGASQEEFYKFIKPILEKMDGTEELLVKLNREDLLRKQRTFDNGSIPHQIHLGELHAILRRQEDFYPFLKDNREKIEKILTFRIPYYVGPLARGNSRFAWMTRKSEETITPWNFEEVVDKGASAQSFIERMTNFDKNLPNEKVLPKHSLLYEYFTVYNELTKVKYVTEGMRKPAFLSGEQKKAIVDLLFKTNRKVTVKQLKEDYFKKIECFDSVEISGVEDRFNASLGTYHDLLKIIKDKDFLDNEENEDILEDIVLTLTLFEDREMIEERLKTYAHLFDDKVMKQLKRRRYTGWGRLSRKLINGIRDKQSGKTILDFLKSDGFANRNFMQLIHDDSLTFKEDIQKAQVSGQGDSLHEHIANLAGSPAIKKGILQTVKVVDELVKVMGRHKPENIVIEMARENQTTQKGQKNSRERMKRIEEGIKELGSQILKEHPVENTQLQNEKLYLYYLQNGRDMYVDQELDINRLSDYDVDHIVPQSFLKDDSIDNKVLTRSDKARGKSDNVPSEEVVKKMKNYWRQLLNAKLITQRKFDNLTKAERGGLSELDKAGFIKRQLVETRQITKHVAQILDSRMNTKYDENDKLIREVKVITLKSKLVSDFRKDFQFYKVREINNYHHAHDAYLNAVVGTALIKKYPKLESEFVYGDYKVYDVRKMIAKSEQEIGKATAKYFFYSNIMNFFKTEITLANGEIRKRPLIETNGETGEIVWDKGRDFATVRKVLSMPQVNIVKKTEVQTGGFSKESILPKRNSDKLIARKKDWDPKKYGGFDSPTVAYSVLVVAKVEKGKSKKLKSVKELLGITIMERSSFEKNPIDFLEAKGYKEVKKDLIIKLPKYSLFELENGRKRMLASAGELQKGNELALPSKYVNFLYLASHYEKLKGSPEDNEQKQLFVEQHKHYLDEIIEQISEFSKRVILADANLDKVLSAYNKHRDKPIREQAENIIHLFTLTNLGAPAAFKYFDTTIDRKRYTSTKEVLDATLIHQSITGLYETRIDLSQLGGDGGGSSGSSGSSGSSGGTAPLEEEYRLFLEAPIQNVTLLEQWKREIPKVWAEINPPGLASTQAPIHVQLLSTALPVRVRQYPITLEAKRSLRETIRKFRAAGILRPVHSPWNTPLLPVRKSGTSEYRMVQDLREVNKRVETIHPTVPNPYTLLSLLPPDRIWYSVLDLKDAFFCIPLAPESQLIFAFEWADAEEGESGQLTWTRLPQGFKNSPTLFDEALNRDLQGFRLDHPSVSLLQYVDDLLIAADTQAACLSATRDLLMTLAELGYRVSGKKAQLCQEEVTYLGFKIHKGSRSLSNSRTQAILQIPVPKTKRQVREFLGTIGYCRLWIPGFAELAQPLYAATRGGNDPLVWGEKEEEAFQSLKLALTQPPALALPSLDKPFQLFVEETSGAAKGVLTQALGPWKRPVAYLSKRLDPVAAGWPRCLRAIAAAALLTREASKLTFGQDIEITSSHNLESLLRSPPDKWLTNARITQYQVLLLDPPRVRFKQTAALNPATLLPETDDTLPIHHCLDTLDSLTSTRPDLTDQPLAQAEATLFTDGSSYIRDGKRYAGAAVVTLDSVIWAEPLPIGTSAQKAELIALTKALEWSKDKSVNIYTDSRYAFATLHVHGMIYRERGLLTAGGKAIKNAPEILALLTAVWLPKRVAVMHCKGHQKDDAPTSTGNRRADEVAREVAIRPLSTQATISAGKRTADGSEFEKRTADGSEFESPKKKAKVE

SEQ ID NO: 6316 - protein, 2099 aa, synthetic construct
MPAAKRVKLDGGDKKYSIGLDIGTNSVGWAVITDEYKVPSKKFKVLGNTDRHSIKKNLIGALLFDSGETAEATRLKRTARRRYTRRKNRICYLQEIFSNEMAKVDDSFFHRLEESFLVEEDKKHERHPIFGNIVDEVAYHEKYPTIYHLRKKLVDSTDKADLRLIYLALAHMIKFRGHFLIEGDLNPDNSDVDKLFIQLVQTYNQLFEENPINASGVDAKAILSARLSKSRRLENLIAQLPGEKKNGLFGNLIALSLGLTPNFKSNFDLAEDAKLQLSKDTYDDDLDNLLAQIGDQYADLFLAAKNLSDAILLSDILRVNTEITKAPLSASMIKRYDEHHQDLTLLKALVRQQLPEKYKEIFFDQSKNGYAGYIDGGASQEEFYKFIKPILEKMDGTEELLVKLNREDLLRKQRTFDNGSIPHQIHLGELHAILRRQEDFYPFLKDNREKIEKILTFRIPYYVGPLARGNSRFAWMTRKSEETITPWNFEEVVDKGASAQSFIERMTNFDKNLPNEKVLPKHSLLYEYFTVYNELTKVKYVTEGMRKPAFLSGEQKKAIVDLLFKTNRKVTVKQLKEDYFKKIECFDSVEISGVEDRFNASLGTYHDLLKIIKDKDFLDNEENEDILEDIVLTLTLFEDREMIEERLKTYAHLFDDKVMKQLKRRRYTGWGRLSRKLINGIRDKQSGKTILDFLKSDGFANRNFMQLIHDDSLTFKEDIQKAQVSGQGDSLHEHIANLAGSPAIKKGILQTVKVVDELVKVMGRHKPENIVIEMARENQTTQKGQKNSRERMKRIEEGIKELGSQILKEHPVENTQLQNEKLYLYYLQNGRDMYVDQELDINRLSDYDVDHIVPQSFLKDDSIDNKVLTRSDKARGKSDNVPSEEVVKKMKNYWRQLLNAKLITQRKFDNLTKAERGGLSELDKAGFIKRQLVETRQITKHVAQILDSRMNTKYDENDKLIREVKVITLKSKLVSDFRKDFQFYKVREINNYHHAHDAYLNAVVGTALIKKYPKLESEFVYGDYKVYDVRKMIAKSEQEIGKATAKYFFYSNIMNFFKTEITLANGEIRKRPLIETNGETGEIVWDKGRDFATVRKVLSMPQVNIVKKTEVQTGGFSKESILPKRNSDKLIARKKDWDPKKYGGFDSPTVAYSVLVVAKVEKGKSKKLKSVKELLGITIMERSSFEKNPIDFLEAKGYKEVKKDLIIKLPKYSLFELENGRKRMLASAGELQKGNELALPSKYVNFLYLASHYEKLKGSPEDNEQKQLFVEQHKHYLDEIIEQISEFSKRVILADANLDKVLSAYNKHRDKPIREQAENIIHLFTLTNLGAPAAFKYFDTTIDRKRYTSTKEVLDATLIHQSITGLYETRIDLSQLGGDGGGSSGSSGSSGSSGGTAPLEEEYRLFLEAPIQNVTLLEQWKREIPKVWAEINPPGLASTQAPIHVQLLSTALPVRVRQYPITLEAKRSLRETIRKFRAAGILRPVHSPWNTPLLPVRKSGTSEYRMVQDLREVNKRVETIHPTVPNPYTLLSLLPPDRIWYSVLDLKDAFFCIPLAPESQLIFAFEWADAEEGESGQLTWTRLPQGFKNSPTLFNEALNRDLQGFRLDHPSVSLLQYVDDLLIAADTQAACLSATRDLLMTLAELGYRVSGKKAQLCQEEVTYLGFKIHKGSRSLSNSRTQAILQIPVPKTKRQVREFLGTIGYCRLWIPGFAELAQPLYAATRPGNDPLVWGEKEEEAFQSLKLALTQPPALALPSLDKPFQLFVEETSGAAKGVLTQALGPWKRPVAYLSKRLDPVAAGWPRCLRAIAAAALLTREASKLTFGQDIEITSSHNLESLLRSPPDKWLTNARITQYQVLLLDPPRVRFKQTAALNPATLLPETDDTLPIHHCLDTLDSLTSTRPDLTDQPLAQAEATLFTDGSSYIRDGKRYAGAAVVTLDSVIWAEPLPIGTSAQKAELIALTKALEWSKDKSVNIYTDSRYAFATLHVHGMIYRERGWLTAGGKAIKNAPEILALLTAVWLPKRVAVMHCKGHQKDDAPTSTGNRRADEVAREVAIRPLSTQATISAGKRTADGSEFEKRTADGSEFESPKKKAKVE

SEQ ID NO: 6317 - protein, 2103 aa, synthetic construct
MPAAKRVKLDGGDKKYSIGLDIGTNSVGWAVITDEYKVPSKKFKVLGNTDRHSIKKNLIGALLFDSGETAEATRLKRTARRRYTRRKNRICYLQEIFSNEMAKVDDSFFHRLEESFLVEEDKKHERHPIFGNIVDEVAYHEKYPTIYHLRKKLVDSTDKADLRLIYLALAHMIKFRGHFLIEGDLNPDNSDVDKLFIQLVQTYNQLFEENPINASGVDAKAILSARLSKSRRLENLIAQLPGEKKNGLFGNLIALSLGLTPNFKSNFDLAEDAKLQLSKDTYDDDLDNLLAQIGDQYADLFLAAKNLSDAILLSDILRVNTEITKAPLSASMIKRYDEHHQDLTLLKALVRQQLPEKYKEIFFDQSKNGYAGYIDGGASQEEFYKFIKPILEKMDGTEELLVKLNREDLLRKQRTFDNGSIPHQIHLGELHAILRRQEDFYPFLKDNREKIEKILTFRIPYYVGPLARGNSRFAWMTRKSEETITPWNFEEVVDKGASAQSFIERMTNFDKNLPNEKVLPKHSLLYEYFTVYNELTKVKYVTEGMRKPAFLSGEQKKAIVDLLFKTNRKVTVKQLKEDYFKKIECFDSVEISGVEDRFNASLGTYHDLLKIIKDKDFLDNEENEDILEDIVLTLTLFEDREMIEERLKTYAHLFDDKVMKQLKRRRYTGWGRLSRKLINGIRDKQSGKTILDFLKSDGFANRNFMQLIHDDSLTFKEDIQKAQVSGQGDSLHEHIANLAGSPAIKKGILQTVKVVDELVKVMGRHKPENIVIEMARENQTTQKGQKNSRERMKRIEEGIKELGSQILKEHPVENTQLQNEKLYLYYLQNGRDMYVDQELDINRLSDYDVDHIVPQSFLKDDSIDNKVLTRSDKARGKSDNVPSEEVVKKMKNYWRQLLNAKLITQRKFDNLTKAERGGLSELDKAGFIKRQLVETRQITKHVAQILDSRMNTKYDENDKLIREVKVITLKSKLVSDFRKDFQFYKVREINNYHHAHDAYLNAVVGTALIKKYPKLESEFVYGDYKVYDVRKMIAKSEQEIGKATAKYFFYSNIMNFFKTEITLANGEIRKRPLIETNGETGEIVWDKGRDFATVRKVLSMPQVNIVKKTEVQTGGFSKESILPKRNSDKLIARKKDWDPKKYGGFDSPTVAYSVLVVAKVEKGKSKKLKSVKELLGITIMERSSFEKNPIDFLEAKGYKEVKKDLIIKLPKYSLFELENGRKRMLASAGELQKGNELALPSKYVNFLYLASHYEKLKGSPEDNEQKQLFVEQHKHYLDEIIEQISEFSKRVILADANLDKVLSAYNKHRDKPIREQAENIIHLFTLTNLGAPAAFKYFDTTIDRKRYTSTKEVLDATLIHQSITGLYETRIDLSQLGGDGGGSSGSSGSSGSSGGTVSLQDEHRLFDIPVTTSLPDVWLQDFPQAWAETGGLGRAKCQAPIIIDLKPTAVPVSIKQYPMSLEAHMGIRQHIIKFLELGVLRPCRSPWNTPLLPVKKPGTQDYRPVQDLREINKRTVDIHPTVPNPYNLLSTLKPDYSWYTVLDLKDAFFCLPLAPQSQELFAFEWKDPERGISGQLTWTRLPQGFKNSPTLFNEALHRDLTDFRTQHPEVTLLQYVDDLLLAAPTKKACTQGTRHLLQELGEKGYRASAKKAQICQTKVTYLGYILSEGKRWLTPGRIETVARIPPPRNPREVREFLGTAGFCRLWIPGFAELAAPLYALTKPSTPFTWQTEHQLAFEALKKALLSAPALGLPDTSKPFTLFLDERQGIAKGVLTQKLGPWKRPVAYLSKKLDPVAAGWPPCLRIMAATAMLVKDSAKLTLGQPLTVITPHTLEAIVRQPPDRWITNARLTHYQALLLDTDRVQFGPPVTLNPATLLPVPENQPSPHDCRQVLAETHGTREDLKDQELPDADHTWYTDGSSYLDSGTRRAGAAVVDGHNTIWAQSLPPGTSAQKAELIALTKALELSKGKKANIYTDSRYAFATAHTHGSIYERRGWLTSEGKEIKNKAEIIALLKALFLPQEVAIIHCPGHQKGQDPVAVGNRQADRVARQAAMAEVLTLATEPDNTSHITAGKRTADGSEFEKRTADGSEFESPKKKAKVE

SEQ ID NO: 6318 - protein, 2096 aa, synthetic construct
MPAAKRVKLDGGDKKYSIGLDIGTNSVGWAVITDEYKVPSKKFKVLGNTDRHSIKKNLIGALLFDSGETAEATRLKRTARRRYTRRKNRICYLQEIFSNEMAKVDDSFFHRLEESFLVEEDKKHERHPIFGNIVDEVAYHEKYPTIYHLRKKLVDSTDKADLRLIYLALAHMIKFRGHFLIEGDLNPDNSDVDKLFIQLVQTYNQLFEENPINASGVDAKAILSARLSKSRRLENLIAQLPGEKKNGLFGNLIALSLGLTPNFKSNFDLAEDAKLQLSKDTYDDDLDNLLAQIGDQYADLFLAAKNLSDAILLSDILRVNTEITKAPLSASMIKRYDEHHQDLTLLKALVRQQLPEKYKEIFFDQSKNGYAGYIDGGASQEEFYKFIKPILEKMDGTEELLVKLNREDLLRKQRTFDNGSIPHQIHLGELHAILRRQEDFYPFLKDNREKIEKILTFRIPYYVGPLARGNSRFAWMTRKSEETITPWNFEEVVDKGASAQSFIERMTNFDKNLPNEKVLPKHSLLYEYFTVYNELTKVKYVTEGMRKPAFLSGEQKKAIVDLLFKTNRKVTVKQLKEDYFKKIECFDSVEISGVEDRFNASLGTYHDLLKIIKDKDFLDNEENEDILEDIVLTLTLFEDREMIEERLKTYAHLFDDKVMKQLKRRRYTGWGRLSRKLINGIRDKQSGKTILDFLKSDGFANRNFMQLIHDDSLTFKEDIQKAQVSGQGDSLHEHIANLAGSPAIKKGILQTVKVVDELVKVMGRHKPENIVIEMARENQTTQKGQKNSRERMKRIEEGIKELGSQILKEHPVENTQLQNEKLYLYYLQNGRDMYVDQELDINRLSDYDVDHIVPQSFLKDDSIDNKVLTRSDKARGKSDNVPSEEVVKKMKNYWRQLLNAKLITQRKFDNLTKAERGGLSELDKAGFIKRQLVETRQITKHVAQILDSRMNTKYDENDKLIREVKVITLKSKLVSDFRKDFQFYKVREINNYHHAHDAYLNAVVGTALIKKYPKLESEFVYGDYKVYDVRKMIAKSEQEIGKATAKYFFYSNIMNFFKTEITLANGEIRKRPLIETNGETGEIVWDKGRDFATVRKVLSMPQVNIVKKTEVQTGGFSKESILPKRNSDKLIARKKDWDPKKYGGFDSPTVAYSVLVVAKVEKGKSKKLKSVKELLGITIMERSSFEKNPIDFLEAKGYKEVKKDLIIKLPKYSLFELENGRKRMLASAGELQKGNELALPSKYVNFLYLASHYEKLKGSPEDNEQKQLFVEQHKHYLDEIIEQISEFSKRVILADANLDKVLSAYNKHRDKPIREQAENIIHLFTLTNLGAPAAFKYFDTTIDRKRYTSTKEVLDATLIHQSITGLYETRIDLSQLGGDGGGSSGSSGSSGSSGGTLQLEEEYRLFEPESTQKQEMDIWLKNFPQAWAETGGMGTAHCQAPVLIQLKATATPISIRQYPMPHEAYQGIKPHIRRMLDQGILKPCQSPWNTPLLPVKKPGTEDYRPVQDLREVNKRVEDIHPTVPNPYNLLSTLPPSHPWYTVLDLKDAFFCLRLHSESQLLFAFEWRDPEIGLSGQLTWTRLPQGFKNSPTLFNEALHSDLADFRVRYPALVLLQYVDDLLLAAATRTECLEGTKALLETLGNKGYRASAKKAQICLQEVTYLGYSLKDGQRWLTKARKEAILSIPVPKNSRQVREFLGTAGYCRLWIPGFAELAAPLYPLTRPGTLFQWGTEQQLAFEDIKKALLSSPALGLPDITKPFELFIDENSGFAKGVLVQKLGPWKRPVAYLSKKLDTVASGWPPCLRMVAAIAILVKDAGKLTLGQPLTILTSHPVEALVRQPPNKWLSNARMTHYQAMLLDAERVHFGPTVSLNPATLLPLPSGGNHHDCLQILAETHGTRPDLTDQPLPDADLTWYTDGSSFIRNGEREAGAAVTTESEVIWAAPLPPGTSAQRAELIALTQALKMAEGKKLTVYTDSRYAFATTHVHGEIYRRRGWLTSEGKEIKNKNEILALLEALFLPKRLSIIHCPGHQKGDSPQAKGNRLADDTAKKAATETHSSLTVLPAGKRTADGSEFEKRTADGSEFESPKKKAKVE

SEQ ID NO: 6319 - protein, 2219 aa, synthetic construct
MPAAKRVKLDGGDKKYSIGLDIGTNSVGWAVITDEYKVPSKKFKVLGNTDRHSIKKNLIGALLFDSGETAEATRLKRTARRRYTRRKNRICYLQEIFSNEMAKVDDSFFHRLEESFLVEEDKKHERHPIFGNIVDEVAYHEKYPTIYHLRKKLVDSTDKADLRLIYLALAHMIKFRGHFLIEGDLNPDNSDVDKLFIQLVQTYNQLFEENPINASGVDAKAILSARLSKSRRLENLIAQLPGEKKNGLFGNLIALSLGLTPNFKSNFDLAEDAKLQLSKDTYDDDLDNLLAQIGDQYADLFLAAKNLSDAILLSDILRVNTEITKAPLSASMIKRYDEHHQDLTLLKALVRQQLPEKYKEIFFDQSKNGYAGYIDGGASQEEFYKFIKPILEKMDGTEELLVKLNREDLLRKQRTFDNGSIPHQIHLGELHAILRRQEDFYPFLKDNREKIEKILTFRIPYYVGPLARGNSRFAWMTRKSEETITPWNFEEVVDKGASAQSFIERMTNFDKNLPNEKVLPKHSLLYEYFTVYNELTKVKYVTEGMRKPAFLSGEQKKAIVDLLFKTNRKVTVKQLKEDYFKKIECFDSVEISGVEDRFNASLGTYHDLLKIIKDKDFLDNEENEDILEDIVLTLTLFEDREMIEERLKTYAHLFDDKVMKQLKRRRYTGWGRLSRKLINGIRDKQSGKTILDFLKSDGFANRNFMQLIHDDSLTFKEDIQKAQVSGQGDSLHEHIANLAGSPAIKKGILQTVKVVDELVKVMGRHKPENIVIEMARENQTTQKGQKNSRERMKRIEEGIKELGSQILKEHPVENTQLQNEKLYLYYLQNGRDMYVDQELDINRLSDYDVDHIVPQSFLKDDSIDNKVLTRSDKARGKSDNVPSEEVVKKMKNYWRQLLNAKLITQRKFDNLTKAERGGLSELDKAGFIKRQLVETRQITKHVAQILDSRMNTKYDENDKLIREVKVITLKSKLVSDFRKDFQFYKVREINNYHHAHDAYLNAVVGTALIKKYPKLESEFVYGDYKVYDVRKMIAKSEQEIGKATAKYFFYSNIMNFFKTEITLANGEIRKRPLIETNGETGEIVWDKGRDFATVRKVLSMPQVNIVKKTEVQTGGFSKESILPKRNSDKLIARKKDWDPKKYGGFDSPTVAYSVLVVAKVEKGKSKKLKSVKELLGITIMERSSFEKNPIDFLEAKGYKEVKKDLIIKLPKYSLFELENGRKRMLASAGELQKGNELALPSKYVNFLYLASHYEKLKGSPEDNEQKQLFVEQHKHYLDEIIEQISEFSKRVILADANLDKVLSAYNKHRDKPIREQAENIIHLFTLTNLGAPAAFKYFDTTIDRKRYTSTKEVLDATLIHQSITGLYETRIDLSQLGGDGGGSSGSSGSSGSSGGTLGDQGSRGSDPLPEPRVTLTVEGIPTEFLVNTGAEHSVLTKPMGKMGSKRTVVAGATGSKVYPWTTKRLLKIGQKQVTHSFLVIPECPAPLLGRDLLTKLKAQIQFSTEGPQVTWEDRPAMCLVLNLEEEYRLHEKPVPPSIDPSWLQLFPMVWAEKAGMGLANQVPPVVVELKSDASPVAVRQYPMSKEAREGIRPHIQRFLDLGILVPCQSPWNTPLLPVKKPGTNDYRPVQDLREVNKRVQDIHPTVPNPYNLLSSLPPSHTWYSVLDLKDAFFCLKLHPNSQPLFAFEWRDPEKGNTGQLTWTRLPQGFKNSPTLFDEALHRDLASFRALNPQVVMLQYVDDLLVAAPTYRDCKEGTRRLLQELSKLGYRVSAKKAQLCREEVTYLGYLLKGGKRWLTPARKATVMKIPTPTTPRQVREFLGTAGFCRLWIPGFASLAAPLYPLTREKVPFTWTEAHQEAFGRIKEALLSAPALALPDLTKPFALYVDEKEGVARGVLTQTLGPWRRPVAYLSKKLDPVASGWPTCLKAIAAVALLLKDADKLTLGQNVLVIAPHNLESIVRQPPDRWMTNARMTHYQSLLLNERVSFAPPAILNPATLLPVESDDTPIHICSEILAEETGTRPDLRDQPLPGVPAWYTDGSSFIMDGRRQAGAAIVDNKRTVWASNLPEGTSAQKAELIALTQALRLAEGKSINIYTDSRYAFATAHVHGAIYKQRGLLTSAGKDIKNKEEILALLEAIHLPKRVAIIHCPGHQRGTDPVATGNRKADEAAKQAAQSTRILTETTKNAGKRTADGSEFEKRTADGSEFESPKKKAKVE

SEQ ID NO: 6320 - protein, 2128 aa, synthetic construct
MPAAKRVKLDGGDKKYSIGLDIGTNSVGWAVITDEYKVPSKKFKVLGNTDRHSIKKNLIGALLFDSGETAEATRLKRTARRRYTRRKNRICYLQEIFSNEMAKVDDSFFHRLEESFLVEEDKKHERHPIFGNIVDEVAYHEKYPTIYHLRKKLVDSTDKADLRLIYLALAHMIKFRGHFLIEGDLNPDNSDVDKLFIQLVQTYNQLFEENPINASGVDAKAILSARLSKSRRLENLIAQLPGEKKNGLFGNLIALSLGLTPNFKSNFDLAEDAKLQLSKDTYDDDLDNLLAQIGDQYADLFLAAKNLSDAILLSDILRVNTEITKAPLSASMIKRYDEHHQDLTLLKALVRQQLPEKYKEIFFDQSKNGYAGYIDGGASQEEFYKFIKPILEKMDGTEELLVKLNREDLLRKQRTFDNGSIPHQIHLGELHAILRRQEDFYPFLKDNREKIEKILTFRIPYYVGPLARGNSRFAWMTRKSEETITPWNFEEVVDKGASAQSFIERMTNFDKNLPNEKVLPKHSLLYEYFTVYNELTKVKYVTEGMRKPAFLSGEQKKAIVDLLFKTNRKVTVKQLKEDYFKKIECFDSVEISGVEDRFNASLGTYHDLLKIIKDKDFLDNEENEDILEDIVLTLTLFEDREMIEERLKTYAHLFDDKVMKQLKRRRYTGWGRLSRKLINGIRDKQSGKTILDFLKSDGFANRNFMQLIHDDSLTFKEDIQKAQVSGQGDSLHEHIANLAGSPAIKKGILQTVKVVDELVKVMGRHKPENIVIEMARENQTTQKGQKNSRERMKRIEEGIKELGSQILKEHPVENTQLQNEKLYLYYLQNGRDMYVDQELDINRLSDYDVDHIVPQSFLKDDSIDNKVLTRSDKARGKSDNVPSEEVVKKMKNYWRQLLNAKLITQRKFDNLTKAERGGLSELDKAGFIKRQLVETRQITKHVAQILDSRMNTKYDENDKLIREVKVITLKSKLVSDFRKDFQFYKVREINNYHHAHDAYLNAVVGTALIKKYPKLESEFVYGDYKVYDVRKMIAKSEQEIGKATAKYFFYSNIMNFFKTEITLANGEIRKRPLIETNGETGEIVWDKGRDFATVRKVLSMPQVNIVKKTEVQTGGFSKESILPKRNSDKLIARKKDWDPKKYGGFDSPTVAYSVLVVAKVEKGKSKKLKSVKELLGITIMERSSFEKNPIDFLEAKGYKEVKKDLIIKLPKYSLFELENGRKRMLASAGELQKGNELALPSKYVNFLYLASHYEKLKGSPEDNEQKQLFVEQHKHYLDEIIEQISEFSKRVILADANLDKVLSAYNKHRDKPIREQAENIIHLFTLTNLGAPAAFKYFDTTIDRKRYTSTKEVLDATLIHQSITGLYETRIDLSQLGGDGGGSSGSSGSSGSSGGLLGRDLLTKLKAQIQFSTEGPQVTWEDRPAMCLVLNLEEEYRLHEKPVPPSIDPSWLQLFPMVWAEKAGMGLANQVPPVVVELKSDASPVAVRQYPMSKEAREGIRPHIQRFLDLGILVPCQSPWNTPLLPVKKPGTNDYRPVQDLREVNKRVQDIHPTVPNPYNLLSSLPPSHTWYSVLDLKDAFFCLKLHPNSQPLFAFEWRDPEKGNTGQLTWTRLPQGFKNSPTLFNEALHRDLASFRALNPQVVMLQYVDDLLVAAPTYRDCKEGTRRLLQELSKLGYRVSAKKAQLCREEVTYLGYLLKGGKRWLTPARKATVMKIPTPTTPRQVREFLGTAGFCRLWIPGFASLAAPLYPLTRPKVPFTWTEAHQEAFGRIKEALLSAPALALPDLTKPFALYVDEKEGVARGVLTQTLGPWRRPVAYLSKKLDPVASGWPTCLKAIAAVALLLKDADKLTLGQNVLVIAPHNLESIVRQPPDRWMTNARMTHYQSLLLNERVSFAPPAILNPATLLPVESDDTPIHICSEILAEETGTRPDLRDQPLPGVPAWYTDGSSFIMDGRRQAGAAIVDNKRTVWASNLPEGTSAQKAELIALTQALRLAEGKSINIYTDSRYAFATAHVHGAIYKQRGWLTSAGKDIKNKEEILALLEAIHLPKRVAIIHCPGHQRGTDPVATGNRKADEAAKQAAQSTRILTETTKNAGKRTADGSEFEKRTADGSEFESPKKKAKVE

SEQ ID NO: 6321 - protein, 2219 aa, synthetic construct
MPAAKRVKLDGGDKKYSIGLDIGTNSVGWAVITDEYKVPSKKFKVLGNTDRHSIKKNLIGALLFDSGETAEATRLKRTARRRYTRRKNRICYLQEIFSNEMAKVDDSFFHRLEESFLVEEDKKHERHPIFGNIVDEVAYHEKYPTIYHLRKKLVDSTDKADLRLIYLALAHMIKFRGHFLIEGDLNPDNSDVDKLFIQLVQTYNQLFEENPINASGVDAKAILSARLSKSRRLENLIAQLPGEKKNGLFGNLIALSLGLTPNFKSNFDLAEDAKLQLSKDTYDDDLDNLLAQIGDQYADLFLAAKNLSDAILLSDILRVNTEITKAPLSASMIKRYDEHHQDLTLLKALVRQQLPEKYKEIFFDQSKNGYAGYIDGGASQEEFYKFIKPILEKMDGTEELLVKLNREDLLRKQRTFDNGSIPHQIHLGELHAILRRQEDFYPFLKDNREKIEKILTFRIPYYVGPLARGNSRFAWMTRKSEETITPWNFEEVVDKGASAQSFIERMTNFDKNLPNEKVLPKHSLLYEYFTVYNELTKVKYVTEGMRKPAFLSGEQKKAIVDLLFKTNRKVTVKQLKEDYFKKIECFDSVEISGVEDRFNASLGTYHDLLKIIKDKDFLDNEENEDILEDIVLTLTLFEDREMIEERLKTYAHLFDDKVMKQLKRRRYTGWGRLSRKLINGIRDKQSGKTILDFLKSDGFANRNFMQLIHDDSLTFKEDIQKAQVSGQGDSLHEHIANLAGSPAIKKGILQTVKVVDELVKVMGRHKPENIVIEMARENQTTQKGQKNSRERMKRIEEGIKELGSQILKEHPVENTQLQNEKLYLYYLQNGRDMYVDQELDINRLSDYDVDHIVPQSFLKDDSIDNKVLTRSDKARGKSDNVPSEEVVKKMKNYWRQLLNAKLITQRKFDNLTKAERGGLSELDKAGFIKRQLVETRQITKHVAQILDSRMNTKYDENDKLIREVKVITLKSKLVSDFRKDFQFYKVREINNYHHAHDAYLNAVVGTALIKKYPKLESEFVYGDYKVYDVRKMIAKSEQEIGKATAKYFFYSNIMNFFKTEITLANGEIRKRPLIETNGETGEIVWDKGRDFATVRKVLSMPQVNIVKKTEVQTGGFSKESILPKRNSDKLIARKKDWDPKKYGGFDSPTVAYSVLVVAKVEKGKSKKLKSVKELLGITIMERSSFEKNPIDFLEAKGYKEVKKDLIIKLPKYSLFELENGRKRMLASAGELQKGNELALPSKYVNFLYLASHYEKLKGSPEDNEQKQLFVEQHKHYLDEIIEQISEFSKRVILADANLDKVLSAYNKHRDKPIREQAENIIHLFTLTNLGAPAAFKYFDTTIDRKRYTSTKEVLDATLIHQSITGLYETRIDLSQLGGDGGGSSGSSGSSGSSGGTLGDQGSRGSDPLPEPRVTLTVEGIPTEFLVNTGAEHSVLTKPMGKMGSKRTVVAGATGSKVYPWTTKRLLKIGQKQVTHSFLVIPECPAPLLGRDLLTKLKAQIQFSTEGPQVTWEDRPAMCLVLNLEEEYRLHEKPVPPSIDPSWLQLFPMVWAEKAGMGLANQVPPVVVELKSDASPVAVRQYPMSKEAREGIRPHIQRFLDLGILVPCQSPWNTPLLPVKKPGTNDYRPVQDLREVNKRVQDIHPTVPNPYNLLSSLPPSHTWYSVLDLKDAFFCLKLHPNSQPLFAFEWRDPEKGNTGQLTWTRLPQGFKNSPTLFNEALHRDLASFRALNPQVVMLQYVDDLLVAAPTYRDCKEGTRRLLQELSKLGYRVSAKKAQLCREEVTYLGYLLKGGKRWLTPARKATVMKIPTPTTPRQVREFLGKAGFCRLFIPGFASLAAPLYPLTRPKVPFTWTEAHQEAFGRIKEALLSAPALALPDLTKPFALYVDEKEGVARGVLTQTLGPWRRPVAYLSKKLDPVASGWPTCLKAIAAVALLLKDADKLTLGQNVLVIAPHNLESIVRQPPDRWMTNARMTHYQSLLLNERVSFAPPAILNPATLLPVESDDTPIHICSEILAEETGTRPDLRDQPLPGVPAWYTDGSSFIMDGRRQAGAAIVDNKRTVWASNLPEGTSAQKAELIALTQALRLAEGKSINIYTDSRYAFATAHVHGAIYKQRGWLTSAGKDIKNKEEILALLEAIHLPKRVAIIHCPGHQRGTDPVATGNRKADEAAKQAAQSTRILTETTKNAGKRTADGSEFEKRTADGSEFESPKKKAKVE

SEQ ID NO: 6322 - protein, 2097 aa, synthetic construct
MPAAKRVKLDGGDKKYSIGLDIGTNSVGWAVITDEYKVPSKKFKVLGNTDRHSIKKNLIGALLFDSGETAEATRLKRTARRRYTRRKNRICYLQEIFSNEMAKVDDSFFHRLEESFLVEEDKKHERHPIFGNIVDEVAYHEKYPTIYHLRKKLVDSTDKADLRLIYLALAHMIKFRGHFLIEGDLNPDNSDVDKLFIQLVQTYNQLFEENPINASGVDAKAILSARLSKSRRLENLIAQLPGEKKNGLFGNLIALSLGLTPNFKSNFDLAEDAKLQLSKDTYDDDLDNLLAQIGDQYADLFLAAKNLSDAILLSDILRVNTEITKAPLSASMIKRYDEHHQDLTLLKALVRQQLPEKYKEIFFDQSKNGYAGYIDGGASQEEFYKFIKPILEKMDGTEELLVKLNREDLLRKQRTFDNGSIPHQIHLGELHAILRRQEDFYPFLKDNREKIEKILTFRIPYYVGPLARGNSRFAWMTRKSEETITPWNFEEVVDKGASAQSFIERMTNFDKNLPNEKVLPKHSLLYEYFTVYNELTKVKYVTEGMRKPAFLSGEQKKAIVDLLFKTNRKVTVKQLKEDYFKKIECFDSVEISGVEDRFNASLGTYHDLLKIIKDKDFLDNEENEDILEDIVLTLTLFEDREMIEERLKTYAHLFDDKVMKQLKRRRYTGWGRLSRKLINGIRDKQSGKTILDFLKSDGFANRNFMQLIHDDSLTFKEDIQKAQVSGQGDSLHEHIANLAGSPAIKKGILQTVKVVDELVKVMGRHKPENIVIEMARENQTTQKGQKNSRERMKRIEEGIKELGSQILKEHPVENTQLQNEKLYLYYLQNGRDMYVDQELDINRLSDYDVDHIVPQSFLKDDSIDNKVLTRSDKARGKSDNVPSEEVVKKMKNYWRQLLNAKLITQRKFDNLTKAERGGLSELDKAGFIKRQLVETRQITKHVAQILDSRMNTKYDENDKLIREVKVITLKSKLVSDFRKDFQFYKVREINNYHHAHDAYLNAVVGTALIKKYPKLESEFVYGDYKVYDVRKMIAKSEQEIGKATAKYFFYSNIMNFFKTEITLANGEIRKRPLIETNGETGEIVWDKGRDFATVRKVLSMPQVNIVKKTEVQTGGFSKESILPKRNSDKLIARKKDWDPKKYGGFDSPTVAYSVLVVAKVEKGKSKKLKSVKELLGITIMERSSFEKNPIDFLEAKGYKEVKKDLIIKLPKYSLFELENGRKRMLASAGELQKGNELALPSKYVNFLYLASHYEKLKGSPEDNEQKQLFVEQHKHYLDEIIEQISEFSKRVILADANLDKVLSAYNKHRDKPIREQAENIIHLFTLTNLGAPAAFKYFDTTIDRKRYTSTKEVLDATLIHQSITGLYETRIDLSQLGGDGGGSSGSSGSSGSSGGLGIEDEYRLHETSTEPDVSLGSTWLSDFPQAWAETGGMGLAVRQAPLIIPLKATSTPVSIQQYPMSHEARLGIKPHIQRLLDQGILVPCQSPWNTPLLPVKKPGTNDYRPVQDLREVNKRVEDIHPTVPNPYNLLSGLPPSHQWYTVLDLKDAFFCLRLHPTSQPLFAFEWRDPGMGISGQLTWTRLPQGFKNSPTLFNEALHRDLADFRIQHPDLILLQYVDDILLAATSELDCQQGTRALLQTLGDLGYRASAKKAQICQKQVKYLGYLLREGQRWLTEARKETVMGQPVPKTPRQLREFLGKAGFCRLFIPGFAEMAAPLYPLTKPGTLFSWGPDQQKAYQEIKQALLTAPALGLPDLTKPFELFVDEKQGYAKGVLTQKLGPWRRPVAYLSKKLDPVAAGWPPCLRMVAAIAVLTKDAGKLTMGQPLVILAPHAVEALVKQPPDRWLSNARMTHYQAMLLDTDRVQFGPVVALNPATLLPLPEEGAPHDCLEILAETHGTRPDLTDQPIPDADHTWYTDGSSFLQEGQRKAGAAVTTETEVIWAGALPAGTSAQRAELIALTQALKMAEGKRLNVYTDSRYAFATAHIHGEIYRRRGWLTSEGREIKNKSEILALLKALFLPKRLSIIHCLGHQKGDSAEARGNRLADQAAREAAIKTPPDTSTLLIAGKRTADGSEFEKRTADGSEFESPKKKAKVE

SEQ ID NO: 6323 - protein, 2097 aa, synthetic construct
MPAAKRVKLDGGDKKYSIGLDIGTNSVGWAVITDEYKVPSKKFKVLGNTDRHSIKKNLIGALLFDSGETAEATRLKRTARRRYTRRKNRICYLQEIFSNEMAKVDDSFFHRLEESFLVEEDKKHERHPIFGNIVDEVAYHEKYPTIYHLRKKLVDSTDKADLRLIYLALAHMIKFRGHFLIEGDLNPDNSDVDKLFIQLVQTYNQLFEENPINASGVDAKAILSARLSKSRRLENLIAQLPGEKKNGLFGNLIALSLGLTPNFKSNFDLAEDAKLQLSKDTYDDDLDNLLAQIGDQYADLFLAAKNLSDAILLSDILRVNTEITKAPLSASMIKRYDEHHQDLTLLKALVRQQLPEKYKEIFFDQSKNGYAGYIDGGASQEEFYKFIKPILEKMDGTEELLVKLNREDLLRKQRTFDNGSIPHQIHLGELHAILRRQEDFYPFLKDNREKIEKILTFRIPYYVGPLARGNSRFAWMTRKSEETITPWNFEEVVDKGASAQSFIERMTNFDKNLPNEKVLPKHSLLYEYFTVYNELTKVKYVTEGMRKPAFLSGEQKKAIVDLLFKTNRKVTVKQLKEDYFKKIECFDSVEISGVEDRFNASLGTYHDLLKIIKDKDFLDNEENEDILEDIVLTLTLFEDREMIEERLKTYAHLFDDKVMKQLKRRRYTGWGRLSRKLINGIRDKQSGKTILDFLKSDGFANRNFMQLIHDDSLTFKEDIQKAQVSGQGDSLHEHIANLAGSPAIKKGILQTVKVVDELVKVMGRHKPENIVIEMARENQTTQKGQKNSRERMKRIEEGIKELGSQILKEHPVENTQLQNEKLYLYYLQNGRDMYVDQELDINRLSDYDVDHIVPQSFLKDDSIDNKVLTRSDKARGKSDNVPSEEVVKKMKNYWRQLLNAKLITQRKFDNLTKAERGGLSELDKAGFIKRQLVETRQITKHVAQILDSRMNTKYDENDKLIREVKVITLKSKLVSDFRKDFQFYKVREINNYHHAHDAYLNAVVGTALIKKYPKLESEFVYGDYKVYDVRKMIAKSEQEIGKATAKYFFYSNIMNFFKTEITLANGEIRKRPLIETNGETGEIVWDKGRDFATVRKVLSMPQVNIVKKTEVQTGGFSKESILPKRNSDKLIARKKDWDPKKYGGFDSPTVAYSVLVVAKVEKGKSKKLKSVKELLGITIMERSSFEKNPIDFLEAKGYKEVKKDLIIKLPKYSLFELENGRKRMLASAGELQKGNELALPSKYVNFLYLASHYEKLKGSPEDNEQKQLFVEQHKHYLDEIIEQISEFSKRVILADANLDKVLSAYNKHRDKPIREQAENIIHLFTLTNLGAPAAFKYFDTTIDRKRYTSTKEVLDATLIHQSITGLYETRIDLSQLGGDGGGSSGSSGSSGSSGGTLGIEDEYRLHETSTEPDVSLGSTWLSDFPQAWAETGGMGLAVRQAPLIIPLKATSTPVSIQQYPMSHEARLGIKPHIQRLLDQGILVPCQSPWNTPLLPVKKPGTNDYRPVQDLREVNKRVEDIHPTVPNPYNLLSGLPPSHQWYTVLDLKDAFFCLRLHPTSQPLFAFEWRDPGMGISGQLTWTRLPQGFKNSPTLFNEALHRDLADFRIQHPDLILLQYVDDILLAATSELDCQQGTRALLQTLGDLGYRASAKKAQICQKQVKYLGYLLREGQRWLTEARKETVMGQPVPKTPRQLREFLGTAGFCRLWIPGFAEMAAPLYPLTKPGTLFSWGPDQQKAYQEIKQALLTAPALGLPDLTKPFELFVDEKQGYAKGVLTQKLGPWRRPVAYLSKKLDPVAAGWPPCLRMVAAIAVLTKDAGKLTMGQPLVILAPHAVEALVKQPPDRWLSNARMTHYQAMLLDTDRVQFGPVVALNPATLLPLPEEGAPHDCLEILAETHGTRPDLTDQPIPDADHTWYTDGSSFLQEGQRKAGAAVTTETEVIWAGALPAGTSAQRAELIALTQALKMAEGKRLNVYTDSRYAFATAHIHGEIYRRRGWLTSEGREIKNKSEILALLKALFLPKRLSIIHCLGHQKGDSAEARGNRLADQAAREAAIKTPPDTSTLLAGKRTADGSEFEKRTADGSEFESPKKKAKVE

SEQ ID NO: 6324 - protein, 2097 aa, synthetic construct
MPAAKRVKLDGGDKKYSIGLDIGTNSVGWAVITDEYKVPSKKFKVLGNTDRHSIKKNLIGALLFDSGETAEATRLKRTARRRYTRRKNRICYLQEIFSNEMAKVDDSFFHRLEESFLVEEDKKHERHPIFGNIVDEVAYHEKYPTIYHLRKKLVDSTDKADLRLIYLALAHMIKFRGHFLIEGDLNPDNSDVDKLFIQLVQTYNQLFEENPINASGVDAKAILSARLSKSRRLENLIAQLPGEKKNGLFGNLIALSLGLTPNFKSNFDLAEDAKLQLSKDTYDDDLDNLLAQIGDQYADLFLAAKNLSDAILLSDILRVNTEITKAPLSASMIKRYDEHHQDLTLLKALVRQQLPEKYKEIFFDQSKNGYAGYIDGGASQEEFYKFIKPILEKMDGTEELLVKLNREDLLRKQRTFDNGSIPHQIHLGELHAILRRQEDFYPFLKDNREKIEKILTFRIPYYVGPLARGNSRFAWMTRKSEETITPWNFEEVVDKGASAQSFIERMTNFDKNLPNEKVLPKHSLLYEYFTVYNELTKVKYVTEGMRKPAFLSGEQKKAIVDLLFKTNRKVTVKQLKEDYFKKIECFDSVEISGVEDRFNASLGTYHDLLKIIKDKDFLDNEENEDILEDIVLTLTLFEDREMIEERLKTYAHLFDDKVMKQLKRRRYTGWGRLSRKLINGIRDKQSGKTILDFLKSDGFANRNFMQLIHDDSLTFKEDIQKAQVSGQGDSLHEHIANLAGSPAIKKGILQTVKVVDELVKVMGRHKPENIVIEMARENQTTQKGQKNSRERMKRIEEGIKELGSQILKEHPVENTQLQNEKLYLYYLQNGRDMYVDQELDINRLSDYDVDHIVPQSFLKDDSIDNKVLTRSDKARGKSDNVPSEEVVKKMKNYWRQLLNAKLITQRKFDNLTKAERGGLSELDKAGFIKRQLVETRQITKHVAQILDSRMNTKYDENDKLIREVKVITLKSKLVSDFRKDFQFYKVREINNYHHAHDAYLNAVVGTALIKKYPKLESEFVYGDYKVYDVRKMIAKSEQEIGKATAKYFFYSNIMNFFKTEITLANGEIRKRPLIETNGETGEIVWDKGRDFATVRKVLSMPQVNIVKKTEVQTGGFSKESILPKRNSDKLIARKKDWDPKKYGGFDSPTVAYSVLVVAKVEKGKSKKLKSVKELLGITIMERSSFEKNPIDFLEAKGYKEVKKDLIIKLPKYSLFELENGRKRMLASAGELQKGNELALPSKYVNFLYLASHYEKLKGSPEDNEQKQLFVEQHKHYLDEIIEQISEFSKRVILADANLDKVLSAYNKHRDKPIREQAENIIHLFTLTNLGAPAAFKYFDTTIDRKRYTSTKEVLDATLIHQSITGLYETRIDLSQLGGDGGGSSGSSGSSGSSGGTLNIEDEYRLHETSKGPDVPLGSTWLSDFPQAWAETGGMGLAVRQAPLIIPLKATSTPVSIKQYPMSQEARLGIKPHIQRLLDQGILVPCQSPWNTPLLPVKKPGTNDYRPVQDLREVNKRVEDIHPTVPNPYNLLSGLPPSHQWYTVLDLKDAFFCLRLHPTSQSLFAFEWRDPEMGISGQLTWTRLPQGFKNSPTLFNEALHRDLADFRIQHPDLILLQYVDDLLLAATSELDCQQGTRALLQTLGDLGYRASAKKAQICQKQVKYLGYLLKEGQRWLTEARKETVMGQPTPKTPRQLREFLGTAGFCRLWIPGFAEMAAPLYPLTKPGTLFEWGPDQQKAYQEIKQALLTAPALGLPDLTKPFELFVDEKQGYAKGVLTQKLGPWRRPVAYLSKKLDPVAAGWPPCLRMVAAIAVLTKDAGKLTMGQPLVILAPHAVEALVKQPPDRWLSNARMTHYQALLLDTDRVQFGPIVALNPATLLPLPEEGLQHDCLDILAEAHGTRPDLTDQPLPDADHTWYTDGSSFLQEGQRKAGAAVTTETEVVWAKALPAGTSAQRAELIALTQALKMAEGKKLNVYTDSRYAFATAHIHGEIYRRRGWLTSEGKEIKNKDEILALLKALFLPKRLSIIHCPGHQKGNRAEARGNRMADQAAREVATRETPETSTLLAGKRTADGSEFEKRTADGSEFESPKKKAKVE

SEQ ID NO: 6325 - protein, 2088 aa, synthetic construct
MPAAKRVKLDGGDKKYSIGLDIGTNSVGWAVITDEYKVPSKKFKVLGNTDRHSIKKNLIGALLFDSGETAEATRLKRTARRRYTRRKNRICYLQEIFSNEMAKVDDSFFHRLEESFLVEEDKKHERHPIFGNIVDEVAYHEKYPTIYHLRKKLVDSTDKADLRLIYLALAHMIKFRGHFLIEGDLNPDNSDVDKLFIQLVQTYNQLFEENPINASGVDAKAILSARLSKSRRLENLIAQLPGEKKNGLFGNLIALSLGLTPNFKSNFDLAEDAKLQLSKDTYDDDLDNLLAQIGDQYADLFLAAKNLSDAILLSDILRVNTEITKAPLSASMIKRYDEHHQDLTLLKALVRQQLPEKYKEIFFDQSKNGYAGYIDGGASQEEFYKFIKPILEKMDGTEELLVKLNREDLLRKQRTFDNGSIPHQIHLGELHAILRRQEDFYPFLKDNREKIEKILTFRIPYYVGPLARGNSRFAWMTRKSEETITPWNFEEVVDKGASAQSFIERMTNFDKNLPNEKVLPKHSLLYEYFTVYNELTKVKYVTEGMRKPAFLSGEQKKAIVDLLFKTNRKVTVKQLKEDYFKKIECFDSVEISGVEDRFNASLGTYHDLLKIIKDKDFLDNEENEDILEDIVLTLTLFEDREMIEERLKTYAHLFDDKVMKQLKRRRYTGWGRLSRKLINGIRDKQSGKTILDFLKSDGFANRNFMQLIHDDSLTFKEDIQKAQVSGQGDSLHEHIANLAGSPAIKKGILQTVKVVDELVKVMGRHKPENIVIEMARENQTTQKGQKNSRERMKRIEEGIKELGSQILKEHPVENTQLQNEKLYLYYLQNGRDMYVDQELDINRLSDYDVDHIVPQSFLKDDSIDNKVLTRSDKARGKSDNVPSEEVVKKMKNYWRQLLNAKLITQRKFDNLTKAERGGLSELDKAGFIKRQLVETRQITKHVAQILDSRMNTKYDENDKLIREVKVITLKSKLVSDFRKDFQFYKVREINNYHHAHDAYLNAVVGTALIKKYPKLESEFVYGDYKVYDVRKMIAKSEQEIGKATAKYFFYSNIMNFFKTEITLANGEIRKRPLIETNGETGEIVWDKGRDFATVRKVLSMPQVNIVKKTEVQTGGFSKESILPKRNSDKLIARKKDWDPKKYGGFDSPTVAYSVLVVAKVEKGKSKKLKSVKELLGITIMERSSFEKNPIDFLEAKGYKEVKKDLIIKLPKYSLFELENGRKRMLASAGELQKGNELALPSKYVNFLYLASHYEKLKGSPEDNEQKQLFVEQHKHYLDEIIEQISEFSKRVILADANLDKVLSAYNKHRDKPIREQAENIIHLFTLTNLGAPAAFKYFDTTIDRKRYTSTKEVLDATLIHQSITGLYETRIDLSQLGGDGGGSSGSSGSSGSSGGIPWLMKKPLQLTTLVPLQEYEERLLKQTMLTGSYKEKLQSLFLKYDALWQHWENQVGHRRIKPHHIATGTVNPRPQKQYPINPKAKASIQTVINDLLKQGVLIQQNSIMNTPVYPVPKPDGKWRMVLDYREVNKTIPLIAAQNQHSAGILSSIFRGKYKTTLDLSNGFWAHSITPESYWLTAFTWLGQQYCWTRLPQGFLNSPALFNADVVDLLKEVPNVQVYVDDIYISHDDPREHLEQLEKVFSLLLNAGYVVSLKKSEIAQHEVEFLGFNITKEGRGLTETFKQKLLNITPPRDLKQLQSILGLLNFARNFIPNFSELVKPLYNIIATAPGKYITWTTDNSQQLQNIISMLNSAENLEERNPEVRLIMKVNTSPSAGYIRFYNEFAKRPIMYLNYVYTKAEVKFTNTEKLLTTIHKGLIKALDLGMGQEILVYSPIVSMTKIQKTPLPERKALPIRWITWMSYLEDPRIQFHYDKTLPELQQVPTVTDDIIAKIKHPSEFSMVFYTDGSAIKHPNVNKSHNAGMGIAQVQFKPEFTVINTWSIPLGDHTAQLAEVAAVEFACKKALKIDGPVLIVTDSFYVAESVNKELPYWQSNGFFNNKKKPLKHVSKWKSIADCIQLKPDIIIIHEKGHQPTASTFHTEGNNLADKLATQGSYVVNAGKRTADGSEFEKRTADGSEFESPKKKAKVE

SEQ ID NO: 6326 - protein, 2177 aa, synthetic construct
MPAAKRVKLDGGDKKYSIGLDIGTNSVGWAVITDEYKVPSKKFKVLGNTDRHSIKKNLIGALLFDSGETAEATRLKRTARRRYTRRKNRICYLQEIFSNEMAKVDDSFFHRLEESFLVEEDKKHERHPIFGNIVDEVAYHEKYPTIYHLRKKLVDSTDKADLRLIYLALAHMIKFRGHFLIEGDLNPDNSDVDKLFIQLVQTYNQLFEENPINASGVDAKAILSARLSKSRRLENLIAQLPGEKKNGLFGNLIALSLGLTPNFKSNFDLAEDAKLQLSKDTYDDDLDNLLAQIGDQYADLFLAAKNLSDAILLSDILRVNTEITKAPLSASMIKRYDEHHQDLTLLKALVRQQLPEKYKEIFFDQSKNGYAGYIDGGASQEEFYKFIKPILEKMDGTEELLVKLNREDLLRKQRTFDNGSIPHQIHLGELHAILRRQEDFYPFLKDNREKIEKILTFRIPYYVGPLARGNSRFAWMTRKSEETITPWNFEEVVDKGASAQSFIERMTNFDKNLPNEKVLPKHSLLYEYFTVYNELTKVKYVTEGMRKPAFLSGEQKKAIVDLLFKTNRKVTVKQLKEDYFKKIECFDSVEISGVEDRFNASLGTYHDLLKIIKDKDFLDNEENEDILEDIVLTLTLFEDREMIEERLKTYAHLFDDKVMKQLKRRRYTGWGRLSRKLINGIRDKQSGKTILDFLKSDGFANRNFMQLIHDDSLTFKEDIQKAQVSGQGDSLHEHIANLAGSPAIKKGILQTVKVVDELVKVMGRHKPENIVIEMARENQTTQKGQKNSRERMKRIEEGIKELGSQILKEHPVENTQLQNEKLYLYYLQNGRDMYVDQELDINRLSDYDVDHIVPQSFLKDDSIDNKVLTRSDKARGKSDNVPSEEVVKKMKNYWRQLLNAKLITQRKFDNLTKAERGGLSELDKAGFIKRQLVETRQITKHVAQILDSRMNTKYDENDKLIREVKVITLKSKLVSDFRKDFQFYKVREINNYHHAHDAYLNAVVGTALIKKYPKLESEFVYGDYKVYDVRKMIAKSEQEIGKATAKYFFYSNIMNFFKTEITLANGEIRKRPLIETNGETGEIVWDKGRDFATVRKVLSMPQVNIVKKTEVQTGGFSKESILPKRNSDKLIARKKDWDPKKYGGFDSPTVAYSVLVVAKVEKGKSKKLKSVKELLGITIMERSSFEKNPIDFLEAKGYKEVKKDLIIKLPKYSLFELENGRKRMLASAGELQKGNELALPSKYVNFLYLASHYEKLKGSPEDNEQKQLFVEQHKHYLDEIIEQISEFSKRVILADANLDKVLSAYNKHRDKPIREQAENIIHLFTLTNLGAPAAFKYFDTTIDRKRYTSTKEVLDATLIHQSITGLYETRIDLSQLGGDGGGSSGSSGSSGSSGGMDPLQLLQPLEAEIKGTKLKAHWNSGATITCVPQAFLEEEVPIKNIWIKTIHGEKEQPVYYLTFKIQGRKVEAEVISSPYDYILVSPSDIPWLMKKPLQLTTLVPLQEYEERLLKQTMLTGSYKEKLQSLFLKYDALWQHWENQVGHRRIKPHHIATGTVNPRPQKQYPINPKAKASIQTVINDLLKQGVLIQQNSIMNTPVYPVPKPDGKWRMVLDYREVNKTIPLIAAQNQHSAGILSSIFRGKYKTTLDLSNGFWAHSITPESYWLTAFTWLGQQYCWTRLPQGFLNSPALFNADVVDLLKEVPNVQVYVDDIYISHDDPREHLEQLEKVFSLLLNAGYVVSLKKSEIAQHEVEFLGFNITKEGRGLTETFKQKLLNITPPRDLKQLQSILGKLNFARNFIPNFSELVKPLYNIIATAPGKYITWTTDNSQQLQNIISMLNSAENLEERNPEVRLIMKVNTSPSAGYIRFYNEFAKRPIMYLNYVYTKAEVKFTNTEKLLTTIHKGLIKALDLGMGQEILVYSPIVSMTKIQKTPLPERKALPIRWITWMSYLEDPRIQFHYDKTLPELQQVPTVTDDIIAKIKHPSEFSMVFYTDGSAIKHPNVNKSHNAGMGIAQVQFKPEFTVINTWSIPLGDHTAQLAEVAAVEFACKKALKIDGPVLIVTDSFYVAESVNKELPYWQSNGFFNNKKKPLKHVSKWKSIADCIQLKPDIIIIHEKGHQPTASTFHTEGNNLADKLATQGSYVVNAGKRTADGSEFEKRTADGSEFESPKKKAKVE

SEQ ID NO: 6327 - protein, 2097 aa, synthetic construct
MPAAKRVKLDGGDKKYSIGLDIGTNSVGWAVITDEYKVPSKKFKVLGNTDRHSIKKNLIGALLFDSGETAEATRLKRTARRRYTRRKNRICYLQEIFSNEMAKVDDSFFHRLEESFLVEEDKKHERHPIFGNIVDEVAYHEKYPTIYHLRKKLVDSTDKADLRLIYLALAHMIKFRGHFLIEGDLNPDNSDVDKLFIQLVQTYNQLFEENPINASGVDAKAILSARLSKSRRLENLIAQLPGEKKNGLFGNLIALSLGLTPNFKSNFDLAEDAKLQLSKDTYDDDLDNLLAQIGDQYADLFLAAKNLSDAILLSDILRVNTEITKAPLSASMIKRYDEHHQDLTLLKALVRQQLPEKYKEIFFDQSKNGYAGYIDGGASQEEFYKFIKPILEKMDGTEELLVKLNREDLLRKQRTFDNGSIPHQIHLGELHAILRRQEDFYPFLKDNREKIEKILTFRIPYYVGPLARGNSRFAWMTRKSEETITPWNFEEVVDKGASAQSFIERMTNFDKNLPNEKVLPKHSLLYEYFTVYNELTKVKYVTEGMRKPAFLSGEQKKAIVDLLFKTNRKVTVKQLKEDYFKKIECFDSVEISGVEDRFNASLGTYHDLLKIIKDKDFLDNEENEDILEDIVLTLTLFEDREMIEERLKTYAHLFDDKVMKQLKRRRYTGWGRLSRKLINGIRDKQSGKTILDFLKSDGFANRNFMQLIHDDSLTFKEDIQKAQVSGQGDSLHEHIANLAGSPAIKKGILQTVKVVDELVKVMGRHKPENIVIEMARENQTTQKGQKNSRERMKRIEEGIKELGSQILKEHPVENTQLQNEKLYLYYLQNGRDMYVDQELDINRLSDYDVDHIVPQSFLKDDSIDNKVLTRSDKARGKSDNVPSEEVVKKMKNYWRQLLNAKLITQRKFDNLTKAERGGLSELDKAGFIKRQLVETRQITKHVAQILDSRMNTKYDENDKLIREVKVITLKSKLVSDFRKDFQFYKVREINNYHHAHDAYLNAVVGTALIKKYPKLESEFVYGDYKVYDVRKMIAKSEQEIGKATAKYFFYSNIMNFFKTEITLANGEIRKRPLIETNGETGEIVWDKGRDFATVRKVLSMPQVNIVKKTEVQTGGFSKESILPKRNSDKLIARKKDWDPKKYGGFDSPTVAYSVLVVAKVEKGKSKKLKSVKELLGITIMERSSFEKNPIDFLEAKGYKEVKKDLIIKLPKYSLFELENGRKRMLASAGELQKGNELALPSKYVNFLYLASHYEKLKGSPEDNEQKQLFVEQHKHYLDEIIEQISEFSKRVILADANLDKVLSAYNKHRDKPIREQAENIIHLFTLTNLGAPAAFKYFDTTIDRKRYTSTKEVLDATLIHQSITGLYETRIDLSQLGGDGGGSSGSSGSSGSSGGTLNIEDEYRLHETSKEPDVPLGSTWLSDFPQAWAETGGMGLAVRQAPLIIPLKATSTPVSIKQYPMSQEARLGIKPHIQRLLDQGILVPCQSPWNTPLLPVKKPGTNDYRPVQDLREVNKRVEDIHPTVPNPYNLLSGLPPSHQWYTVLDLKDAFFCLRLHPTSQPLFAFEWRDPEMGISGQLTWTRLPQGFKNSPTLFNEALHRDLADFRIQHPDLILLQYVDDLLLAATSEQDCQRGTRALLQTLGNLGYRASAKKAQICQKQVKYLGYLLKEGQRWLTEARKETVMGQPTPKTPRQLREFLGTAGFCRLWIPGFAEMAAPLYPLTKPGTLFNWGPDQQKAYQEIKQALLTAPALGLPDLTKPFELFVDEKQGYAKGVLTQKLGPWRRPVAYLSKKLDPVAAGWPPCLRMVAAIAVLTKDAGKLTMGQPLVILAPHAVEALVKQPPDRWLSNARMTHYQAMLLDTDRVQFGPVVALNPATLLPLPEKEAPHDCLEILAETHGTRPDLTDQPIPDADYTWYTDGSSFLQEGQRRAGAAVTTETEVIWARALPAGTSAQRAELIALTQALKMAEGKKLNVYTDSRYAFATAHVHGEIYRRRGWLTSEGREIKNKNEILALLKALFLPKRLSIIHCPGHQKGNSAEARGNRMADQAAREAAMKAVLETSTLLAGKRTADGSEFEKRTADGSEFESPKKKAKVE

SEQ ID NO: 6328 - protein, 2102 aa, synthetic construct
MPAAKRVKLDGGDKKYSIGLDIGTNSVGWAVITDEYKVPSKKFKVLGNTDRHSIKKNLIGALLFDSGETAEATRLKRTARRRYTRRKNRICYLQEIFSNEMAKVDDSFFHRLEESFLVEEDKKHERHPIFGNIVDEVAYHEKYPTIYHLRKKLVDSTDKADLRLIYLALAHMIKFRGHFLIEGDLNPDNSDVDKLFIQLVQTYNQLFEENPINASGVDAKAILSARLSKSRRLENLIAQLPGEKKNGLFGNLIALSLGLTPNFKSNFDLAEDAKLQLSKDTYDDDLDNLLAQIGDQYADLFLAAKNLSDAILLSDILRVNTEITKAPLSASMIKRYDEHHQDLTLLKALVRQQLPEKYKEIFFDQSKNGYAGYIDGGASQEEFYKFIKPILEKMDGTEELLVKLNREDLLRKQRTFDNGSIPHQIHLGELHAILRRQEDFYPFLKDNREKIEKILTFRIPYYVGPLARGNSRFAWMTRKSEETITPWNFEEVVDKGASAQSFIERMTNFDKNLPNEKVLPKHSLLYEYFTVYNELTKVKYVTEGMRKPAFLSGEQKKAIVDLLFKTNRKVTVKQLKEDYFKKIECFDSVEISGVEDRFNASLGTYHDLLKIIKDKDFLDNEENEDILEDIVLTLTLFEDREMIEERLKTYAHLFDDKVMKQLKRRRYTGWGRLSRKLINGIRDKQSGKTILDFLKSDGFANRNFMQLIHDDSLTFKEDIQKAQVSGQGDSLHEHIANLAGSPAIKKGILQTVKVVDELVKVMGRHKPENIVIEMARENQTTQKGQKNSRERMKRIEEGIKELGSQILKEHPVENTQLQNEKLYLYYLQNGRDMYVDQELDINRLSDYDVDHIVPQSFLKDDSIDNKVLTRSDKARGKSDNVPSEEVVKKMKNYWRQLLNAKLITQRKFDNLTKAERGGLSELDKAGFIKRQLVETRQITKHVAQILDSRMNTKYDENDKLIREVKVITLKSKLVSDFRKDFQFYKVREINNYHHAHDAYLNAVVGTALIKKYPKLESEFVYGDYKVYDVRKMIAKSEQEIGKATAKYFFYSNIMNFFKTEITLANGEIRKRPLIETNGETGEIVWDKGRDFATVRKVLSMPQVNIVKKTEVQTGGFSKESILPKRNSDKLIARKKDWDPKKYGGFDSPTVAYSVLVVAKVEKGKSKKLKSVKELLGITIMERSSFEKNPIDFLEAKGYKEVKKDLIIKLPKYSLFELENGRKRMLASAGELQKGNELALPSKYVNFLYLASHYEKLKGSPEDNEQKQLFVEQHKHYLDEIIEQISEFSKRVILADANLDKVLSAYNKHRDKPIREQAENIIHLFTLTNLGAPAAFKYFDTTIDRKRYTSTKEVLDATLIHQSITGLYETRIDLSQLGGDGGGSSGSSGSSGSSGSSGGTAPLEEEYRLFLEAPIQNVTLLEQWKREIPKVWAEINPPGLASTQAPIHVQLLSTALPVRVRQYPITLEAKRSLRETIRKFRAAGILRPVHSPWNTPLLPVRKSGTSEYRMVQDLREVNKRVETIHPTVPNPYTLLSLLPPDRIWYSVLDLKDAFFCIPLAPESQLIFAFEWADAEEGESGQLTWTRLPQGFKNSPTLFDEALNRDLQGFRLDHPSVSLLQYVDDLLIAADTQAACLSATRDLLMTLAELGYRVSGKKAQLCQEEVTYLGFKIHKGSRSLSNSRTQAILQIPVPKTKRQVREFLGTIGYCRLWIPGFAELAQPLYAATRGGNDPLVWGEKEEEAFQSLKLALTQPPALALPSLDKPFQLFVEETSGAAKGVLTQALGPWKRPVAYLSKRLDPVAAGWPRCLRAIAAAALLTREASKLTFGQDIEITSSHNLESLLRSPPDKWLTNARITQYQVLLLDPPRVRFKQTAALNPATLLPETDDTLPIHHCLDTLDSLTSTRPDLTDQPLAQAEATLFTDGSSYIRDGKRYAGAAVVTLDSVIWAEPLPIGTSAQKAELIALTKALEWSKDKSVNIYTDSRYAFATLHVHGMIYRERGLLTAGGKAIKNAPEILALLTAVWLPKRVAVMHCKGHQKDDAPTSTGNRRADEVAREVAIRPLSTQATISAGKRTADGSEFEKRTADGSEFESPKKKAKVE

SEQ ID NO: 6329 - protein, 2102 aa, synthetic construct
MPAAKRVKLDGGDKKYSIGLDIGTNSVGWAVITDEYKVPSKKFKVLGNTDRHSIKKNLIGALLFDSGETAEATRLKRTARRRYTRRKNRICYLQEIFSNEMAKVDDSFFHRLEESFLVEEDKKHERHPIFGNIVDEVAYHEKYPTIYHLRKKLVDSTDKADLRLIYLALAHMIKFRGHFLIEGDLNPDNSDVDKLFIQLVQTYNQLFEENPINASGVDAKAILSARLSKSRRLENLIAQLPGEKKNGLFGNLIALSLGLTPNFKSNFDLAEDAKLQLSKDTYDDDLDNLLAQIGDQYADLFLAAKNLSDAILLSDILRVNTEITKAPLSASMIKRYDEHHQDLTLLKALVRQQLPEKYKEIFFDQSKNGYAGYIDGGASQEEFYKFIKPILEKMDGTEELLVKLNREDLLRKQRTFDNGSIPHQIHLGELHAILRRQEDFYPFLKDNREKIEKILTFRIPYYVGPLARGNSRFAWMTRKSEETITPWNFEEVVDKGASAQSFIERMTNFDKNLPNEKVLPKHSLLYEYFTVYNELTKVKYVTEGMRKPAFLSGEQKKAIVDLLFKTNRKVTVKQLKEDYFKKIECFDSVEISGVEDRFNASLGTYHDLLKIIKDKDFLDNEENEDILEDIVLTLTLFEDREMIEERLKTYAHLFDDKVMKQLKRRRYTGWGRLSRKLINGIRDKQSGKTILDFLKSDGFANRNFMQLIHDDSLTFKEDIQKAQVSGQGDSLHEHIANLAGSPAIKKGILQTVKVVDELVKVMGRHKPENIVIEMARENQTTQKGQKNSRERMKRIEEGIKELGSQILKEHPVENTQLQNEKLYLYYLQNGRDMYVDQELDINRLSDYDVDHIVPQSFLKDDSIDNKVLTRSDKARGKSDNVPSEEVVKKMKNYWRQLLNAKLITQRKFDNLTKAERGGLSELDKAGFIKRQLVETRQITKHVAQILDSRMNTKYDENDKLIREVKVITLKSKLVSDFRKDFQFYKVREINNYHHAHDAYLNAVVGTALIKKYPKLESEFVYGDYKVYDVRKMIAKSEQEIGKATAKYFFYSNIMNFFKTEITLANGEIRKRPLIETNGETGEIVWDKGRDFATVRKVLSMPQVNIVKKTEVQTGGFSKESILPKRNSDKLIARKKDWDPKKYGGFDSPTVAYSVLVVAKVEKGKSKKLKSVKELLGITIMERSSFEKNPIDFLEAKGYKEVKKDLIIKLPKYSLFELENGRKRMLASAGELQKGNELALPSKYVNFLYLASHYEKLKGSPEDNEQKQLFVEQHKHYLDEIIEQISEFSKRVILADANLDKVLSAYNKHRDKPIREQAENIIHLFTLTNLGAPAAFKYFDTTIDRKRYTSTKEVLDATLIHQSITGLYETRIDLSQLGGDGGGSSGSSGSSGSSGSSGGTAPLEEEYRLFLEAPIQNVTLLEQWKREIPKVWAEINPPGLASTQAPIHVQLLSTALPVRVRQYPITLEAKRSLRETIRKFRAAGILRPVHSPWNTPLLPVRKSGTSEYRMVQDLREVNKRVETIHPTVPNPYTLLSLLPPDRIWYSVLDLKDAFFCIPLAPESQLIFAFEWADAEEGESGQLTWTRLPQGFKNSPTLFNEALNRDLQGFRLDHPSVSLLQYVDDLLIAADTQAACLSATRDLLMTLAELGYRVSGKKAQLCQEEVTYLGFKIHKGSRSLSNSRTQAILQIPVPKTKRQVREFLGKIGYCRLFIPGFAELAQPLYAATRPGNDPLVWGEKEEEAFQSLKLALTQPPALALPSLDKPFQLFVEETSGAAKGVLTQALGPWKRPVAYLSKRLDPVAAGWPRCLRAIAAAALLTREASKLTFGQDIEITSSHNLESLLRSPPDKWLTNARITQYQVLLLDPPRVRFKQTAALNPATLLPETDDTLPIHHCLDTLDSLTSTRPDLTDQPLAQAEATLFTDGSSYIRDGKRYAGAAVVTLDSVIWAEPLPIGTSAQKAELIALTKALEWSKDKSVNIYTDSRYAFATLHVHGMIYRERGWLTAGGKAIKNAPEILALLTAVWLPKRVAVMHCKGHQKDDAPTSTGNRRADEVAREVAIRPLSTQATISAGKRTADGSEFEKRTADGSEFESPKKKAKVE

SEQ ID NO: 6330 - protein, 2131 aa, synthetic construct
MPAAKRVKLDGGDKKYSIGLDIGTNSVGWAVITDEYKVPSKKFKVLGNTDRHSIKKNLIGALLFDSGETAEATRLKRTARRRYTRRKNRICYLQEIFSNEMAKVDDSFFHRLEESFLVEEDKKHERHPIFGNIVDEVAYHEKYPTIYHLRKKLVDSTDKADLRLIYLALAHMIKFRGHFLIEGDLNPDNSDVDKLFIQLVQTYNQLFEENPINASGVDAKAILSARLSKSRRLENLIAQLPGEKKNGLFGNLIALSLGLTPNFKSNFDLAEDAKLQLSKDTYDDDLDNLLAQIGDQYADLFLAAKNLSDAILLSDILRVNTEITKAPLSASMIKRYDEHHQDLTLLKALVRQQLPEKYKEIFFDQSKNGYAGYIDGGASQEEFYKFIKPILEKMDGTEELLVKLNREDLLRKQRTFDNGSIPHQIHLGELHAILRRQEDFYPFLKDNREKIEKILTFRIPYYVGPLARGNSRFAWMTRKSEETITPWNFEEVVDKGASAQSFIERMTNFDKNLPNEKVLPKHSLLYEYFTVYNELTKVKYVTEGMRKPAFLSGEQKKAIVDLLFKTNRKVTVKQLKEDYFKKIECFDSVEISGVEDRFNASLGTYHDLLKIIKDKDFLDNEENEDILEDIVLTLTLFEDREMIEERLKTYAHLFDDKVMKQLKRRRYTGWGRLSRKLINGIRDKQSGKTILDFLKSDGFANRNFMQLIHDDSLTFKEDIQKAQVSGQGDSLHEHIANLAGSPAIKKGILQTVKVVDELVKVMGRHKPENIVIEMARENQTTQKGQKNSRERMKRIEEGIKELGSQILKEHPVENTQLQNEKLYLYYLQNGRDMYVDQELDINRLSDYDVDHIVPQSFLKDDSIDNKVLTRSDKARGKSDNVPSEEVVKKMKNYWRQLLNAKLITQRKFDNLTKAERGGLSELDKAGFIKRQLVETRQITKHVAQILDSRMNTKYDENDKLIREVKVITLKSKLVSDFRKDFQFYKVREINNYHHAHDAYLNAVVGTALIKKYPKLESEFVYGDYKVYDVRKMIAKSEQEIGKATAKYFFYSNIMNFFKTEITLANGEIRKRPLIETNGETGEIVWDKGRDFATVRKVLSMPQVNIVKKTEVQTGGFSKESILPKRNSDKLIARKKDWDPKKYGGFDSPTVAYSVLVVAKVEKGKSKKLKSVKELLGITIMERSSFEKNPIDFLEAKGYKEVKKDLIIKLPKYSLFELENGRKRMLASAGELQKGNELALPSKYVNFLYLASHYEKLKGSPEDNEQKQLFVEQHKHYLDEIIEQISEFSKRVILADANLDKVLSAYNKHRDKPIREQAENIIHLFTLTNLGAPAAFKYFDTTIDRKRYTSTKEVLDATLIHQSITGLYETRIDLSQLGGDGGGSSGSSGSSGSSGSSGGLLGRDLLTKLKAQIQFSTEGPQVTWEDRPAMCLVLNLEEEYRLHEKPVPPSIDPSWLQLFPMVWAEKAGMGLANQVPPVVVELKSDASPVAVRQYPMSKEAREGIRPHIQRFLDLGILVPCQSPWNTPLLPVKKPGTNDYRPVQDLREVNKRVQDIHPTVPNPYNLLSSLPPSHTWYSVLDLKDAFFCLKLHPNSQPLFAFEWRDPEKGNTGQLTWTRLPQGFKNSPTLFDEALHRDLASFRALNPQVVMLQYVDDLLVAAPTYRDCKEGTRRLLQELSKLGYRVSAKKAQLCREEVTYLGYLLKGGKRWLTPARKATVMKIPTPTTPRQVREFLGTAGFCRLWIPGFASLAAPLYPLTREKVPFTWTEAHQEAFGRIKEALLSAPALALPDLTKPFALYVDEKEGVARGVLTQTLGPWRRPVAYLSKKLDPVASGWPTCLKAIAAVALLLKDADKLTLGQNVLVIAPHNLESIVRQPPDRWMTNARMTHYQSLLLNERVSFAPPAILNPATLLPVESDDTPIHICSEILAEETGTRPDLRDQPLPGVPAWYTDGSSFIMDGRRQAGAAIVDNKRTVWASNLPEGTSAQKAELIALTQALRLAEGKSINIYTDSRYAFATAHVHGAIYKQRGLLTSAGKDIKNKEEILALLEAIHLPKRVAIIHCPGHQRGTDPVATGNRKADEAAKQAAQSTRILTETTKNAGKRTADGSEFEKRTADGSEFESPKKKAKVE

SEQ ID NO: 6331 - protein, 2222 aa, synthetic construct
MPAAKRVKLDGGDKKYSIGLDIGTNSVGWAVITDEYKVPSKKFKVLGNTDRHSIKKNLIGALLFDSGETAEATRLKRTARRRYTRRKNRICYLQEIFSNEMAKVDDSFFHRLEESFLVEEDKKHERHPIFGNIVDEVAYHEKYPTIYHLRKKLVDSTDKADLRLIYLALAHMIKFRGHFLIEGDLNPDNSDVDKLFIQLVQTYNQLFEENPINASGVDAKAILSARLSKSRRLENLIAQLPGEKKNGLFGNLIALSLGLTPNFKSNFDLAEDAKLQLSKDTYDDDLDNLLAQIGDQYADLFLAAKNLSDAILLSDILRVNTEITKAPLSASMIKRYDEHHQDLTLLKALVRQQLPEKYKEIFFDQSKNGYAGYIDGGASQEEFYKFIKPILEKMDGTEELLVKLNREDLLRKQRTFDNGSIPHQIHLGELHAILRRQEDFYPFLKDNREKIEKILTFRIPYYVGPLARGNSRFAWMTRKSEETITPWNFEEVVDKGASAQSFIERMTNFDKNLPNEKVLPKHSLLYEYFTVYNELTKVKYVTEGMRKPAFLSGEQKKAIVDLLFKTNRKVTVKQLKEDYFKKIECFDSVEISGVEDRFNASLGTYHDLLKIIKDKDFLDNEENEDILEDIVLTLTLFEDREMIEERLKTYAHLFDDKVMKQLKRRRYTGWGRLSRKLINGIRDKQSGKTILDFLKSDGFANRNFMQLIHDDSLTFKEDIQKAQVSGQGDSLHEHIANLAGSPAIKKGILQTVKVVDELVKVMGRHKPENIVIEMARENQTTQKGQKNSRERMKRIEEGIKELGSQILKEHPVENTQLQNEKLYLYYLQNGRDMYVDQELDINRLSDYDVDHIVPQSFLKDDSIDNKVLTRSDKARGKSDNVPSEEVVKKMKNYWRQLLNAKLITQRKFDNLTKAERGGLSELDKAGFIKRQLVETRQITKHVAQILDSRMNTKYDENDKLIREVKVITLKSKLVSDFRKDFQFYKVREINNYHHAHDAYLNAVVGTALIKKYPKLESEFVYGDYKVYDVRKMIAKSEQEIGKATAKYFFYSNIMNFFKTEITLANGEIRKRPLIETNGETGEIVWDKGRDFATVRKVLSMPQVNIVKKTEVQTGGFSKESILPKRNSDKLIARKKDWDPKKYGGFDSPTVAYSVLVVAKVEKGKSKKLKSVKELLGITIMERSSFEKNPIDFLEAKGYKEVKKDLIIKLPKYSLFELENGRKRMLASAGELQKGNELALPSKYVNFLYLASHYEKLKGSPEDNEQKQLFVEQHKHYLDEIIEQISEFSKRVILADANLDKVLSAYNKHRDKPIREQAENIIHLFTLTNLGAPAAFKYFDTTIDRKRYTSTKEVLDATLIHQSITGLYETRIDLSQLGGDGGGSSGSSGSSGSSGSSGGTLGDQGSRGSDPLPEPRVTLTVEGIPTEFLVNTGAEHSVLTKPMGKMGSKRTVVAGATGSKVYPWTTKRLLKIGQKQVTHSFLVIPECPAPLLGRDLLTKLKAQIQFSTEGPQVTWEDRPAMCLVLNLEEEYRLHEKPVPPSIDPSWLQLFPMVWAEKAGMGLANQVPPVVVELKSDASPVAVRQYPMSKEAREGIRPHIQRFLDLGILVPCQSPWNTPLLPVKKPGTNDYRPVQDLREVNKRVQDIHPTVPNPYNLLSSLPPSHTWYSVLDLKDAFFCLKLHPNSQPLFAFEWRDPEKGNTGQLTWTRLPQGFKNSPTLFNEALHRDLASFRALNPQVVMLQYVDDLLVAAPTYRDCKEGTRRLLQELSKLGYRVSAKKAQLCREEVTYLGYLLKGGKRWLTPARKATVMKIPTPTTPRQVREFLGTAGFCRLWIPGFASLAAPLYPLTRPKVPFTWTEAHQEAFGRIKEALLSAPALALPDLTKPFALYVDEKEGVARGVLTQTLGPWRRPVAYLSKKLDPVASGWPTCLKAIAAVALLLKDADKLTLGQNVLVIAPHNLESIVRQPPDRWMTNARMTHYQSLLLNERVSFAPPAILNPATLLPVESDDTPIHICSEILAEETGTRPDLRDQPLPGVPAWYTDGSSFIMDGRRQAGAAIVDNKRTVWASNLPEGTSAQKAELIALTQALRLAEGKSINIYTDSRYAFATAHVHGAIYKQRGWLTSAGKDIKNKEEILALLEAIHLPKRVAIIHCPGHQRGTDPVATGNRKADEAAKQAAQSTRILTETTKNAGKRTADGSEFEKRTADGSEFESPKKKAKVE

SEQ ID NO: 6332 - protein, 2100 aa, synthetic construct
MPAAKRVKLDGGDKKYSIGLDIGTNSVGWAVITDEYKVPSKKFKVLGNTDRHSIKKNLIGALLFDSGETAEATRLKRTARRRYTRRKNRICYLQEIFSNEMAKVDDSFFHRLEESFLVEEDKKHERHPIFGNIVDEVAYHEKYPTIYHLRKKLVDSTDKADLRLIYLALAHMIKFRGHFLIEGDLNPDNSDVDKLFIQLVQTYNQLFEENPINASGVDAKAILSARLSKSRRLENLIAQLPGEKKNGLFGNLIALSLGLTPNFKSNFDLAEDAKLQLSKDTYDDDLDNLLAQIGDQYADLFLAAKNLSDAILLSDILRVNTEITKAPLSASMIKRYDEHHQDLTLLKALVRQQLPEKYKEIFFDQSKNGYAGYIDGGASQEEFYKFIKPILEKMDGTEELLVKLNREDLLRKQRTFDNGSIPHQIHLGELHAILRRQEDFYPFLKDNREKIEKILTFRIPYYVGPLARGNSRFAWMTRKSEETITPWNFEEVVDKGASAQSFIERMTNFDKNLPNEKVLPKHSLLYEYFTVYNELTKVKYVTEGMRKPAFLSGEQKKAIVDLLFKTNRKVTVKQLKEDYFKKIECFDSVEISGVEDRFNASLGTYHDLLKIIKDKDFLDNEENEDILEDIVLTLTLFEDREMIEERLKTYAHLFDDKVMKQLKRRRYTGWGRLSRKLINGIRDKQSGKTILDFLKSDGFANRNFMQLIHDDSLTFKEDIQKAQVSGQGDSLHEHIANLAGSPAIKKGILQTVKVVDELVKVMGRHKPENIVIEMARENQTTQKGQKNSRERMKRIEEGIKELGSQILKEHPVENTQLQNEKLYLYYLQNGRDMYVDQELDINRLSDYDVDHIVPQSFLKDDSIDNKVLTRSDKARGKSDNVPSEEVVKKMKNYWRQLLNAKLITQRKFDNLTKAERGGLSELDKAGFIKRQLVETRQITKHVAQILDSRMNTKYDENDKLIREVKVITLKSKLVSDFRKDFQFYKVREINNYHHAHDAYLNAVVGTALIKKYPKLESEFVYGDYKVYDVRKMIAKSEQEIGKATAKYFFYSNIMNFFKTEITLANGEIRKRPLIETNGETGEIVWDKGRDFATVRKVLSMPQVNIVKKTEVQTGGFSKESILPKRNSDKLIARKKDWDPKKYGGFDSPTVAYSVLVVAKVEKGKSKKLKSVKELLGITIMERSSFEKNPIDFLEAKGYKEVKKDLIIKLPKYSLFELENGRKRMLASAGELQKGNELALPSKYVNFLYLASHYEKLKGSPEDNEQKQLFVEQHKHYLDEIIEQISEFSKRVILADANLDKVLSAYNKHRDKPIREQAENIIHLFTLTNLGAPAAFKYFDTTIDRKRYTSTKEVLDATLIHQSITGLYETRIDLSQLGGDGGGSSGSSGSSGSSGSSGGTLNLEDEYRLYETSAEPEVSPGSTWLSDFPQAWAETGGMGLAVRQAPLIIPLKATSTPVSIKQYPMSQEAKLGIKPHIQRLLDQGILVPCQSPWNTPLLPVKKPGTNDYRPVQDLREVNKRVEDIHPTVPNPYNLLSGLPPSHRWYTVLDLKDAFFCLRLHPTSQPLFAFEWRDPGMGISGQLTWTRLPQGFKNSPTLFNEALHRDLADFRIQHPDLILLQYVDDILLAATSELDCQQGTRALLLTLGNLGYRASAKKAQLCQKQVKYLGYLLKEGQRWLTEARKETVMGQPTPKTPRQLREFLGTAGFCRLWIPGFAEMAAPLYPLTKPGTLFNWGPDQQKAYQEIKQALLTAPALGLPDLTKPFELFVDEKQGYAKGVLTQKLGPWRRPVAYLSKKLDPVAAGWPPCLRMVAAIAVLRKDAGKLTMGQPLVILAPHAVEALVKQPPDRWLSNARMTHYQAMLLDTDRVQFGPVVALNPATLLPLPEEGAPHDCLEILAETHGTRPDLTDQPIPDADHTWYTDGSSFLQEGQRKAGAAVTTETEVIWARALPAGTSAQRAELIALTQALKMAEGKRLNVYTDSRYAFATAHIHGEIYRRRGWLTSEGREIKNKSEILALLKALFLPKRLSIIHCLGHQKGDSAEARGNRLADQAAREAAIKTPPDTSTLLAGKRTADGSEFEKRTADGSEFESPKKKAKVE

SEQ ID NO: 6333 - protein, 2100 aa, synthetic construct
MPAAKRVKLDGGDKKYSIGLDIGTNSVGWAVITDEYKVPSKKFKVLGNTDRHSIKKNLIGALLFDSGETAEATRLKRTARRRYTRRKNRICYLQEIFSNEMAKVDDSFFHRLEESFLVEEDKKHERHPIFGNIVDEVAYHEKYPTIYHLRKKLVDSTDKADLRLIYLALAHMIKFRGHFLIEGDLNPDNSDVDKLFIQLVQTYNQLFEENPINASGVDAKAILSARLSKSRRLENLIAQLPGEKKNGLFGNLIALSLGLTPNFKSNFDLAEDAKLQLSKDTYDDDLDNLLAQIGDQYADLFLAAKNLSDAILLSDILRVNTEITKAPLSASMIKRYDEHHQDLTLLKALVRQQLPEKYKEIFFDQSKNGYAGYIDGGASQEEFYKFIKPILEKMDGTEELLVKLNREDLLRKQRTFDNGSIPHQIHLGELHAILRRQEDFYPFLKDNREKIEKILTFRIPYYVGPLARGNSRFAWMTRKSEETITPWNFEEVVDKGASAQSFIERMTNFDKNLPNEKVLPKHSLLYEYFTVYNELTKVKYVTEGMRKPAFLSGEQKKAIVDLLFKTNRKVTVKQLKEDYFKKIECFDSVEISGVEDRFNASLGTYHDLLKIIKDKDFLDNEENEDILEDIVLTLTLFEDREMIEERLKTYAHLFDDKVMKQLKRRRYTGWGRLSRKLINGIRDKQSGKTILDFLKSDGFANRNFMQLIHDDSLTFKEDIQKAQVSGQGDSLHEHIANLAGSPAIKKGILQTVKVVDELVKVMGRHKPENIVIEMARENQTTQKGQKNSRERMKRIEEGIKELGSQILKEHPVENTQLQNEKLYLYYLQNGRDMYVDQELDINRLSDYDVDHIVPQSFLKDDSIDNKVLTRSDKARGKSDNVPSEEVVKKMKNYWRQLLNAKLITQRKFDNLTKAERGGLSELDKAGFIKRQLVETRQITKHVAQILDSRMNTKYDENDKLIREVKVITLKSKLVSDFRKDFQFYKVREINNYHHAHDAYLNAVVGTALIKKYPKLESEFVYGDYKVYDVRKMIAKSEQEIGKATAKYFFYSNIMNFFKTEITLANGEIRKRPLIETNGETGEIVWDKGRDFATVRKVLSMPQVNIVKKTEVQTGGFSKESILPKRNSDKLIARKKDWDPKKYGGFDSPTVAYSVLVVAKVEKGKSKKLKSVKELLGITIMERSSFEKNPIDFLEAKGYKEVKKDLIIKLPKYSLFELENGRKRMLASAGELQKGNELALPSKYVNFLYLASHYEKLKGSPEDNEQKQLFVEQHKHYLDEIIEQISEFSKRVILADANLDKVLSAYNKHRDKPIREQAENIIHLFTLTNLGAPAAFKYFDTTIDRKRYTSTKEVLDATLIHQSITGLYETRIDLSQLGGDGGGSSGSSGSSGSSGSSGGTLGIEDEYRLHETSTEPDVSLGSTWLSDFPQAWAETGGMGLAVRQAPLIIPLKATSTPVSIQQYPMSHEARLGIKPHIQRLLDQGILVPCQSPWNTPLLPVKKPGTNDYRPVQDLREVNKRVEDIHPTVPNPYNLLSGLPPSHQWYTVLDLKDAFFCLRLHPTSQPLFAFEWRDPGMGISGQLTWTRLPQGFKNSPTLFNEALHRDLADFRIQHPDLILLQYVDDILLAATSELDCQQGTRALLQTLGDLGYRASAKKAQICQKQVKYLGYLLREGQRWLTEARKETVMGQPVPKTPRQLREFLGTAGFCRLWIPGFAEMAAPLYPLTKPGTLFSWGPDQQKAYQEIKQALLTAPALGLPDLTKPFELFVDEKQGYAKGVLTQKLGPWRRPVAYLSKKLDPVAAGWPPCLRMVAAIAVLTKDAGKLTMGQPLVILAPHAVEALVKQPPDRWLSNARMTHYQAMLLDTDRVQFGPVVALNPATLLPLPEEGAPHDCLEILAETHGTRPDLTDQPIPDADHTWYTDGSSFLQEGQRKAGAAVTTETEVIWAGALPAGTSAQRAELIALTQALKMAEGKRLNVYTDSRYAFATAHIHGEIYRRRGWLTSEGREIKNKSEILALLKALFLPKRLSIIHCLGHQKGDSAEARGNRLADQAAREAAIKTPPDTSTLLAGKRTADGSEFEKRTADGSEFESPKKKAKVE

SEQ ID NO: 6334 - protein, 2100 aa, synthetic construct
MPAAKRVKLDGGDKKYSIGLDIGTNSVGWAVITDEYKVPSKKFKVLGNTDRHSIKKNLIGALLFDSGETAEATRLKRTARRRYTRRKNRICYLQEIFSNEMAKVDDSFFHRLEESFLVEEDKKHERHPIFGNIVDEVAYHEKYPTIYHLRKKLVDSTDKADLRLIYLALAHMIKFRGHFLIEGDLNPDNSDVDKLFIQLVQTYNQLFEENPINASGVDAKAILSARLSKSRRLENLIAQLPGEKKNGLFGNLIALSLGLTPNFKSNFDLAEDAKLQLSKDTYDDDLDNLLAQIGDQYADLFLAAKNLSDAILLSDILRVNTEITKAPLSASMIKRYDEHHQDLTLLKALVRQQLPEKYKEIFFDQSKNGYAGYIDGGASQEEFYKFIKPILEKMDGTEELLVKLNREDLLRKQRTFDNGSIPHQIHLGELHAILRRQEDFYPFLKDNREKIEKILTFRIPYYVGPLARGNSRFAWMTRKSEETITPWNFEEVVDKGASAQSFIERMTNFDKNLPNEKVLPKHSLLYEYFTVYNELTKVKYVTEGMRKPAFLSGEQKKAIVDLLFKTNRKVTVKQLKEDYFKKIECFDSVEISGVEDRFNASLGTYHDLLKIIKDKDFLDNEENEDILEDIVLTLTLFEDREMIEERLKTYAHLFDDKVMKQLKRRRYTGWGRLSRKLINGIRDKQSGKTILDFLKSDGFANRNFMQLIHDDSLTFKEDIQKAQVSGQGDSLHEHIANLAGSPAIKKGILQTVKVVDELVKVMGRHKPENIVIEMARENQTTQKGQKNSRERMKRIEEGIKELGSQILKEHPVENTQLQNEKLYLYYLQNGRDMYVDQELDINRLSDYDVDHIVPQSFLKDDSIDNKVLTRSDKARGKSDNVPSEEVVKKMKNYWRQLLNAKLITQRKFDNLTKAERGGLSELDKAGFIKRQLVETRQITKHVAQILDSRMNTKYDENDKLIREVKVITLKSKLVSDFRKDFQFYKVREINNYHHAHDAYLNAVVGTALIKKYPKLESEFVYGDYKVYDVRKMIAKSEQEIGKATAKYFFYSNIMNFFKTEITLANGEIRKRPLIETNGETGEIVWDKGRDFATVRKVLSMPQVNIVKKTEVQTGGFSKESILPKRNSDKLIARKKDWDPKKYGGFDSPTVAYSVLVVAKVEKGKSKKLKSVKELLGITIMERSSFEKNPIDFLEAKGYKEVKKDLIIKLPKYSLFELENGRKRMLASAGELQKGNELALPSKYVNFLYLASHYEKLKGSPEDNEQKQLFVEQHKHYLDEIIEQISEFSKRVILADANLDKVLSAYNKHRDKPIREQAENIIHLFTLTNLGAPAAFKYFDTTIDRKRYTSTKEVLDATLIHQSITGLYETRIDLSQLGGDGGGSSGSSGSSGSSGSSGGTLNIEDEYRLHEISTEPDVSPGSTWLSDFPQAWAETGGMGLAVRQAPLIIPLKATSTPVSIKQYPMSQEAKLGIKPHIQRLLDQGILVPCQSPWNTPLLPVKKPGTNDYRPVQGLREVNKRVEDIHPTVPNPYNLLSGLPTSHRWYTVLDLKDAFFCLRLHPTSQPLFASEWRDPGMGISGQLTWTRLPQGFKNSPTLFDEALHRGLADFRIQHPDLILLQYVDDLLLAATSELDCQQGTRALLKTLGNLGYRASAKKAQICQKQVKYLGYLLREGQRWLTEARKETVMGQPTPKTPRQLREFLGTAGFCRLWIPRFAEMAAPLYPLTKTGTLFNWGPDQQKAYHEIKQALLTAPALGLPDLTKPFELFVDEKQGYAKGVLTQKLGPWRRPVAYLSKKLDPVAAGWPPCLRMVAAIAVLTKDAGKLTMGQPLVILAPHAVEALVKQPPDRWLSNARMTHYQAMLLDTDRVQFGPVVALNPATLLPLPEEGAPHDCLEILAETHGTEPDLTDQPIPDADHTWYTDGSSFLQEGQRKAGAAVTTETEVIWARALPAGTSAQRAELIALTQALKMAEGKRLNVYTDSRYAFATAHIHGEIYKRRGLLTSEGREIKNKSEILALLKALFLPKRLSIIHCLGHQKGDSAEARGNRLADQAAREAAIKTPPDTSTLLAGKRTADGSEFEKRTADGSEFESPKKKAKVE

SEQ ID NO: 6335 - protein, 2100 aa, synthetic construct
MPAAKRVKLDGGDKKYSIGLDIGTNSVGWAVITDEYKVPSKKFKVLGNTDRHSIKKNLIGALLFDSGETAEATRLKRTARRRYTRRKNRICYLQEIFSNEMAKVDDSFFHRLEESFLVEEDKKHERHPIFGNIVDEVAYHEKYPTIYHLRKKLVDSTDKADLRLIYLALAHMIKFRGHFLIEGDLNPDNSDVDKLFIQLVQTYNQLFEENPINASGVDAKAILSARLSKSRRLENLIAQLPGEKKNGLFGNLIALSLGLTPNFKSNFDLAEDAKLQLSKDTYDDDLDNLLAQIGDQYADLFLAAKNLSDAILLSDILRVNTEITKAPLSASMIKRYDEHHQDLTLLKALVRQQLPEKYKEIFFDQSKNGYAGYIDGGASQEEFYKFIKPILEKMDGTEELLVKLNREDLLRKQRTFDNGSIPHQIHLGELHAILRRQEDFYPFLKDNREKIEKILTFRIPYYVGPLARGNSRFAWMTRKSEETITPWNFEEVVDKGASAQSFIERMTNFDKNLPNEKVLPKHSLLYEYFTVYNELTKVKYVTEGMRKPAFLSGEQKKAIVDLLFKTNRKVTVKQLKEDYFKKIECFDSVEISGVEDRFNASLGTYHDLLKIIKDKDFLDNEENEDILEDIVLTLTLFEDREMIEERLKTYAHLFDDKVMKQLKRRRYTGWGRLSRKLINGIRDKQSGKTILDFLKSDGFANRNFMQLIHDDSLTFKEDIQKAQVSGQGDSLHEHIANLAGSPAIKKGILQTVKVVDELVKVMGRHKPENIVIEMARENQTTQKGQKNSRERMKRIEEGIKELGSQILKEHPVENTQLQNEKLYLYYLQNGRDMYVDQELDINRLSDYDVDHIVPQSFLKDDSIDNKVLTRSDKARGKSDNVPSEEVVKKMKNYWRQLLNAKLITQRKFDNLTKAERGGLSELDKAGFIKRQLVETRQITKHVAQILDSRMNTKYDENDKLIREVKVITLKSKLVSDFRKDFQFYKVREINNYHHAHDAYLNAVVGTALIKKYPKLESEFVYGDYKVYDVRKMIAKSEQEIGKATAKYFFYSNIMNFFKTEITLANGEIRKRPLIETNGETGEIVWDKGRDFATVRKVLSMPQVNIVKKTEVQTGGFSKESILPKRNSDKLIARKKDWDPKKYGGFDSPTVAYSVLVVAKVEKGKSKKLKSVKELLGITIMERSSFEKNPIDFLEAKGYKEVKKDLIIKLPKYSLFELENGRKRMLASAGELQKGNELALPSKYVNFLYLASHYEKLKGSPEDNEQKQLFVEQHKHYLDEIIEQISEFSKRVILADANLDKVLSAYNKHRDKPIREQAENIIHLFTLTNLGAPAAFKYFDTTIDRKRYTSTKEVLDATLIHQSITGLYETRIDLSQLGGDGGGSSGSSGSSGSSGSSGGTLNIEDEYRLHEISTEPDVSPGSTWLSDFPQAWAETGGMGLAVRQAPLIIPLKATSTPVSIKQYPMSQEAKLGIKPHIQRLLDQGILVPCQSPWNTPLLPVKKPGTNDYRPVQGLREVNKRVEDIHPTVPNPYNLLSGLPTSHRWYTVLDLKDAFFCLRLHPTSQPLFASEWRDPGMGISGQLTWTRLPQGFKNSPTLFNEALHRGLADFRIQHPDLILLQYVDDLLLAATSELDCQQGTRALLKTLGNLGYRASAKKAQICQKQVKYLGYLLREGQRWLTEARKETVMGQPTPKTPRQLREFLGTAGFCRLWIPRFAEMAAPLYPLTKPGTLFNWGPDQQKAYHEIKQALLTAPALGLPDLTKPFELFVDEKQGYAKGVLTQKLGPWRRPVAYLSKKLDPVAAGWPPCLRMVAAIAVLTKDAGKLTMGQPLVILAPHAVEALVKQPPDRWLSNARMTHYQAMLLDTDRVQFGPVVALNPATLLPLPEEGAPHDCLEILAETHGTEPDLTDQPIPDADHTWYTDGSSFLQEGQRKAGAAVTTETEVIWARALPAGTSAQRAELIALTQALKMAEGKRLNVYTDSRYAFATAHIHGEIYKRRGWLTSEGREIKNKSEILALLKALFLPKRLSIIHCLGHQKGDSAEARGNRLADQAAREAAIKTPPDTSTLLAGKRTADGSEFEKRTADGSEFESPKKKAKVE

SEQ ID NO: 6336 - protein, 2091 aa, synthetic construct
MPAAKRVKLDGGDKKYSIGLDIGTNSVGWAVITDEYKVPSKKFKVLGNTDRHSIKKNLIGALLFDSGETAEATRLKRTARRRYTRRKNRICYLQEIFSNEMAKVDDSFFHRLEESFLVEEDKKHERHPIFGNIVDEVAYHEKYPTIYHLRKKLVDSTDKADLRLIYLALAHMIKFRGHFLIEGDLNPDNSDVDKLFIQLVQTYNQLFEENPINASGVDAKAILSARLSKSRRLENLIAQLPGEKKNGLFGNLIALSLGLTPNFKSNFDLAEDAKLQLSKDTYDDDLDNLLAQIGDQYADLFLAAKNLSDAILLSDILRVNTEITKAPLSASMIKRYDEHHQDLTLLKALVRQQLPEKYKEIFFDQSKNGYAGYIDGGASQEEFYKFIKPILEKMDGTEELLVKLNREDLLRKQRTFDNGSIPHQIHLGELHAILRRQEDFYPFLKDNREKIEKILTFRIPYYVGPLARGNSRFAWMTRKSEETITPWNFEEVVDKGASAQSFIERMTNFDKNLPNEKVLPKHSLLYEYFTVYNELTKVKYVTEGMRKPAFLSGEQKKAIVDLLFKTNRKVTVKQLKEDYFKKIECFDSVEISGVEDRFNASLGTYHDLLKIIKDKDFLDNEENEDILEDIVLTLTLFEDREMIEERLKTYAHLFDDKVMKQLKRRRYTGWGRLSRKLINGIRDKQSGKTILDFLKSDGFANRNFMQLIHDDSLTFKEDIQKAQVSGQGDSLHEHIANLAGSPAIKKGILQTVKVVDELVKVMGRHKPENIVIEMARENQTTQKGQKNSRERMKRIEEGIKELGSQILKEHPVENTQLQNEKLYLYYLQNGRDMYVDQELDINRLSDYDVDHIVPQSFLKDDSIDNKVLTRSDKARGKSDNVPSEEVVKKMKNYWRQLLNAKLITQRKFDNLTKAERGGLSELDKAGFIKRQLVETRQITKHVAQILDSRMNTKYDENDKLIREVKVITLKSKLVSDFRKDFQFYKVREINNYHHAHDAYLNAVVGTALIKKYPKLESEFVYGDYKVYDVRKMIAKSEQEIGKATAKYFFYSNIMNFFKTEITLANGEIRKRPLIETNGETGEIVWDKGRDFATVRKVLSMPQVNIVKKTEVQTGGFSKESILPKRNSDKLIARKKDWDPKKYGGFDSPTVAYSVLVVAKVEKGKSKKLKSVKELLGITIMERSSFEKNPIDFLEAKGYKEVKKDLIIKLPKYSLFELENGRKRMLASAGELQKGNELALPSKYVNFLYLASHYEKLKGSPEDNEQKQLFVEQHKHYLDEIIEQISEFSKRVILADANLDKVLSAYNKHRDKPIREQAENIIHLFTLTNLGAPAAFKYFDTTIDRKRYTSTKEVLDATLIHQSITGLYETRIDLSQLGGDGGGSSGSSGSSGSSGSSGGIPWLMKKPLQLTTLVPLQEYEERLLKQTMLTGSYKEKLQSLFLKYDALWQHWENQVGHRRIKPHHIATGTVNPRPQKQYPINPKAKASIQTVINDLLKQGVLIQQNSIMNTPVYPVPKPDGKWRMVLDYREVNKTIPLIAAQNQHSAGILSSIFRGKYKTTLDLSNGFWAHSITPESYWLTAFTWLGQQYCWTRLPQGFLNSPALFNADVVDLLKEVPNVQVYVDDIYISHDDPREHLEQLEKVFSLLLNAGYVVSLKKSEIAQHEVEFLGFNITKEGRGLTETFKQKLLNITPPRDLKQLQSILGKLNFARNFIPNFSELVKPLYNIIATAPGKYITWTTDNSQQLQNIISMLNSAENLEERNPEVRLIMKVNTSPSAGYIRFYNEFAKRPIMYLNYVYTKAEVKFTNTEKLLTTIHKGLIKALDLGMGQEILVYSPIVSMTKIQKTPLPERKALPIRWITWMSYLEDPRIQFHYDKTLPELQQVPTVTDDIIAKIKHPSEFSMVFYTDGSAIKHPNVNKSHNAGMGIAQVQFKPEFTVINTWSIPLGDHTAQLAEVAAVEFACKKALKIDGPVLIVTDSFYVAESVNKELPYWQSNGFFNNKKKPLKHVSKWKSIADCIQLKPDIIIIHEKGHQPTASTFHTEGNNLADKLATQGSYVVNAGKRTADGSEFEKRTADGSEFESPKKKAKVE

SEQ ID NO: 6337 - protein, 2105 aa, synthetic construct
MPAAKRVKLDGGDKKYSIGLDIGTNSVGWAVITDEYKVPSKKFKVLGNTDRHSIKKNLIGALLFDSGETAEATRLKRTARRRYTRRKNRICYLQEIFSNEMAKVDDSFFHRLEESFLVEEDKKHERHPIFGNIVDEVAYHEKYPTIYHLRKKLVDSTDKADLRLIYLALAHMIKFRGHFLIEGDLNPDNSDVDKLFIQLVQTYNQLFEENPINASGVDAKAILSARLSKSRRLENLIAQLPGEKKNGLFGNLIALSLGLTPNFKSNFDLAEDAKLQLSKDTYDDDLDNLLAQIGDQYADLFLAAKNLSDAILLSDILRVNTEITKAPLSASMIKRYDEHHQDLTLLKALVRQQLPEKYKEIFFDQSKNGYAGYIDGGASQEEFYKFIKPILEKMDGTEELLVKLNREDLLRKQRTFDNGSIPHQIHLGELHAILRRQEDFYPFLKDNREKIEKILTFRIPYYVGPLARGNSRFAWMTRKSEETITPWNFEEVVDKGASAQSFIERMTNFDKNLPNEKVLPKHSLLYEYFTVYNELTKVKYVTEGMRKPAFLSGEQKKAIVDLLFKTNRKVTVKQLKEDYFKKIECFDSVEISGVEDRFNASLGTYHDLLKIIKDKDFLDNEENEDILEDIVLTLTLFEDREMIEERLKTYAHLFDDKVMKQLKRRRYTGWGRLSRKLINGIRDKQSGKTILDFLKSDGFANRNFMQLIHDDSLTFKEDIQKAQVSGQGDSLHEHIANLAGSPAIKKGILQTVKVVDELVKVMGRHKPENIVIEMARENQTTQKGQKNSRERMKRIEEGIKELGSQILKEHPVENTQLQNEKLYLYYLQNGRDMYVDQELDINRLSDYDVDHIVPQSFLKDDSIDNKVLTRSDKARGKSDNVPSEEVVKKMKNYWRQLLNAKLITQRKFDNLTKAERGGLSELDKAGFIKRQLVETRQITKHVAQILDSRMNTKYDENDKLIREVKVITLKSKLVSDFRKDFQFYKVREINNYHHAHDAYLNAVVGTALIKKYPKLESEFVYGDYKVYDVRKMIAKSEQEIGKATAKYFFYSNIMNFFKTEITLANGEIRKRPLIETNGETGEIVWDKGRDFATVRKVLSMPQVNIVKKTEVQTGGFSKESILPKRNSDKLIARKKDWDPKKYGGFDSPTVAYSVLVVAKVEKGKSKKLKSVKELLGITIMERSSFEKNPIDFLEAKGYKEVKKDLIIKLPKYSLFELENGRKRMLASAGELQKGNELALPSKYVNFLYLASHYEKLKGSPEDNEQKQLFVEQHKHYLDEIIEQISEFSKRVILADANLDKVLSAYNKHRDKPIREQAENIIHLFTLTNLGAPAAFKYFDTTIDRKRYTSTKEVLDATLIHQSITGLYETRIDLSQLGGDGGGSSGSSGSSGSSGSSGSSGGTAPLEEEYRLFLEAPIQNVTLLEQWKREIPKVWAEINPPGLASTQAPIHVQLLSTALPVRVRQYPITLEAKRSLRETIRKFRAAGILRPVHSPWNTPLLPVRKSGTSEYRMVQDLREVNKRVETIHPTVPNPYTLLSLLPPDRIWYSVLDLKDAFFCIPLAPESQLIFAFEWADAEEGESGQLTWTRLPQGFKNSPTLFDEALNRDLQGFRLDHPSVSLLQYVDDLLIAADTQAACLSATRDLLMTLAELGYRVSGKKAQLCQEEVTYLGFKIHKGSRSLSNSRTQAILQIPVPKTKRQVREFLGTIGYCRLWIPGFAELAQPLYAATRGGNDPLVWGEKEEEAFQSLKLALTQPPALALPSLDKPFQLFVEETSGAAKGVLTQALGPWKRPVAYLSKRLDPVAAGWPRCLRAIAAAALLTREASKLTFGQDIEITSSHNLESLLRSPPDKWLTNARITQYQVLLLDPPRVRFKQTAALNPATLLPETDDTLPIHHCLDTLDSLTSTRPDLTDQPLAQAEATLFTDGSSYIRDGKRYAGAAVVTLDSVIWAEPLPIGTSAQKAELIALTKALEWSKDKSVNIYTDSRYAFATLHVHGMIYRERGLLTAGGKAIKNAPEILALLTAVWLPKRVAVMHCKGHQKDDAPTSTGNRRADEVAREVAIRPLSTQATISAGKRTADGSEFEKRTADGSEFESPKKKAKVE

SEQ ID NO: 6338 - protein, 2180 aa, synthetic construct
MPAAKRVKLDGGDKKYSIGLDIGTNSVGWAVITDEYKVPSKKFKVLGNTDRHSIKKNLIGALLFDSGETAEATRLKRTARRRYTRRKNRICYLQEIFSNEMAKVDDSFFHRLEESFLVEEDKKHERHPIFGNIVDEVAYHEKYPTIYHLRKKLVDSTDKADLRLIYLALAHMIKFRGHFLIEGDLNPDNSDVDKLFIQLVQTYNQLFEENPINASGVDAKAILSARLSKSRRLENLIAQLPGEKKNGLFGNLIALSLGLTPNFKSNFDLAEDAKLQLSKDTYDDDLDNLLAQIGDQYADLFLAAKNLSDAILLSDILRVNTEITKAPLSASMIKRYDEHHQDLTLLKALVRQQLPEKYKEIFFDQSKNGYAGYIDGGASQEEFYKFIKPILEKMDGTEELLVKLNREDLLRKQRTFDNGSIPHQIHLGELHAILRRQEDFYPFLKDNREKIEKILTFRIPYYVGPLARGNSRFAWMTRKSEETITPWNFEEVVDKGASAQSFIERMTNFDKNLPNEKVLPKHSLLYEYFTVYNELTKVKYVTEGMRKPAFLSGEQKKAIVDLLFKTNRKVTVKQLKEDYFKKIECFDSVEISGVEDRFNASLGTYHDLLKIIKDKDFLDNEENEDILEDIVLTLTLFEDREMIEERLKTYAHLFDDKVMKQLKRRRYTGWGRLSRKLINGIRDKQSGKTILDFLKSDGFANRNFMQLIHDDSLTFKEDIQKAQVSGQGDSLHEHIANLAGSPAIKKGILQTVKVVDELVKVMGRHKPENIVIEMARENQTTQKGQKNSRERMKRIEEGIKELGSQILKEHPVENTQLQNEKLYLYYLQNGRDMYVDQELDINRLSDYDVDHIVPQSFLKDDSIDNKVLTRSDKARGKSDNVPSEEVVKKMKNYWRQLLNAKLITQRKFDNLTKAERGGLSELDKAGFIKRQLVETRQITKHVAQILDSRMNTKYDENDKLIREVKVITLKSKLVSDFRKDFQFYKVREINNYHHAHDAYLNAVVGTALIKKYPKLESEFVYGDYKVYDVRKMIAKSEQEIGKATAKYFFYSNIMNFFKTEITLANGEIRKRPLIETNGETGEIVWDKGRDFATVRKVLSMPQVNIVKKTEVQTGGFSKESILPKRNSDKLIARKKDWDPKKYGGFDSPTVAYSVLVVAKVEKGKSKKLKSVKELLGITIMERSSFEKNPIDFLEAKGYKEVKKDLIIKLPKYSLFELENGRKRMLASAGELQKGNELALPSKYVNFLYLASHYEKLKGSPEDNEQKQLFVEQHKHYLDEIIEQISEFSKRVILADANLDKVLSAYNKHRDKPIREQAENIIHLFTLTNLGAPAAFKYFDTTIDRKRYTSTKEVLDATLIHQSITGLYETRIDLSQLGGDGGGSSGSSGSSGSSGSSGSSGGMDLLKPLTVERKGVKIKGYWNSQADITCVPKDLLQGEEPVRQQNVTTIHGTQEGDVYYVNLKIDGRRINTEVIGTTLDYAIITPGDVPWILKKPLELTIKLDLEEQQGTLLNNSILSKKGKEELKQLFEKYSALWQSWENQVGHRRIRPHKIATGTVKPTPQKQYHINPKAKPDIQIVINDLLKQGVLIQKESTMNTPVYPVPKPNGRWRMVLDYRAVNKVTPLIAVQNQHSYGILGSLFKGRYKTTIDLSNGFWAHPIVPEDYWITAFTWQGKQYCWTVLPQGFLNSPGLFNGDVVDLLQGIPNVEVYVDDVYISHDSEKEHLEYLDILFNRLKEAGYIISLKKSNIANSIVDFLGFQITNEGRGLTDTFKEKLENITAPTTLKQLQSILGLLNFARNFIPDFTELIAPLYALIPKSPKNYVPWQIEHSTTLETLITKLNGAEYLQGRKGDKTLIMKVNASYTTGYIRYYNEGEKKPISYVSIVFSKTELKFTELEKLLTTVHKGLLKALDLSMGQNIHVYSPIVSMQNIQKTPQTAKKALASRWLSWLSYLEDPRIRFFYDPQMPALKDLPAVDTGKDNKKHPSNFQHIFYTDGSAITSPTKEGHLNAGMGIVYFINKDGNLQKQQEWSISLGNHTAQFAEIAAFEFALKKCLPLGGNILVVTDSNYVAKAYNEELDVWASNGFVNNRKKPLKHISKWKSVADLKRLRPDVVVTHEPGHQKLDSSPHAYGNNLADQLATQASFKVHAGKRTADGSEFEKRTADGSEFESPKKKAKVE

SEQ ID NO: 6339 - protein, 2102 aa, synthetic construct
MPAAKRVKLDGGDKKYSIGLDIGTNSVGWAVITDEYKVPSKKFKVLGNTDRHSIKKNLIGALLFDSGETAEATRLKRTARRRYTRRKNRICYLQEIFSNEMAKVDDSFFHRLEESFLVEEDKKHERHPIFGNIVDEVAYHEKYPTIYHLRKKLVDSTDKADLRLIYLALAHMIKFRGHFLIEGDLNPDNSDVDKLFIQLVQTYNQLFEENPINASGVDAKAILSARLSKSRRLENLIAQLPGEKKNGLFGNLIALSLGLTPNFKSNFDLAEDAKLQLSKDTYDDDLDNLLAQIGDQYADLFLAAKNLSDAILLSDILRVNTEITKAPLSASMIKRYDEHHQDLTLLKALVRQQLPEKYKEIFFDQSKNGYAGYIDGGASQEEFYKFIKPILEKMDGTEELLVKLNREDLLRKQRTFDNGSIPHQIHLGELHAILRRQEDFYPFLKDNREKIEKILTFRIPYYVGPLARGNSRFAWMTRKSEETITPWNFEEVVDKGASAQSFIERMTNFDKNLPNEKVLPKHSLLYEYFTVYNELTKVKYVTEGMRKPAFLSGEQKKAIVDLLFKTNRKVTVKQLKEDYFKKIECFDSVEISGVEDRFNASLGTYHDLLKIIKDKDFLDNEENEDILEDIVLTLTLFEDREMIEERLKTYAHLFDDKVMKQLKRRRYTGWGRLSRKLINGIRDKQSGKTILDFLKSDGFANRNFMQLIHDDSLTFKEDIQKAQVSGQGDSLHEHIANLAGSPAIKKGILQTVKVVDELVKVMGRHKPENIVIEMARENQTTQKGQKNSRERMKRIEEGIKELGSQILKEHPVENTQLQNEKLYLYYLQNGRDMYVDQELDINRLSDYDVDHIVPQSFLKDDSIDNKVLTRSDKARGKSDNVPSEEVVKKMKNYWRQLLNAKLITQRKFDNLTKAERGGLSELDKAGFIKRQLVETRQITKHVAQILDSRMNTKYDENDKLIREVKVITLKSKLVSDFRKDFQFYKVREINNYHHAHDAYLNAVVGTALIKKYPKLESEFVYGDYKVYDVRKMIAKSEQEIGKATAKYFFYSNIMNFFKTEITLANGEIRKRPLIETNGETGEIVWDKGRDFATVRKVLSMPQVNIVKKTEVQTGGFSKESILPKRNSDKLIARKKDWDPKKYGGFDSPTVAYSVLVVAKVEKGKSKKLKSVKELLGITIMERSSFEKNPIDFLEAKGYKEVKKDLIIKLPKYSLFELENGRKRMLASAGELQKGNELALPSKYVNFLYLASHYEKLKGSPEDNEQKQLFVEQHKHYLDEIIEQISEFSKRVILADANLDKVLSAYNKHRDKPIREQAENIIHLFTLTNLGAPAAFKYFDTTIDRKRYTSTKEVLDATLIHQSITGLYETRIDLSQLGGDGGGSSGSSGSSGSSGSSGSSGGTLQLEEEYRLFEPESTQKQEMDIWLKNFPQAWAETGGMGTAHCQAPVLIQLKATATPISIRQYPMPHEAYQGIKPHIRRMLDQGILKPCQSPWNTPLLPVKKPGTEDYRPVQDLREVNKRVEDIHPTVPNPYNLLSTLPPSHPWYTVLDLKDAFFCLRLHSESQLLFAFEWRDPEIGLSGQLTWTRLPQGFKNSPTLFNEALHSDLADFRVRYPALVLLQYVDDLLLAAATRTECLEGTKALLETLGNKGYRASAKKAQICLQEVTYLGYSLKDGQRWLTKARKEAILSIPVPKNSRQVREFLGTAGYCRLWIPGFAELAAPLYPLTRPGTLFQWGTEQQLAFEDIKKALLSSPALGLPDITKPFELFIDENSGFAKGVLVQKLGPWKRPVAYLSKKLDTVASGWPPCLRMVAAIAILVKDAGKLTLGQPLTILTSHPVEALVRQPPNKWLSNARMTHYQAMLLDAERVHFGPTVSLNPATLLPLPSGGNHHDCLQILAETHGTRPDLTDQPLPDADLTWYTDGSSFIRNGEREAGAAVTTESEVIWAAPLPPGTSAQRAELIALTQALKMAEGKKLTVYTDSRYAFATTHVHGEIYRRRGWLTSEGKEIKNKNEILALLEALFLPKRLSIIHCPGHQKGDSPQAKGNRLADDTAKKAATETHSSLTVLPAGKRTADGSEFEKRTADGSEFESPKKKAKVE

SEQ ID NO: 6340 - protein, 2094 aa, synthetic construct
MPAAKRVKLDGGDKKYSIGLDIGTNSVGWAVITDEYKVPSKKFKVLGNTDRHSIKKNLIGALLFDSGETAEATRLKRTARRRYTRRKNRICYLQEIFSNEMAKVDDSFFHRLEESFLVEEDKKHERHPIFGNIVDEVAYHEKYPTIYHLRKKLVDSTDKADLRLIYLALAHMIKFRGHFLIEGDLNPDNSDVDKLFIQLVQTYNQLFEENPINASGVDAKAILSARLSKSRRLENLIAQLPGEKKNGLFGNLIALSLGLTPNFKSNFDLAEDAKLQLSKDTYDDDLDNLLAQIGDQYADLFLAAKNLSDAILLSDILRVNTEITKAPLSASMIKRYDEHHQDLTLLKALVRQQLPEKYKEIFFDQSKNGYAGYIDGGASQEEFYKFIKPILEKMDGTEELLVKLNREDLLRKQRTFDNGSIPHQIHLGELHAILRRQEDFYPFLKDNREKIEKILTFRIPYYVGPLARGNSRFAWMTRKSEETITPWNFEEVVDKGASAQSFIERMTNFDKNLPNEKVLPKHSLLYEYFTVYNELTKVKYVTEGMRKPAFLSGEQKKAIVDLLFKTNRKVTVKQLKEDYFKKIECFDSVEISGVEDRFNASLGTYHDLLKIIKDKDFLDNEENEDILEDIVLTLTLFEDREMIEERLKTYAHLFDDKVMKQLKRRRYTGWGRLSRKLINGIRDKQSGKTILDFLKSDGFANRNFMQLIHDDSLTFKEDIQKAQVSGQGDSLHEHIANLAGSPAIKKGILQTVKVVDELVKVMGRHKPENIVIEMARENQTTQKGQKNSRERMKRIEEGIKELGSQILKEHPVENTQLQNEKLYLYYLQNGRDMYVDQELDINRLSDYDVDHIVPQSFLKDDSIDNKVLTRSDKARGKSDNVPSEEVVKKMKNYWRQLLNAKLITQRKFDNLTKAERGGLSELDKAGFIKRQLVETRQITKHVAQILDSRMNTKYDENDKLIREVKVITLKSKLVSDFRKDFQFYKVREINNYHHAHDAYLNAVVGTALIKKYPKLESEFVYGDYKVYDVRKMIAKSEQEIGKATAKYFFYSNIMNFFKTEITLANGEIRKRPLIETNGETGEIVWDKGRDFATVRKVLSMPQVNIVKKTEVQTGGFSKESILPKRNSDKLIARKKDWDPKKYGGFDSPTVAYSVLVVAKVEKGKSKKLKSVKELLGITIMERSSFEKNPIDFLEAKGYKEVKKDLIIKLPKYSLFELENGRKRMLASAGELQKGNELALPSKYVNFLYLASHYEKLKGSPEDNEQKQLFVEQHKHYLDEIIEQISEFSKRVILADANLDKVLSAYNKHRDKPIREQAENIIHLFTLTNLGAPAAFKYFDTTIDRKRYTSTKEVLDATLIHQSITGLYETRIDLSQLGGDGGGSSGSSGSSGSSGSSGSSGGVPWLTQQPLQLTILVPLQEYQEKILSKTALPEDQKQQLKTLFVKYDNLWQHWENQVGHRKIRPHNIATGDYPPRPQKQYPINPKAKPSIQIVIDDLLKQGVLTPQNSTMNTPVYPVPKPDGRWRMVLDYREVNKTIPLTAAQNQHSAGILATIVRQKYKTTLDLANGFWAHPITPESYWLTAFTWQGKQYCWTRLPQGFLNSPALFNADVVDLLKEIPNVQVYVDDIYLSHDDPKEHVQQLEKVFQILLQAGYVVSLKKSEIGQKTVEFLGFNITKEGRGLTDTFKTKLLNITPPKDLKQLQSILGLLNFARNFIPNFAELVQPLYNLIAPAKGKYIEWSEENTKQLNMVIEALNTASNLEERLPEQRLVIKVNTSPSAGYVRYYNETGKKPIMYLNYVFSKAELKFSMLEKLLTTMHKALIKAMDLAMGQEILVYSPIVSMTKIQKTPLPERKALPIRWITWMTYLEDPRIQFHYDKTLPELKHIPDVYTSSQSPVKHPSQYEGVFYTDGSAIKSPDPTKSNNAGMGIVHATYKPEYQVLNQWSIPLGNHTAQMAEIAAVEFACKKALKIPGPVLVITDSFYVAESANKELPYWKSNGFVNNKKKPLKHISKWKSIAECLSMKPDITIQHEKGISLQIPVFILKGNALADKLATQGSYVVNAGKRTADGSEFEKRTADGSEFESPKKKAKVE

SEQ ID NO: 6341 - protein, 2094 aa, synthetic construct
MPAAKRVKLDGGDKKYSIGLDIGTNSVGWAVITDEYKVPSKKFKVLGNTDRHSIKKNLIGALLFDSGETAEATRLKRTARRRYTRRKNRICYLQEIFSNEMAKVDDSFFHRLEESFLVEEDKKHERHPIFGNIVDEVAYHEKYPTIYHLRKKLVDSTDKADLRLIYLALAHMIKFRGHFLIEGDLNPDNSDVDKLFIQLVQTYNQLFEENPINASGVDAKAILSARLSKSRRLENLIAQLPGEKKNGLFGNLIALSLGLTPNFKSNFDLAEDAKLQLSKDTYDDDLDNLLAQIGDQYADLFLAAKNLSDAILLSDILRVNTEITKAPLSASMIKRYDEHHQDLTLLKALVRQQLPEKYKEIFFDQSKNGYAGYIDGGASQEEFYKFIKPILEKMDGTEELLVKLNREDLLRKQRTFDNGSIPHQIHLGELHAILRRQEDFYPFLKDNREKIEKILTFRIPYYVGPLARGNSRFAWMTRKSEETITPWNFEEVVDKGASAQSFIERMTNFDKNLPNEKVLPKHSLLYEYFTVYNELTKVKYVTEGMRKPAFLSGEQKKAIVDLLFKTNRKVTVKQLKEDYFKKIECFDSVEISGVEDRFNASLGTYHDLLKIIKDKDFLDNEENEDILEDIVLTLTLFEDREMIEERLKTYAHLFDDKVMKQLKRRRYTGWGRLSRKLINGIRDKQSGKTILDFLKSDGFANRNFMQLIHDDSLTFKEDIQKAQVSGQGDSLHEHIANLAGSPAIKKGILQTVKVVDELVKVMGRHKPENIVIEMARENQTTQKGQKNSRERMKRIEEGIKELGSQILKEHPVENTQLQNEKLYLYYLQNGRDMYVDQELDINRLSDYDVDHIVPQSFLKDDSIDNKVLTRSDKARGKSDNVPSEEVVKKMKNYWRQLLNAKLITQRKFDNLTKAERGGLSELDKAGFIKRQLVETRQITKHVAQILDSRMNTKYDENDKLIREVKVITLKSKLVSDFRKDFQFYKVREINNYHHAHDAYLNAVVGTALIKKYPKLESEFVYGDYKVYDVRKMIAKSEQEIGKATAKYFFYSNIMNFFKTEITLANGEIRKRPLIETNGETGEIVWDKGRDFATVRKVLSMPQVNIVKKTEVQTGGFSKESILPKRNSDKLIARKKDWDPKKYGGFDSPTVAYSVLVVAKVEKGKSKKLKSVKELLGITIMERSSFEKNPIDFLEAKGYKEVKKDLIIKLPKYSLFELENGRKRMLASAGELQKGNELALPSKYVNFLYLASHYEKLKGSPEDNEQKQLFVEQHKHYLDEIIEQISEFSKRVILADANLDKVLSAYNKHRDKPIREQAENIIHLFTLTNLGAPAAFKYFDTTIDRKRYTSTKEVLDATLIHQSITGLYETRIDLSQLGGDGGGSSGSSGSSGSSGSSGSSGGVPWLTQQPLQLTILVPLQEYQEKILSKTALPEDQKQQLKTLFVKYDNLWQHWENQVGHRKIRPHNIATGDYPPRPQKQYPINPKAKPSIQIVIDDLLKQGVLTPQNSTMNTPVYPVPKPDGRWRMVLDYREVNKTIPLTAAQNQHSAGILATIVRQKYKTTLDLANGFWAHPITPESYWLTAFTWQGKQYCWTRLPQGFLNSPALFNADVVDLLKEIPNVQVYVDDIYLSHDDPKEHVQQLEKVFQILLQAGYVVSLKKSEIGQKTVEFLGFNITKEGRGLTDTFKTKLLNITPPKDLKQLQSILGKLNFARNFIPNFAELVQPLYNLIAPAKGKYIEWSEENTKQLNMVIEALNTASNLEERLPEQRLVIKVNTSPSAGYVRYYNETGKKPIMYLNYVFSKAELKFSMLEKLLTTMHKALIKAMDLAMGQEILVYSPIVSMTKIQKTPLPERKALPIRWITWMTYLEDPRIQFHYDKTLPELKHIPDVYTSSQSPVKHPSQYEGVFYTDGSAIKSPDPTKSNNAGMGIVHATYKPEYQVLNQWSIPLGNHTAQMAEIAAVEFACKKALKIPGPVLVITDSFYVAESANKELPYWKSNGFVNNKKKPLKHISKWKSIAECLSMKPDITIQHEKGISLQIPVFILKGNALADKLATQGSYVVNAGKRTADGSEFEKRTADGSEFESPKKKAKVE

SEQ ID NO: 6342 - protein, 2183 aa, synthetic construct
MPAAKRVKLDGGDKKYSIGLDIGTNSVGWAVITDEYKVPSKKFKVLGNTDRHSIKKNLIGALLFDSGETAEATRLKRTARRRYTRRKNRICYLQEIFSNEMAKVDDSFFHRLEESFLVEEDKKHERHPIFGNIVDEVAYHEKYPTIYHLRKKLVDSTDKADLRLIYLALAHMIKFRGHFLIEGDLNPDNSDVDKLFIQLVQTYNQLFEENPINASGVDAKAILSARLSKSRRLENLIAQLPGEKKNGLFGNLIALSLGLTPNFKSNFDLAEDAKLQLSKDTYDDDLDNLLAQIGDQYADLFLAAKNLSDAILLSDILRVNTEITKAPLSASMIKRYDEHHQDLTLLKALVRQQLPEKYKEIFFDQSKNGYAGYIDGGASQEEFYKFIKPILEKMDGTEELLVKLNREDLLRKQRTFDNGSIPHQIHLGELHAILRRQEDFYPFLKDNREKIEKILTFRIPYYVGPLARGNSRFAWMTRKSEETITPWNFEEVVDKGASAQSFIERMTNFDKNLPNEKVLPKHSLLYEYFTVYNELTKVKYVTEGMRKPAFLSGEQKKAIVDLLFKTNRKVTVKQLKEDYFKKIECFDSVEISGVEDRFNASLGTYHDLLKIIKDKDFLDNEENEDILEDIVLTLTLFEDREMIEERLKTYAHLFDDKVMKQLKRRRYTGWGRLSRKLINGIRDKQSGKTILDFLKSDGFANRNFMQLIHDDSLTFKEDIQKAQVSGQGDSLHEHIANLAGSPAIKKGILQTVKVVDELVKVMGRHKPENIVIEMARENQTTQKGQKNSRERMKRIEEGIKELGSQILKEHPVENTQLQNEKLYLYYLQNGRDMYVDQELDINRLSDYDVDHIVPQSFLKDDSIDNKVLTRSDKARGKSDNVPSEEVVKKMKNYWRQLLNAKLITQRKFDNLTKAERGGLSELDKAGFIKRQLVETRQITKHVAQILDSRMNTKYDENDKLIREVKVITLKSKLVSDFRKDFQFYKVREINNYHHAHDAYLNAVVGTALIKKYPKLESEFVYGDYKVYDVRKMIAKSEQEIGKATAKYFFYSNIMNFFKTEITLANGEIRKRPLIETNGETGEIVWDKGRDFATVRKVLSMPQVNIVKKTEVQTGGFSKESILPKRNSDKLIARKKDWDPKKYGGFDSPTVAYSVLVVAKVEKGKSKKLKSVKELLGITIMERSSFEKNPIDFLEAKGYKEVKKDLIIKLPKYSLFELENGRKRMLASAGELQKGNELALPSKYVNFLYLASHYEKLKGSPEDNEQKQLFVEQHKHYLDEIIEQISEFSKRVILADANLDKVLSAYNKHRDKPIREQAENIIHLFTLTNLGAPAAFKYFDTTIDRKRYTSTKEVLDATLIHQSITGLYETRIDLSQLGGDGGGSSGSSGSSGSSGSSGSSGGMNPLQLLQPLPAEIKGTKLLAHWNSGATITCIPESFLEDEQPIKKTLIKTIHGEKQQNVYYVTFKVKGRKVEAEVIASPYEYILLSPTDVPWLTQQPLQLTILVPLQEYQEKILSKTALPEDQKQQLKTLFVKYDNLWQHWENQVGHRKIRPHNIATGDYPPRPQKQYPINPKAKPSIQIVIDDLLKQGVLTPQNSTMNTPVYPVPKPDGRWRMVLDYREVNKTIPLTAAQNQHSAGILATIVRQKYKTTLDLANGFWAHPITPESYWLTAFTWQGKQYCWTRLPQGFLNSPALFNADVVDLLKEIPNVQVYVDDIYLSHDDPKEHVQQLEKVFQILLQAGYVVSLKKSEIGQKTVEFLGFNITKEGRGLTDTFKTKLLNITPPKDLKQLQSILGLLNFARNFIPNFAELVQPLYNLIAPAKGKYIEWSEENTKQLNMVIEALNTASNLEERLPEQRLVIKVNTSPSAGYVRYYNETGKKPIMYLNYVFSKAELKFSMLEKLLTTMHKALIKAMDLAMGQEILVYSPIVSMTKIQKTPLPERKALPIRWITWMTYLEDPRIQFHYDKTLPELKHIPDVYTSSQSPVKHPSQYEGVFYTDGSAIKSPDPTKSNNAGMGIVHATYKPEYQVLNQWSIPLGNHTAQMAEIAAVEFACKKALKIPGPVLVITDSFYVAESANKELPYWKSNGFVNNKKKPLKHISKWKSIAECLSMKPDITIQHEKGISLQIPVFILKGNALADKLATQGSYVVNAGKRTADGSEFEKRTADGSEFESPKKKAKVE

SEQ ID NO: 6343 - protein, 2101 aa, synthetic construct
MPAAKRVKLDGGDKKYSIGLDIGTNSVGWAVITDEYKVPSKKFKVLGNTDRHSIKKNLIGALLFDSGETAEATRLKRTARRRYTRRKNRICYLQEIFSNEMAKVDDSFFHRLEESFLVEEDKKHERHPIFGNIVDEVAYHEKYPTIYHLRKKLVDSTDKADLRLIYLALAHMIKFRGHFLIEGDLNPDNSDVDKLFIQLVQTYNQLFEENPINASGVDAKAILSARLSKSRRLENLIAQLPGEKKNGLFGNLIALSLGLTPNFKSNFDLAEDAKLQLSKDTYDDDLDNLLAQIGDQYADLFLAAKNLSDAILLSDILRVNTEITKAPLSASMIKRYDEHHQDLTLLKALVRQQLPEKYKEIFFDQSKNGYAGYIDGGASQEEFYKFIKPILEKMDGTEELLVKLNREDLLRKQRTFDNGSIPHQIHLGELHAILRRQEDFYPFLKDNREKIEKILTFRIPYYVGPLARGNSRFAWMTRKSEETITPWNFEEVVDKGASAQSFIERMTNFDKNLPNEKVLPKHSLLYEYFTVYNELTKVKYVTEGMRKPAFLSGEQKKAIVDLLFKTNRKVTVKQLKEDYFKKIECFDSVEISGVEDRFNASLGTYHDLLKIIKDKDFLDNEENEDILEDIVLTLTLFEDREMIEERLKTYAHLFDDKVMKQLKRRRYTGWGRLSRKLINGIRDKQSGKTILDFLKSDGFANRNFMQLIHDDSLTFKEDIQKAQVSGQGDSLHEHIANLAGSPAIKKGILQTVKVVDELVKVMGRHKPENIVIEMARENQTTQKGQKNSRERMKRIEEGIKELGSQILKEHPVENTQLQNEKLYLYYLQNGRDMYVDQELDINRLSDYDVDHIVPQSFLKDDSIDNKVLTRSDKARGKSDNVPSEEVVKKMKNYWRQLLNAKLITQRKFDNLTKAERGGLSELDKAGFIKRQLVETRQITKHVAQILDSRMNTKYDENDKLIREVKVITLKSKLVSDFRKDFQFYKVREINNYHHAHDAYLNAVVGTALIKKYPKLESEFVYGDYKVYDVRKMIAKSEQEIGKATAKYFFYSNIMNFFKTEITLANGEIRKRPLIETNGETGEIVWDKGRDFATVRKVLSMPQVNIVKKTEVQTGGFSKESILPKRNSDKLIARKKDWDPKKYGGFDSPTVAYSVLVVAKVEKGKSKKLKSVKELLGITIMERSSFEKNPIDFLEAKGYKEVKKDLIIKLPKYSLFELENGRKRMLASAGELQKGNELALPSKYVNFLYLASHYEKLKGSPEDNEQKQLFVEQHKHYLDEIIEQISEFSKRVILADANLDKVLSAYNKHRDKPIREQAENIIHLFTLTNLGAPAAFKYFDTTIDRKRYTSTKEVLDATLIHQSITGLYETRIDLSQLGGDGGGSSGSSGSSGSSGSSGSSGGVLNLEEEYRLHEKPVPSSIDPSWLQLFPTVWAERAGMGLANQVPPVVVELRSGASPVAVRQYPMSKEAREGIRPHIQKFLDLGVLVPCRSPWNTPLLPVKKPGTNDYRPVQDLREINKRVQDIHPTVPNPYNLLSSLPPSYTWYSVLDLKDAFFCLRLHPNSQPLFAFEWKDPEKGNTGQLTWTRLPQGFKNSPTLFNEALHRDLAPFRALNPQVVLLQYVDDLLVAAPTYEDCKKGTQKLLQELSKLGYRVSAKKAQLCQREVTYLGYLLKEGKRWLTPARKATVMKIPVPTTPRQVREFLGKAGFCRLFIPGFASLAAPLYPLTKPSIPFIWTEEHQQAFDHIKKALLSAPALALPDLTKPFTLYIDERAGVARGVLTQTLGPWRRPVAYLSKKLDPVASGWPTCLKAVAAVALLLKDADKLTLGQNVTVIASHSLESIVRQPPDRWMTNARMTHYQSLLLNERVSFAPPAVLNPATLLPVESEATPVHRCSEILAEETGTRRDLEDQPLPGVPTWYTDGSSFITEGKRRAGAPIVDGKRTVWASSLPEGTSAQKAELVALTQALRLAEGKNINIYTDSRYAFATAHIHGAIYKQRGWLTSAGKDIKNKEEILALLEAIHLPRRVAIIHCPGHQRGSNPVATGNRRADEAAKQAALSTRVLAGTTKPAGKRTADGSEFEKRTADGSEFESPKKKAKVE

SEQ ID NO: 6344 - protein, 2134 aa, synthetic construct
MPAAKRVKLDGGDKKYSIGLDIGTNSVGWAVITDEYKVPSKKFKVLGNTDRHSIKKNLIGALLFDSGETAEATRLKRTARRRYTRRKNRICYLQEIFSNEMAKVDDSFFHRLEESFLVEEDKKHERHPIFGNIVDEVAYHEKYPTIYHLRKKLVDSTDKADLRLIYLALAHMIKFRGHFLIEGDLNPDNSDVDKLFIQLVQTYNQLFEENPINASGVDAKAILSARLSKSRRLENLIAQLPGEKKNGLFGNLIALSLGLTPNFKSNFDLAEDAKLQLSKDTYDDDLDNLLAQIGDQYADLFLAAKNLSDAILLSDILRVNTEITKAPLSASMIKRYDEHHQDLTLLKALVRQQLPEKYKEIFFDQSKNGYAGYIDGGASQEEFYKFIKPILEKMDGTEELLVKLNREDLLRKQRTFDNGSIPHQIHLGELHAILRRQEDFYPFLKDNREKIEKILTFRIPYYVGPLARGNSRFAWMTRKSEETITPWNFEEVVDKGASAQSFIERMTNFDKNLPNEKVLPKHSLLYEYFTVYNELTKVKYVTEGMRKPAFLSGEQKKAIVDLLFKTNRKVTVKQLKEDYFKKIECFDSVEISGVEDRFNASLGTYHDLLKIIKDKDFLDNEENEDILEDIVLTLTLFEDREMIEERLKTYAHLFDDKVMKQLKRRRYTGWGRLSRKLINGIRDKQSGKTILDFLKSDGFANRNFMQLIHDDSLTFKEDIQKAQVSGQGDSLHEHIANLAGSPAIKKGILQTVKVVDELVKVMGRHKPENIVIEMARENQTTQKGQKNSRERMKRIEEGIKELGSQILKEHPVENTQLQNEKLYLYYLQNGRDMYVDQELDINRLSDYDVDHIVPQSFLKDDSIDNKVLTRSDKARGKSDNVPSEEVVKKMKNYWRQLLNAKLITQRKFDNLTKAERGGLSELDKAGFIKRQLVETRQITKHVAQILDSRMNTKYDENDKLIREVKVITLKSKLVSDFRKDFQFYKVREINNYHHAHDAYLNAVVGTALIKKYPKLESEFVYGDYKVYDVRKMIAKSEQEIGKATAKYFFYSNIMNFFKTEITLANGEIRKRPLIETNGETGEIVWDKGRDFATVRKVLSMPQVNIVKKTEVQTGGFSKESILPKRNSDKLIARKKDWDPKKYGGFDSPTVAYSVLVVAKVEKGKSKKLKSVKELLGITIMERSSFEKNPIDFLEAKGYKEVKKDLIIKLPKYSLFELENGRKRMLASAGELQKGNELALPSKYVNFLYLASHYEKLKGSPEDNEQKQLFVEQHKHYLDEIIEQISEFSKRVILADANLDKVLSAYNKHRDKPIREQAENIIHLFTLTNLGAPAAFKYFDTTIDRKRYTSTKEVLDATLIHQSITGLYETRIDLSQLGGDGGGSSGSSGSSGSSGSSGSSGGLLGRDLLTKLKAQIQFSTEGPQVTWEDRPAMCLVLNLEEEYRLHEKPVPPSIDPSWLQLFPMVWAEKAGMGLANQVPPVVVELKSDASPVAVRQYPMSKEAREGIRPHIQRFLDLGILVPCQSPWNTPLLPVKKPGTNDYRPVQDLREVNKRVQDIHPTVPNPYNLLSSLPPSHTWYSVLDLKDAFFCLKLHPNSQPLFAFEWRDPEKGNTGQLTWTRLPQGFKNSPTLFNEALHRDLASFRALNPQVVMLQYVDDLLVAAPTYRDCKEGTRRLLQELSKLGYRVSAKKAQLCREEVTYLGYLLKGGKRWLTPARKATVMKIPTPTTPRQVREFLGTAGFCRLWIPGFASLAAPLYPLTRPKVPFTWTEAHQEAFGRIKEALLSAPALALPDLTKPFALYVDEKEGVARGVLTQTLGPWRRPVAYLSKKLDPVASGWPTCLKAIAAVALLLKDADKLTLGQNVLVIAPHNLESIVRQPPDRWMTNARMTHYQSLLLNERVSFAPPAILNPATLLPVESDDTPIHICSEILAEETGTRPDLRDQPLPGVPAWYTDGSSFIMDGRRQAGAAIVDNKRTVWASNLPEGTSAQKAELIALTQALRLAEGKSINIYTDSRYAFATAHVHGAIYKQRGWLTSAGKDIKNKEEILALLEAIHLPKRVAIIHCPGHQRGTDPVATGNRKADEAAKQAAQSTRILTETTKNAGKRTADGSEFEKRTADGSEFESPKKKAKVE

SEQ ID NO: 6345 - protein, 2225 aa, synthetic construct
MPAAKRVKLDGGDKKYSIGLDIGTNSVGWAVITDEYKVPSKKFKVLGNTDRHSIKKNLIGALLFDSGETAEATRLKRTARRRYTRRKNRICYLQEIFSNEMAKVDDSFFHRLEESFLVEEDKKHERHPIFGNIVDEVAYHEKYPTIYHLRKKLVDSTDKADLRLIYLALAHMIKFRGHFLIEGDLNPDNSDVDKLFIQLVQTYNQLFEENPINASGVDAKAILSARLSKSRRLENLIAQLPGEKKNGLFGNLIALSLGLTPNFKSNFDLAEDAKLQLSKDTYDDDLDNLLAQIGDQYADLFLAAKNLSDAILLSDILRVNTEITKAPLSASMIKRYDEHHQDLTLLKALVRQQLPEKYKEIFFDQSKNGYAGYIDGGASQEEFYKFIKPILEKMDGTEELLVKLNREDLLRKQRTFDNGSIPHQIHLGELHAILRRQEDFYPFLKDNREKIEKILTFRIPYYVGPLARGNSRFAWMTRKSEETITPWNFEEVVDKGASAQSFIERMTNFDKNLPNEKVLPKHSLLYEYFTVYNELTKVKYVTEGMRKPAFLSGEQKKAIVDLLFKTNRKVTVKQLKEDYFKKIECFDSVEISGVEDRFNASLGTYHDLLKIIKDKDFLDNEENEDILEDIVLTLTLFEDREMIEERLKTYAHLFDDKVMKQLKRRRYTGWGRLSRKLINGIRDKQSGKTILDFLKSDGFANRNFMQLIHDDSLTFKEDIQKAQVSGQGDSLHEHIANLAGSPAIKKGILQTVKVVDELVKVMGRHKPENIVIEMARENQTTQKGQKNSRERMKRIEEGIKELGSQILKEHPVENTQLQNEKLYLYYLQNGRDMYVDQELDINRLSDYDVDHIVPQSFLKDDSIDNKVLTRSDKARGKSDNVPSEEVVKKMKNYWRQLLNAKLITQRKFDNLTKAERGGLSELDKAGFIKRQLVETRQITKHVAQILDSRMNTKYDENDKLIREVKVITLKSKLVSDFRKDFQFYKVREINNYHHAHDAYLNAVVGTALIKKYPKLESEFVYGDYKVYDVRKMIAKSEQEIGKATAKYFFYSNIMNFFKTEITLANGEIRKRPLIETNGETGEIVWDKGRDFATVRKVLSMPQVNIVKKTEVQTGGFSKESILPKRNSDKLIARKKDWDPKKYGGFDSPTVAYSVLVVAKVEKGKSKKLKSVKELLGITIMERSSFEKNPIDFLEAKGYKEVKKDLIIKLPKYSLFELENGRKRMLASAGELQKGNELALPSKYVNFLYLASHYEKLKGSPEDNEQKQLFVEQHKHYLDEIIEQISEFSKRVILADANLDKVLSAYNKHRDKPIREQAENIIHLFTLTNLGAPAAFKYFDTTIDRKRYTSTKEVLDATLIHQSITGLYETRIDLSQLGGDGGGSSGSSGSSGSSGSSGSSGGTLGDQGSRGSDPLPEPRVTLTVEGIPTEFLVNTGAEHSVLTKPMGKMGSKRTVVAGATGSKVYPWTTKRLLKIGQKQVTHSFLVIPECPAPLLGRDLLTKLKAQIQFSTEGPQVTWEDRPAMCLVLNLEEEYRLHEKPVPPSIDPSWLQLFPMVWAEKAGMGLANQVPPVVVELKSDASPVAVRQYPMSKEAREGIRPHIQRFLDLGILVPCQSPWNTPLLPVKKPGTNDYRPVQDLREVNKRVQDIHPTVPNPYNLLSSLPPSHTWYSVLDLKDAFFCLKLHPNSQPLFAFEWRDPEKGNTGQLTWTRLPQGFKNSPTLFNEALHRDLASFRALNPQVVMLQYVDDLLVAAPTYRDCKEGTRRLLQELSKLGYRVSAKKAQLCREEVTYLGYLLKGGKRWLTPARKATVMKIPTPTTPRQVREFLGTAGFCRLWIPGFASLAAPLYPLTRPKVPFTWTEAHQEAFGRIKEALLSAPALALPDLTKPFALYVDEKEGVARGVLTQTLGPWRRPVAYLSKKLDPVASGWPTCLKAIAAVALLLKDADKLTLGQNVLVIAPHNLESIVRQPPDRWMTNARMTHYQSLLLNERVSFAPPAILNPATLLPVESDDTPIHICSEILAEETGTRPDLRDQPLPGVPAWYTDGSSFIMDGRRQAGAAIVDNKRTVWASNLPEGTSAQKAELIALTQALRLAEGKSINIYTDSRYAFATAHVHGAIYKQRGWLTSAGKDIKNKEEILALLEAIHLPKRVAIIHCPGHQRGTDPVATGNRKADEAAKQAAQSTRILTETTKNAGKRTADGSEFEKRTADGSEFESPKKKAKVE

SEQ ID NO: 6346 - protein, 2225 aa, synthetic construct
MPAAKRVKLDGGDKKYSIGLDIGTNSVGWAVITDEYKVPSKKFKVLGNTDRHSIKKNLIGALLFDSGETAEATRLKRTARRRYTRRKNRICYLQEIFSNEMAKVDDSFFHRLEESFLVEEDKKHERHPIFGNIVDEVAYHEKYPTIYHLRKKLVDSTDKADLRLIYLALAHMIKFRGHFLIEGDLNPDNSDVDKLFIQLVQTYNQLFEENPINASGVDAKAILSARLSKSRRLENLIAQLPGEKKNGLFGNLIALSLGLTPNFKSNFDLAEDAKLQLSKDTYDDDLDNLLAQIGDQYADLFLAAKNLSDAILLSDILRVNTEITKAPLSASMIKRYDEHHQDLTLLKALVRQQLPEKYKEIFFDQSKNGYAGYIDGGASQEEFYKFIKPILEKMDGTEELLVKLNREDLLRKQRTFDNGSIPHQIHLGELHAILRRQEDFYPFLKDNREKIEKILTFRIPYYVGPLARGNSRFAWMTRKSEETITPWNFEEVVDKGASAQSFIERMTNFDKNLPNEKVLPKHSLLYEYFTVYNELTKVKYVTEGMRKPAFLSGEQKKAIVDLLFKTNRKVTVKQLKEDYFKKIECFDSVEISGVEDRFNASLGTYHDLLKIIKDKDFLDNEENEDILEDIVLTLTLFEDREMIEERLKTYAHLFDDKVMKQLKRRRYTGWGRLSRKLINGIRDKQSGKTILDFLKSDGFANRNFMQLIHDDSLTFKEDIQKAQVSGQGDSLHEHIANLAGSPAIKKGILQTVKVVDELVKVMGRHKPENIVIEMARENQTTQKGQKNSRERMKRIEEGIKELGSQILKEHPVENTQLQNEKLYLYYLQNGRDMYVDQELDINRLSDYDVDHIVPQSFLKDDSIDNKVLTRSDKARGKSDNVPSEEVVKKMKNYWRQLLNAKLITQRKFDNLTKAERGGLSELDKAGFIKRQLVETRQITKHVAQILDSRMNTKYDENDKLIREVKVITLKSKLVSDFRKDFQFYKVREINNYHHAHDAYLNAVVGTALIKKYPKLESEFVYGDYKVYDVRKMIAKSEQEIGKATAKYFFYSNIMNFFKTEITLANGEIRKRPLIETNGETGEIVWDKGRDFATVRKVLSMPQVNIVKKTEVQTGGFSKESILPKRNSDKLIARKKDWDPKKYGGFDSPTVAYSVLVVAKVEKGKSKKLKSVKELLGITIMERSSFEKNPIDFLEAKGYKEVKKDLIIKLPKYSLFELENGRKRMLASAGELQKGNELALPSKYVNFLYLASHYEKLKGSPEDNEQKQLFVEQHKHYLDEIIEQISEFSKRVILADANLDKVLSAYNKHRDKPIREQAENIIHLFTLTNLGAPAAFKYFDTTIDRKRYTSTKEVLDATLIHQSITGLYETRIDLSQLGGDGGGSSGSSGSSGSSGSSGSSGGTLGDQGSRGSDPLPEPRVTLTVEGIPTEFLVNTGAEHSVLTKPMGKMGSKRTVVAGATGSKVYPWTTKRLLKIGQKQVTHSFLVIPECPAPLLGRDLLTKLKAQIQFSTEGPQVTWEDRPAMCLVLNLEEEYRLHEKPVPPSIDPSWLQLFPMVWAEKAGMGLANQVPPVVVELKSDASPVAVRQYPMSKEAREGIRPHIQRFLDLGILVPCQSPWNTPLLPVKKPGTNDYRPVQDLREVNKRVQDIHPTVPNPYNLLSSLPPSHTWYSVLDLKDAFFCLKLHPNSQPLFAFEWRDPEKGNTGQLTWTRLPQGFKNSPTLFNEALHRDLASFRALNPQVVMLQYVDDLLVAAPTYRDCKEGTRRLLQELSKLGYRVSAKKAQLCREEVTYLGYLLKGGKRWLTPARKATVMKIPTPTTPRQVREFLGKAGFCRLFIPGFASLAAPLYPLTRPKVPFTWTEAHQEAFGRIKEALLSAPALALPDLTKPFALYVDEKEGVARGVLTQTLGPWRRPVAYLSKKLDPVASGWPTCLKAIAAVALLLKDADKLTLGQNVLVIAPHNLESIVRQPPDRWMTNARMTHYQSLLLNERVSFAPPAILNPATLLPVESDDTPIHICSEILAEETGTRPDLRDQPLPGVPAWYTDGSSFIMDGRRQAGAAIVDNKRTVWASNLPEGTSAQKAELIALTQALRLAEGKSINIYTDSRYAFATAHVHGAIYKQRGWLTSAGKDIKNKEEILALLEAIHLPKRVAIIHCPGHQRGTDPVATGNRKADEAAKQAAQSTRILTETTKNAGKRTADGSEFEKRTADGSEFESPKKKAKVE

SEQ ID NO: 6347 - protein, 2103 aa, synthetic construct
MPAAKRVKLDGGDKKYSIGLDIGTNSVGWAVITDEYKVPSKKFKVLGNTDRHSIKKNLIGALLFDSGETAEATRLKRTARRRYTRRKNRICYLQEIFSNEMAKVDDSFFHRLEESFLVEEDKKHERHPIFGNIVDEVAYHEKYPTIYHLRKKLVDSTDKADLRLIYLALAHMIKFRGHFLIEGDLNPDNSDVDKLFIQLVQTYNQLFEENPINASGVDAKAILSARLSKSRRLENLIAQLPGEKKNGLFGNLIALSLGLTPNFKSNFDLAEDAKLQLSKDTYDDDLDNLLAQIGDQYADLFLAAKNLSDAILLSDILRVNTEITKAPLSASMIKRYDEHHQDLTLLKALVRQQLPEKYKEIFFDQSKNGYAGYIDGGASQEEFYKFIKPILEKMDGTEELLVKLNREDLLRKQRTFDNGSIPHQIHLGELHAILRRQEDFYPFLKDNREKIEKILTFRIPYYVGPLARGNSRFAWMTRKSEETITPWNFEEVVDKGASAQSFIERMTNFDKNLPNEKVLPKHSLLYEYFTVYNELTKVKYVTEGMRKPAFLSGEQKKAIVDLLFKTNRKVTVKQLKEDYFKKIECFDSVEISGVEDRFNASLGTYHDLLKIIKDKDFLDNEENEDILEDIVLTLTLFEDREMIEERLKTYAHLFDDKVMKQLKRRRYTGWGRLSRKLINGIRDKQSGKTILDFLKSDGFANRNFMQLIHDDSLTFKEDIQKAQVSGQGDSLHEHIANLAGSPAIKKGILQTVKVVDELVKVMGRHKPENIVIEMARENQTTQKGQKNSRERMKRIEEGIKELGSQILKEHPVENTQLQNEKLYLYYLQNGRDMYVDQELDINRLSDYDVDHIVPQSFLKDDSIDNKVLTRSDKARGKSDNVPSEEVVKKMKNYWRQLLNAKLITQRKFDNLTKAERGGLSELDKAGFIKRQLVETRQITKHVAQILDSRMNTKYDENDKLIREVKVITLKSKLVSDFRKDFQFYKVREINNYHHAHDAYLNAVVGTALIKKYPKLESEFVYGDYKVYDVRKMIAKSEQEIGKATAKYFFYSNIMNFFKTEITLANGEIRKRPLIETNGETGEIVWDKGRDFATVRKVLSMPQVNIVKKTEVQTGGFSKESILPKRNSDKLIARKKDWDPKKYGGFDSPTVAYSVLVVAKVEKGKSKKLKSVKELLGITIMERSSFEKNPIDFLEAKGYKEVKKDLIIKLPKYSLFELENGRKRMLASAGELQKGNELALPSKYVNFLYLASHYEKLKGSPEDNEQKQLFVEQHKHYLDEIIEQISEFSKRVILADANLDKVLSAYNKHRDKPIREQAENIIHLFTLTNLGAPAAFKYFDTTIDRKRYTSTKEVLDATLIHQSITGLYETRIDLSQLGGDGGGSSGSSGSSGSSGSSGSSGGTLNLEDEYRLYETSAEPEVSPGSTWLSDFPQAWAETGGMGLAVRQAPLIIPLKATSTPVSIKQYPMSQEAKLGIKPHIQRLLDQGILVPCQSPWNTPLLPVKKPGTNDYRPVQDLREVNKRVEDIHPTVPNPYNLLSGLPPSHRWYTVLDLKDAFFCLRLHPTSQPLFAFEWRDPGMGISGQLTWTRLPQGFKNSPTLFNEALHRDLADFRIQHPDLILLQYVDDILLAATSELDCQQGTRALLLTLGNLGYRASAKKAQLCQKQVKYLGYLLKEGQRWLTEARKETVMGQPTPKTPRQLREFLGTAGFCRLWIPGFAEMAAPLYPLTKPGTLFNWGPDQQKAYQEIKQALLTAPALGLPDLTKPFELFVDEKQGYAKGVLTQKLGPWRRPVAYLSKKLDPVAAGWPPCLRMVAAIAVLRKDAGKLTMGQPLVILAPHAVEALVKQPPDRWLSNARMTHYQAMLLDTDRVQFGPVVALNPATLLPLPEEGAPHDCLEILAETHGTRPDLTDQPIPDADHTWYTDGSSFLQEGQRKAGAAVTTETEVIWARALPAGTSAQRAELIALTQALKMAEGKRLNVYTDSRYAFATAHIHGEIYRRRGWLTSEGREIKNKSEILALLKALFLPKRLSIIHCLGHQKGDSAEARGNRLADQAAREAAIKTPPDTSTLLAGKRTADGSEFEKRTADGSEFESPKKKAKVE

SEQ ID NO: 6348 - protein, 2103 aa, synthetic construct
MPAAKRVKLDGGDKKYSIGLDIGTNSVGWAVITDEYKVPSKKFKVLGNTDRHSIKKNLIGALLFDSGETAEATRLKRTARRRYTRRKNRICYLQEIFSNEMAKVDDSFFHRLEESFLVEEDKKHERHPIFGNIVDEVAYHEKYPTIYHLRKKLVDSTDKADLRLIYLALAHMIKFRGHFLIEGDLNPDNSDVDKLFIQLVQTYNQLFEENPINASGVDAKAILSARLSKSRRLENLIAQLPGEKKNGLFGNLIALSLGLTPNFKSNFDLAEDAKLQLSKDTYDDDLDNLLAQIGDQYADLFLAAKNLSDAILLSDILRVNTEITKAPLSASMIKRYDEHHQDLTLLKALVRQQLPEKYKEIFFDQSKNGYAGYIDGGASQEEFYKFIKPILEKMDGTEELLVKLNREDLLRKQRTFDNGSIPHQIHLGELHAILRRQEDFYPFLKDNREKIEKILTFRIPYYVGPLARGNSRFAWMTRKSEETITPWNFEEVVDKGASAQSFIERMTNFDKNLPNEKVLPKHSLLYEYFTVYNELTKVKYVTEGMRKPAFLSGEQKKAIVDLLFKTNRKVTVKQLKEDYFKKIECFDSVEISGVEDRFNASLGTYHDLLKIIKDKDFLDNEENEDILEDIVLTLTLFEDREMIEERLKTYAHLFDDKVMKQLKRRRYTGWGRLSRKLINGIRDKQSGKTILDFLKSDGFANRNFMQLIHDDSLTFKEDIQKAQVSGQGDSLHEHIANLAGSPAIKKGILQTVKVVDELVKVMGRHKPENIVIEMARENQTTQKGQKNSRERMKRIEEGIKELGSQILKEHPVENTQLQNEKLYLYYLQNGRDMYVDQELDINRLSDYDVDHIVPQSFLKDDSIDNKVLTRSDKARGKSDNVPSEEVVKKMKNYWRQLLNAKLITQRKFDNLTKAERGGLSELDKAGFIKRQLVETRQITKHVAQILDSRMNTKYDENDKLIREVKVITLKSKLVSDFRKDFQFYKVREINNYHHAHDAYLNAVVGTALIKKYPKLESEFVYGDYKVYDVRKMIAKSEQEIGKATAKYFFYSNIMNFFKTEITLANGEIRKRPLIETNGETGEIVWDKGRDFATVRKVLSMPQVNIVKKTEVQTGGFSKESILPKRNSDKLIARKKDWDPKKYGGFDSPTVAYSVLVVAKVEKGKSKKLKSVKELLGITIMERSSFEKNPIDFLEAKGYKEVKKDLIIKLPKYSLFELENGRKRMLASAGELQKGNELALPSKYVNFLYLASHYEKLKGSPEDNEQKQLFVEQHKHYLDEIIEQISEFSKRVILADANLDKVLSAYNKHRDKPIREQAENIIHLFTLTNLGAPAAFKYFDTTIDRKRYTSTKEVLDATLIHQSITGLYETRIDLSQLGGDGGGSSGSSGSSGSSGSSGSSGGTLNLEDEYRLYETSAEPEVSPGSTWLSDFPQAWAETGGMGLAVRQAPLIIPLKATSTPVSIKQYPMSQEAKLGIKPHIQRLLDQGILVPCQSPWNTPLLPVKKPGTNDYRPVQDLREVNKRVEDIHPTVPNPYNLLSGLPPSHRWYTVLDLKDAFFCLRLHPTSQPLFAFEWRDPGMGISGQLTWTRLPQGFKNSPTLFNEALHRDLADFRIQHPDLILLQYVDDILLAATSELDCQQGTRALLLTLGNLGYRASAKKAQLCQKQVKYLGYLLKEGQRWLTEARKETVMGQPTPKTPRQLREFLGKAGFCRLFIPGFAEMAAPLYPLTKPGTLFNWGPDQQKAYQEIKQALLTAPALGLPDLTKPFELFVDEKQGYAKGVLTQKLGPWRRPVAYLSKKLDPVAAGWPPCLRMVAAIAVLRKDAGKLTMGQPLVILAPHAVEALVKQPPDRWLSNARMTHYQAMLLDTDRVQFGPVVALNPATLLPLPEEGAPHDCLEILAETHGTRPDLTDQPIPDADHTWYTDGSSFLQEGQRKAGAAVTTETEVIWARALPAGTSAQRAELIALTQALKMAEGKRLNVYTDSRYAFATAHIHGEIYRRRGWLTSEGREIKNKSEILALLKALFLPKRLSIIHCLGHQKGDSAEARGNRLADQAAREAAIKTPPDTSTLLAGKRTADGSEFEKRTADGSEFESPKKKAKVE

SEQ ID NO: 6349 - protein, 2103 aa, synthetic construct
MPAAKRVKLDGGDKKYSIGLDIGTNSVGWAVITDEYKVPSKKFKVLGNTDRHSIKKNLIGALLFDSGETAEATRLKRTARRRYTRRKNRICYLQEIFSNEMAKVDDSFFHRLEESFLVEEDKKHERHPIFGNIVDEVAYHEKYPTIYHLRKKLVDSTDKADLRLIYLALAHMIKFRGHFLIEGDLNPDNSDVDKLFIQLVQTYNQLFEENPINASGVDAKAILSARLSKSRRLENLIAQLPGEKKNGLFGNLIALSLGLTPNFKSNFDLAEDAKLQLSKDTYDDDLDNLLAQIGDQYADLFLAAKNLSDAILLSDILRVNTEITKAPLSASMIKRYDEHHQDLTLLKALVRQQLPEKYKEIFFDQSKNGYAGYIDGGASQEEFYKFIKPILEKMDGTEELLVKLNREDLLRKQRTFDNGSIPHQIHLGELHAILRRQEDFYPFLKDNREKIEKILTFRIPYYVGPLARGNSRFAWMTRKSEETITPWNFEEVVDKGASAQSFIERMTNFDKNLPNEKVLPKHSLLYEYFTVYNELTKVKYVTEGMRKPAFLSGEQKKAIVDLLFKTNRKVTVKQLKEDYFKKIECFDSVEISGVEDRFNASLGTYHDLLKIIKDKDFLDNEENEDILEDIVLTLTLFEDREMIEERLKTYAHLFDDKVMKQLKRRRYTGWGRLSRKLINGIRDKQSGKTILDFLKSDGFANRNFMQLIHDDSLTFKEDIQKAQVSGQGDSLHEHIANLAGSPAIKKGILQTVKVVDELVKVMGRHKPENIVIEMARENQTTQKGQKNSRERMKRIEEGIKELGSQILKEHPVENTQLQNEKLYLYYLQNGRDMYVDQELDINRLSDYDVDHIVPQSFLKDDSIDNKVLTRSDKARGKSDNVPSEEVVKKMKNYWRQLLNAKLITQRKFDNLTKAERGGLSELDKAGFIKRQLVETRQITKHVAQILDSRMNTKYDENDKLIREVKVITLKSKLVSDFRKDFQFYKVREINNYHHAHDAYLNAVVGTALIKKYPKLESEFVYGDYKVYDVRKMIAKSEQEIGKATAKYFFYSNIMNFFKTEITLANGEIRKRPLIETNGETGEIVWDKGRDFATVRKVLSMPQVNIVKKTEVQTGGFSKESILPKRNSDKLIARKKDWDPKKYGGFDSPTVAYSVLVVAKVEKGKSKKLKSVKELLGITIMERSSFEKNPIDFLEAKGYKEVKKDLIIKLPKYSLFELENGRKRMLASAGELQKGNELALPSKYVNFLYLASHYEKLKGSPEDNEQKQLFVEQHKHYLDEIIEQISEFSKRVILADANLDKVLSAYNKHRDKPIREQAENIIHLFTLTNLGAPAAFKYFDTTIDRKRYTSTKEVLDATLIHQSITGLYETRIDLSQLGGDGGGSSGSSGSSGSSGSSGSSGGTLNIEDEYRLHETSKEPDVSLGSTWLSDFPQAWAETGGMGLAVRQAPLIIPLKATSTPVSIKQYPMSQEARLGIKPHIQRLLDQGILVPCQSPWNTPLLPVKKPGTNDYRPVQDLREVNKRVEDIHPTVPNPYNLLSGLPPSHQWYTVLDLKDAFFCLRLHPTSQPLFAFEWRDPEMGISGQLTWTRLPQGFKNSPTLFNEALHRDLAGFRIQHPDLILLQYVDDLLLAATSELDCQQGTRALLQTLGDLGYRASAKKAQICQKQVKYLGYLLKEGQRWLTEARKETVMGQPIPKTPRQLREFLGTAGFCRLWIPGFAEMAAPLYPLTKPGTLFNWGPDQQKAFQEIKQALLTAPALGLPDLTKPFELFVDEKQGYAKGVLTQKLGPWRRPVAYLSKKLDPVAAGWPPCLRMVAAIAVLTKDAGKLTMGQPLVILAPHAVEALVKQPPDRWLSNARMTHYQALLLDTDRVQFGPVVALNPATLLPLPEEGLQHDCLDILAEAHGTRSDLMDQPLPDADHTWYTDGSSFLQEGQRKAGAAVTTETEVIWARALPAGTSAQRAELIALTQALKMAEGKKLNVYTDSRYAFATAHIHGEIYRRRGWLTSEGKEIKNKDEILALLKALFLPKRLSIIHCPGHQKGNSAEARGNRMADQAAREVATRETPETSTLLAGKRTADGSEFEKRTADGSEFESPKKKAKVE

SEQ ID NO: 6350 - protein, 2103 aa, synthetic construct
MPAAKRVKLDGGDKKYSIGLDIGTNSVGWAVITDEYKVPSKKFKVLGNTDRHSIKKNLIGALLFDSGETAEATRLKRTARRRYTRRKNRICYLQEIFSNEMAKVDDSFFHRLEESFLVEEDKKHERHPIFGNIVDEVAYHEKYPTIYHLRKKLVDSTDKADLRLIYLALAHMIKFRGHFLIEGDLNPDNSDVDKLFIQLVQTYNQLFEENPINASGVDAKAILSARLSKSRRLENLIAQLPGEKKNGLFGNLIALSLGLTPNFKSNFDLAEDAKLQLSKDTYDDDLDNLLAQIGDQYADLFLAAKNLSDAILLSDILRVNTEITKAPLSASMIKRYDEHHQDLTLLKALVRQQLPEKYKEIFFDQSKNGYAGYIDGGASQEEFYKFIKPILEKMDGTEELLVKLNREDLLRKQRTFDNGSIPHQIHLGELHAILRRQEDFYPFLKDNREKIEKILTFRIPYYVGPLARGNSRFAWMTRKSEETITPWNFEEVVDKGASAQSFIERMTNFDKNLPNEKVLPKHSLLYEYFTVYNELTKVKYVTEGMRKPAFLSGEQKKAIVDLLFKTNRKVTVKQLKEDYFKKIECFDSVEISGVEDRFNASLGTYHDLLKIIKDKDFLDNEENEDILEDIVLTLTLFEDREMIEERLKTYAHLFDDKVMKQLKRRRYTGWGRLSRKLINGIRDKQSGKTILDFLKSDGFANRNFMQLIHDDSLTFKEDIQKAQVSGQGDSLHEHIANLAGSPAIKKGILQTVKVVDELVKVMGRHKPENIVIEMARENQTTQKGQKNSRERMKRIEEGIKELGSQILKEHPVENTQLQNEKLYLYYLQNGRDMYVDQELDINRLSDYDVDHIVPQSFLKDDSIDNKVLTRSDKARGKSDNVPSEEVVKKMKNYWRQLLNAKLITQRKFDNLTKAERGGLSELDKAGFIKRQLVETRQITKHVAQILDSRMNTKYDENDKLIREVKVITLKSKLVSDFRKDFQFYKVREINNYHHAHDAYLNAVVGTALIKKYPKLESEFVYGDYKVYDVRKMIAKSEQEIGKATAKYFFYSNIMNFFKTEITLANGEIRKRPLIETNGETGEIVWDKGRDFATVRKVLSMPQVNIVKKTEVQTGGFSKESILPKRNSDKLIARKKDWDPKKYGGFDSPTVAYSVLVVAKVEKGKSKKLKSVKELLGITIMERSSFEKNPIDFLEAKGYKEVKKDLIIKLPKYSLFELENGRKRMLASAGELQKGNELALPSKYVNFLYLASHYEKLKGSPEDNEQKQLFVEQHKHYLDEIIEQISEFSKRVILADANLDKVLSAYNKHRDKPIREQAENIIHLFTLTNLGAPAAFKYFDTTIDRKRYTSTKEVLDATLIHQSITGLYETRIDLSQLGGDGGGSSGSSGSSGSSGSSGSSGGTLNIEDEYRLHETSKGPDVPLGSTWLSDFPQAWAETGGMGLAFRQAPLIISLKATSTPVSIKQYPMSQEARLGIKPHIQRLLDQGILVPCQSPWNTPLLPVKKPGTNDYRPVQDLREVNKRVEDIHPTVPNPYNLLSGLPPSHQWYTVLDLKDAFFCLRLHPTSQSLFAFEWKDPEMGISGQLTWTRLPQGFKNSPTLFDEALHRDLADFRIQHPDLILLQYVDDLLLAATSELDCQQGTRALLQTLGDLGYRASAKKAQICQKQVKYLGYLLKEGQRWLTEARKETVMGQPTPKTPRQLREFLGTAGLCRLWIPGFAEMAAPLYPLTKTGTLFKWGPDQQKAYQEIKQALLTAPALGLPDLTKPFELFVDEKQGYAKGVLTQKLGPWRRPVAYLSKKLDPVAAGWPPCLRMVAAIAVLTKDVGKLTMGQPLVILAPHAVEALVKQPPDRWLSNARMTHYQALLLDTDRVQFGPIVALNPATLLPLPEEGLQHDCLDILAEAHGTRPDLTDQPLPDADHTWYTDGSSFLQEGQRRAGAAVTTETEVIWAKALPAGTSAQRAELIALTQALKMAAGKKLNVYTDSRYAFATAHIHGEIYRRRGLLTSEGKEIKNKDEILALLKALFLPKRLSIIHCPGHQKGNHAEARGNRMADQAAREVATRETPETSTLLAGKRTADGSEFEKRTADGSEFESPKKKAKVE

SEQ ID NO: 6351 - protein, 2103 aa, synthetic construct
MPAAKRVKLDGGDKKYSIGLDIGTNSVGWAVITDEYKVPSKKFKVLGNTDRHSIKKNLIGALLFDSGETAEATRLKRTARRRYTRRKNRICYLQEIFSNEMAKVDDSFFHRLEESFLVEEDKKHERHPIFGNIVDEVAYHEKYPTIYHLRKKLVDSTDKADLRLIYLALAHMIKFRGHFLIEGDLNPDNSDVDKLFIQLVQTYNQLFEENPINASGVDAKAILSARLSKSRRLENLIAQLPGEKKNGLFGNLIALSLGLTPNFKSNFDLAEDAKLQLSKDTYDDDLDNLLAQIGDQYADLFLAAKNLSDAILLSDILRVNTEITKAPLSASMIKRYDEHHQDLTLLKALVRQQLPEKYKEIFFDQSKNGYAGYIDGGASQEEFYKFIKPILEKMDGTEELLVKLNREDLLRKQRTFDNGSIPHQIHLGELHAILRRQEDFYPFLKDNREKIEKILTFRIPYYVGPLARGNSRFAWMTRKSEETITPWNFEEVVDKGASAQSFIERMTNFDKNLPNEKVLPKHSLLYEYFTVYNELTKVKYVTEGMRKPAFLSGEQKKAIVDLLFKTNRKVTVKQLKEDYFKKIECFDSVEISGVEDRFNASLGTYHDLLKIIKDKDFLDNEENEDILEDIVLTLTLFEDREMIEERLKTYAHLFDDKVMKQLKRRRYTGWGRLSRKLINGIRDKQSGKTILDFLKSDGFANRNFMQLIHDDSLTFKEDIQKAQVSGQGDSLHEHIANLAGSPAIKKGILQTVKVVDELVKVMGRHKPENIVIEMARENQTTQKGQKNSRERMKRIEEGIKELGSQILKEHPVENTQLQNEKLYLYYLQNGRDMYVDQELDINRLSDYDVDHIVPQSFLKDDSIDNKVLTRSDKARGKSDNVPSEEVVKKMKNYWRQLLNAKLITQRKFDNLTKAERGGLSELDKAGFIKRQLVETRQITKHVAQILDSRMNTKYDENDKLIREVKVITLKSKLVSDFRKDFQFYKVREINNYHHAHDAYLNAVVGTALIKKYPKLESEFVYGDYKVYDVRKMIAKSEQEIGKATAKYFFYSNIMNFFKTEITLANGEIRKRPLIETNGETGEIVWDKGRDFATVRKVLSMPQVNIVKKTEVQTGGFSKESILPKRNSDKLIARKKDWDPKKYGGFDSPTVAYSVLVVAKVEKGKSKKLKSVKELLGITIMERSSFEKNPIDFLEAKGYKEVKKDLIIKLPKYSLFELENGRKRMLASAGELQKGNELALPSKYVNFLYLASHYEKLKGSPEDNEQKQLFVEQHKHYLDEIIEQISEFSKRVILADANLDKVLSAYNKHRDKPIREQAENIIHLFTLTNLGAPAAFKYFDTTIDRKRYTSTKEVLDATLIHQSITGLYETRIDLSQLGGDGGGSSGSSGSSGSSGSSGSSGGTLNIEDEYRLHETSKGPDVPLGSTWLSDFPQAWAETGGMGLAVRQAPLIIPLKATSTPVSIKQYPMSQEARLGIKPHIQRLLDQGILVPCQSPWNTPLLPVKKPGTNDYRPVQDLREVNKRVEDIHPTVPNPYNLLSGLPPSHQWYTVLDLKDAFFCLRLHPTSQSLFAFEWRDPEMGISGQLTWTRLPQGFKNSPTLFNEALHRDLADFRIQHPDLILLQYVDDLLLAATSELDCQQGTRALLQTLGDLGYRASAKKAQICQKQVKYLGYLLKEGQRWLTEARKETVMGQPTPKTPRQLREFLGTAGFCRLWIPGFAEMAAPLYPLTKPGTLFEWGPDQQKAYQEIKQALLTAPALGLPDLTKPFELFVDEKQGYAKGVLTQKLGPWRRPVAYLSKKLDPVAAGWPPCLRMVAAIAVLTKDAGKLTMGQPLVILAPHAVEALVKQPPDRWLSNARMTHYQALLLDTDRVQFGPIVALNPATLLPLPEEGLQHDCLDILAEAHGTRPDLTDQPLPDADHTWYTDGSSFLQEGQRKAGAAVTTETEVVWAKALPAGTSAQRAELIALTQALKMAEGKKLNVYTDSRYAFATAHIHGEIYRRRGWLTSEGKEIKNKDEILALLKALFLPKRLSIIHCPGHQKGNRAEARGNRMADQAAREVATRETPETSTLLAGKRTADGSEFEKRTADGSEFESPKKKAKVE

SEQ ID NO: 6352 - protein, 2103 aa, synthetic construct
MPAAKRVKLDGGDKKYSIGLDIGTNSVGWAVITDEYKVPSKKFKVLGNTDRHSIKKNLIGALLFDSGETAEATRLKRTARRRYTRRKNRICYLQEIFSNEMAKVDDSFFHRLEESFLVEEDKKHERHPIFGNIVDEVAYHEKYPTIYHLRKKLVDSTDKADLRLIYLALAHMIKFRGHFLIEGDLNPDNSDVDKLFIQLVQTYNQLFEENPINASGVDAKAILSARLSKSRRLENLIAQLPGEKKNGLFGNLIALSLGLTPNFKSNFDLAEDAKLQLSKDTYDDDLDNLLAQIGDQYADLFLAAKNLSDAILLSDILRVNTEITKAPLSASMIKRYDEHHQDLTLLKALVRQQLPEKYKEIFFDQSKNGYAGYIDGGASQEEFYKFIKPILEKMDGTEELLVKLNREDLLRKQRTFDNGSIPHQIHLGELHAILRRQEDFYPFLKDNREKIEKILTFRIPYYVGPLARGNSRFAWMTRKSEETITPWNFEEVVDKGASAQSFIERMTNFDKNLPNEKVLPKHSLLYEYFTVYNELTKVKYVTEGMRKPAFLSGEQKKAIVDLLFKTNRKVTVKQLKEDYFKKIECFDSVEISGVEDRFNASLGTYHDLLKIIKDKDFLDNEENEDILEDIVLTLTLFEDREMIEERLKTYAHLFDDKVMKQLKRRRYTGWGRLSRKLINGIRDKQSGKTILDFLKSDGFANRNFMQLIHDDSLTFKEDIQKAQVSGQGDSLHEHIANLAGSPAIKKGILQTVKVVDELVKVMGRHKPENIVIEMARENQTTQKGQKNSRERMKRIEEGIKELGSQILKEHPVENTQLQNEKLYLYYLQNGRDMYVDQELDINRLSDYDVDHIVPQSFLKDDSIDNKVLTRSDKARGKSDNVPSEEVVKKMKNYWRQLLNAKLITQRKFDNLTKAERGGLSELDKAGFIKRQLVETRQITKHVAQILDSRMNTKYDENDKLIREVKVITLKSKLVSDFRKDFQFYKVREINNYHHAHDAYLNAVVGTALIKKYPKLESEFVYGDYKVYDVRKMIAKSEQEIGKATAKYFFYSNIMNFFKTEITLANGEIRKRPLIETNGETGEIVWDKGRDFATVRKVLSMPQVNIVKKTEVQTGGFSKESILPKRNSDKLIARKKDWDPKKYGGFDSPTVAYSVLVVAKVEKGKSKKLKSVKELLGITIMERSSFEKNPIDFLEAKGYKEVKKDLIIKLPKYSLFELENGRKRMLASAGELQKGNELALPSKYVNFLYLASHYEKLKGSPEDNEQKQLFVEQHKHYLDEIIEQISEFSKRVILADANLDKVLSAYNKHRDKPIREQAENIIHLFTLTNLGAPAAFKYFDTTIDRKRYTSTKEVLDATLIHQSITGLYETRIDLSQLGGDGGGSSGSSGSSGSSGSSGSSGGTLNIEDEHRLHETSKEPDVSLGSTWLSDFPQAWAETGGMGLAVRQAPLIIPLKATSTPVSIKQYPMSQEARLGIKPHIQRLLDQGILVPCQSPWNTPLLPVKKPGTNDYRPVQDLREVNKRVEDIHPTVPNPYNLLSGLPPSHQWYTVLDLKDAFFCLRLHPTSQPLFAFEWRDPEMGISGQLTWTRLPQGFKNSPTLFDEALHRDLADFRIQHPDLILLQYVDDLLLAATSELDCQQGTRALLQTLGNLGYRASAKKAQICQKQVKYLGYLLKEGQRWLTEARKETVMGQPTPKTPRQLREFLGTAGFCRLWIPGFAEMAAPLYPLTKTGTLFNWGPDQQKAYQEIKQALLTAPALGLPDLTKPFELFVDEKQGYAKGVLTQKLGPWRRPVAYLSKKLDPVAAGWPPCLRMVAAIAVLTKDAGKLTMGQPLVILAPHAVEALVKQPPDRWLSNARMTHYQALLLDTDRVQFGPVVALNPATLLPLPEEGLQHNCLDILAEAHGTRPDLTDQPLPDADHTWYTDGSSLLQEGQRKAGAAVTTETEVIWAKALPAGTSAQRAELIALTQALKMAEGKKLNVYTDSRYAFATAHIHGEIYRRRGLLTSEGKEIKNKDEILALLKALFLPKRLSIIHCPGHQKGHSAEARGNRMADQAARKAAITETPDTSTLLAGKRTADGSEFEKRTADGSEFESPKKKAKVE

SEQ ID NO: 6353 - protein, 2103 aa, synthetic construct
MPAAKRVKLDGGDKKYSIGLDIGTNSVGWAVITDEYKVPSKKFKVLGNTDRHSIKKNLIGALLFDSGETAEATRLKRTARRRYTRRKNRICYLQEIFSNEMAKVDDSFFHRLEESFLVEEDKKHERHPIFGNIVDEVAYHEKYPTIYHLRKKLVDSTDKADLRLIYLALAHMIKFRGHFLIEGDLNPDNSDVDKLFIQLVQTYNQLFEENPINASGVDAKAILSARLSKSRRLENLIAQLPGEKKNGLFGNLIALSLGLTPNFKSNFDLAEDAKLQLSKDTYDDDLDNLLAQIGDQYADLFLAAKNLSDAILLSDILRVNTEITKAPLSASMIKRYDEHHQDLTLLKALVRQQLPEKYKEIFFDQSKNGYAGYIDGGASQEEFYKFIKPILEKMDGTEELLVKLNREDLLRKQRTFDNGSIPHQIHLGELHAILRRQEDFYPFLKDNREKIEKILTFRIPYYVGPLARGNSRFAWMTRKSEETITPWNFEEVVDKGASAQSFIERMTNFDKNLPNEKVLPKHSLLYEYFTVYNELTKVKYVTEGMRKPAFLSGEQKKAIVDLLFKTNRKVTVKQLKEDYFKKIECFDSVEISGVEDRFNASLGTYHDLLKIIKDKDFLDNEENEDILEDIVLTLTLFEDREMIEERLKTYAHLFDDKVMKQLKRRRYTGWGRLSRKLINGIRDKQSGKTILDFLKSDGFANRNFMQLIHDDSLTFKEDIQKAQVSGQGDSLHEHIANLAGSPAIKKGILQTVKVVDELVKVMGRHKPENIVIEMARENQTTQKGQKNSRERMKRIEEGIKELGSQILKEHPVENTQLQNEKLYLYYLQNGRDMYVDQELDINRLSDYDVDHIVPQSFLKDDSIDNKVLTRSDKARGKSDNVPSEEVVKKMKNYWRQLLNAKLITQRKFDNLTKAERGGLSELDKAGFIKRQLVETRQITKHVAQILDSRMNTKYDENDKLIREVKVITLKSKLVSDFRKDFQFYKVREINNYHHAHDAYLNAVVGTALIKKYPKLESEFVYGDYKVYDVRKMIAKSEQEIGKATAKYFFYSNIMNFFKTEITLANGEIRKRPLIETNGETGEIVWDKGRDFATVRKVLSMPQVNIVKKTEVQTGGFSKESILPKRNSDKLIARKKDWDPKKYGGFDSPTVAYSVLVVAKVEKGKSKKLKSVKELLGITIMERSSFEKNPIDFLEAKGYKEVKKDLIIKLPKYSLFELENGRKRMLASAGELQKGNELALPSKYVNFLYLASHYEKLKGSPEDNEQKQLFVEQHKHYLDEIIEQISEFSKRVILADANLDKVLSAYNKHRDKPIREQAENIIHLFTLTNLGAPAAFKYFDTTIDRKRYTSTKEVLDATLIHQSITGLYETRIDLSQLGGDGGGSSGSSGSSGSSGSSGSSGGTLNIEDEYRLHEISTEPDVSPGSTWLSDFPQAWAETGGMGLAVRQAPLIIPLKATSTPVSIKQYPMSQEAKLGIKPHIQRLLDQGILVPCQSPWNTPLLPVKKPGTNDYRPVQGLREVNKRVEDIHPTVPNPYNLLSGLPTSHRWYTVLDLKDAFFCLRLHPTSQPLFASEWRDPGMGISGQLTWTRLPQGFKNSPTLFDEALHRGLADFRIQHPDLILLQYVDDLLLAATSELDCQQGTRALLKTLGNLGYRASAKKAQICQKQVKYLGYLLREGQRWLTEARKETVMGQPTPKTPRQLREFLGTAGFCRLWIPRFAEMAAPLYPLTKTGTLFNWGPDQQKAYHEIKQALLTAPALGLPDLTKPFELFVDEKQGYAKGVLTQKLGPWRRPVAYLSKKLDPVAAGWPPCLRMVAAIAVLTKDAGKLTMGQPLVILAPHAVEALVKQPPDRWLSNARMTHYQAMLLDTDRVQFGPVVALNPATLLPLPEEGAPHDCLEILAETHGTEPDLTDQPIPDADHTWYTDGSSFLQEGQRKAGAAVTTETEVIWARALPAGTSAQRAELIALTQALKMAEGKRLNVYTDSRYAFATAHIHGEIYKRRGLLTSEGREIKNKSEILALLKALFLPKRLSIIHCLGHQKGDSAEARGNRLADQAAREAAIKTPPDTSTLLAGKRTADGSEFEKRTADGSEFESPKKKAKVE

SEQ ID NO: 6354 - protein, 2097 aa, synthetic construct
MPAAKRVKLDGGDKKYSIGLDIGTNSVGWAVITDEYKVPSKKFKVLGNTDRHSIKKNLIGALLFDSGETAEATRLKRTARRRYTRRKNRICYLQEIFSNEMAKVDDSFFHRLEESFLVEEDKKHERHPIFGNIVDEVAYHEKYPTIYHLRKKLVDSTDKADLRLIYLALAHMIKFRGHFLIEGDLNPDNSDVDKLFIQLVQTYNQLFEENPINASGVDAKAILSARLSKSRRLENLIAQLPGEKKNGLFGNLIALSLGLTPNFKSNFDLAEDAKLQLSKDTYDDDLDNLLAQIGDQYADLFLAAKNLSDAILLSDILRVNTEITKAPLSASMIKRYDEHHQDLTLLKALVRQQLPEKYKEIFFDQSKNGYAGYIDGGASQEEFYKFIKPILEKMDGTEELLVKLNREDLLRKQRTFDNGSIPHQIHLGELHAILRRQEDFYPFLKDNREKIEKILTFRIPYYVGPLARGNSRFAWMTRKSEETITPWNFEEVVDKGASAQSFIERMTNFDKNLPNEKVLPKHSLLYEYFTVYNELTKVKYVTEGMRKPAFLSGEQKKAIVDLLFKTNRKVTVKQLKEDYFKKIECFDSVEISGVEDRFNASLGTYHDLLKIIKDKDFLDNEENEDILEDIVLTLTLFEDREMIEERLKTYAHLFDDKVMKQLKRRRYTGWGRLSRKLINGIRDKQSGKTILDFLKSDGFANRNFMQLIHDDSLTFKEDIQKAQVSGQGDSLHEHIANLAGSPAIKKGILQTVKVVDELVKVMGRHKPENIVIEMARENQTTQKGQKNSRERMKRIEEGIKELGSQILKEHPVENTQLQNEKLYLYYLQNGRDMYVDQELDINRLSDYDVDHIVPQSFLKDDSIDNKVLTRSDKARGKSDNVPSEEVVKKMKNYWRQLLNAKLITQRKFDNLTKAERGGLSELDKAGFIKRQLVETRQITKHVAQILDSRMNTKYDENDKLIREVKVITLKSKLVSDFRKDFQFYKVREINNYHHAHDAYLNAVVGTALIKKYPKLESEFVYGDYKVYDVRKMIAKSEQEIGKATAKYFFYSNIMNFFKTEITLANGEIRKRPLIETNGETGEIVWDKGRDFATVRKVLSMPQVNIVKKTEVQTGGFSKESILPKRNSDKLIARKKDWDPKKYGGFDSPTVAYSVLVVAKVEKGKSKKLKSVKELLGITIMERSSFEKNPIDFLEAKGYKEVKKDLIIKLPKYSLFELENGRKRMLASAGELQKGNELALPSKYVNFLYLASHYEKLKGSPEDNEQKQLFVEQHKHYLDEIIEQISEFSKRVILADANLDKVLSAYNKHRDKPIREQAENIIHLFTLTNLGAPAAFKYFDTTIDRKRYTSTKEVLDATLIHQSITGLYETRIDLSQLGGDGGGSSGSSGSSGSSGSSGSSGGTLQLDDEYRLYSPLVKPDQNIQFWLEQFPQAWAETAGMGLAKQVPPQVIQLKASATPVSVRQYPLSKEAQEGIRPHVQRLIQQGILVPVQSPWNTPLLPVRKPGTNDYRPVQDLREVNKRVQDIHPTVPNPYNLLCALPPQRSWYTVLDLKDAFFCLRLHPTSQPLFAFEWRDPGTGRTGQLTWTRLPQGFKNSPTIFDEALHRDLANFRIQHPQVTLLQYVDDLLLAGATKQDCLEGTKALLLELSDLGYRASAKKAQICRREVTYLGYSLRDGQRWLTEARKKTVVQIPAPTTAKQVREFLGTAGFCRLWIPGFATLAAPLYPLTKEKGEFSWAPEHQKAFDAIKKALLSAPALALPDVTKPFTLYVDERKGVARGVLTQTLGPWRRPVAYLSKKLDPVASGWPVCLKAIAAVAILVKDADKLTLGQNITVIAPHALENIVRQPPDRWMTNARMTHYQSLLLTERVTFAPPAALNPATLLPEETDEPVTHDCHQLLIEETGVRKDLTDIPLTGEVLTWFTDGSSYVVEGKRMAGAAVVDGTRTIWASSLPEGTSAQKAELMALTQALRLAEGKSINIYTDSRYAFATAHVHGAIYKQRGLLTSAGREIKNKEEILSLLEALHLPKRLAIIHCPGHQKAKDPISRGNQMADRVAKQAAQGVNLLAGKRTADGSEFEKRTADGSEFESPKKKAKVE

SEQ ID NO: 6355 - protein, 2183 aa, synthetic construct
MPAAKRVKLDGGDKKYSIGLDIGTNSVGWAVITDEYKVPSKKFKVLGNTDRHSIKKNLIGALLFDSGETAEATRLKRTARRRYTRRKNRICYLQEIFSNEMAKVDDSFFHRLEESFLVEEDKKHERHPIFGNIVDEVAYHEKYPTIYHLRKKLVDSTDKADLRLIYLALAHMIKFRGHFLIEGDLNPDNSDVDKLFIQLVQTYNQLFEENPINASGVDAKAILSARLSKSRRLENLIAQLPGEKKNGLFGNLIALSLGLTPNFKSNFDLAEDAKLQLSKDTYDDDLDNLLAQIGDQYADLFLAAKNLSDAILLSDILRVNTEITKAPLSASMIKRYDEHHQDLTLLKALVRQQLPEKYKEIFFDQSKNGYAGYIDGGASQEEFYKFIKPILEKMDGTEELLVKLNREDLLRKQRTFDNGSIPHQIHLGELHAILRRQEDFYPFLKDNREKIEKILTFRIPYYVGPLARGNSRFAWMTRKSEETITPWNFEEVVDKGASAQSFIERMTNFDKNLPNEKVLPKHSLLYEYFTVYNELTKVKYVTEGMRKPAFLSGEQKKAIVDLLFKTNRKVTVKQLKEDYFKKIECFDSVEISGVEDRFNASLGTYHDLLKIIKDKDFLDNEENEDILEDIVLTLTLFEDREMIEERLKTYAHLFDDKVMKQLKRRRYTGWGRLSRKLINGIRDKQSGKTILDFLKSDGFANRNFMQLIHDDSLTFKEDIQKAQVSGQGDSLHEHIANLAGSPAIKKGILQTVKVVDELVKVMGRHKPENIVIEMARENQTTQKGQKNSRERMKRIEEGIKELGSQILKEHPVENTQLQNEKLYLYYLQNGRDMYVDQELDINRLSDYDVDHIVPQSFLKDDSIDNKVLTRSDKARGKSDNVPSEEVVKKMKNYWRQLLNAKLITQRKFDNLTKAERGGLSELDKAGFIKRQLVETRQITKHVAQILDSRMNTKYDENDKLIREVKVITLKSKLVSDFRKDFQFYKVREINNYHHAHDAYLNAVVGTALIKKYPKLESEFVYGDYKVYDVRKMIAKSEQEIGKATAKYFFYSNIMNFFKTEITLANGEIRKRPLIETNGETGEIVWDKGRDFATVRKVLSMPQVNIVKKTEVQTGGFSKESILPKRNSDKLIARKKDWDPKKYGGFDSPTVAYSVLVVAKVEKGKSKKLKSVKELLGITIMERSSFEKNPIDFLEAKGYKEVKKDLIIKLPKYSLFELENGRKRMLASAGELQKGNELALPSKYVNFLYLASHYEKLKGSPEDNEQKQLFVEQHKHYLDEIIEQISEFSKRVILADANLDKVLSAYNKHRDKPIREQAENIIHLFTLTNLGAPAAFKYFDTTIDRKRYTSTKEVLDATLIHQSITGLYETRIDLSQLGGDGGGSSGSSGSSGSSGSSGSSGGMDPLQLLQPLEAEIKGTKLKAHWNSGATITCVPEAFLEDERPIQTMLIKTIHGEKQQDVYYLTFKVQGRKVEAEVLASPYDYILLNPSDVPWLMKKPLQLTVLVPLHEYQERLLQQTALPKEQKELLQKLFLKYDALWQHWENQVGHRRIKPHNIATGTLAPRPQKQYPINPKAKPSIQIVIDDLLKQGVLIQQNSTMNTPVYPVPKPDGKWRMVLDYREVNKTIPLIAAQNQHSAGILSSIYRGKYKTTLDLTNGFWAHPITPESYWLTAFTWQGKQYCWTRLPQGFLNSPALFNADVVDLLKEIPNVQAYVDDIYISHDDPQEHLEQLEKIFSILLNAGYVVSLKKSEIAQREVEFLGFNITKEGRGLTDTFKQKLLNITPPKDLKQLQSILGLLNFARNFIPNYSELVKPLYTIVAPANGKFISWTEDNSNQLQHIISVLNQADNLEERNPETRLIIKVNSSPSAGYIRYYNEGSKRPIMYVNYIFSKAEAKFTQTEKLLTTMHKGLIKAMDLAMGQEILVYSPIVSMTKIQRTPLPERKALPVRWITWMTYLEDPRIQFHYDKSLPELQQIPNVTEDVIAKTKHPSEFAMVFYTDGSAIKHPDVNKSHSAGMGIAQVQFIPEYKIVHQWSIPLGDHTAQLAEIAAVEFACKKALKISGPVLIVTDSFYVAESANKELPYWKSNGFLNNKKKPLRHVSKWKSIAECLQLKPDIIIMHEKGHQQPMTTLHTEGNNLADKLATQGSYVVHAGKRTADGSEFEKRTADGSEFESPKKKAKVE

SEQ ID NO: 6356 - protein, 2094 aa, synthetic construct
MPAAKRVKLDGGDKKYSIGLDIGTNSVGWAVITDEYKVPSKKFKVLGNTDRHSIKKNLIGALLFDSGETAEATRLKRTARRRYTRRKNRICYLQEIFSNEMAKVDDSFFHRLEESFLVEEDKKHERHPIFGNIVDEVAYHEKYPTIYHLRKKLVDSTDKADLRLIYLALAHMIKFRGHFLIEGDLNPDNSDVDKLFIQLVQTYNQLFEENPINASGVDAKAILSARLSKSRRLENLIAQLPGEKKNGLFGNLIALSLGLTPNFKSNFDLAEDAKLQLSKDTYDDDLDNLLAQIGDQYADLFLAAKNLSDAILLSDILRVNTEITKAPLSASMIKRYDEHHQDLTLLKALVRQQLPEKYKEIFFDQSKNGYAGYIDGGASQEEFYKFIKPILEKMDGTEELLVKLNREDLLRKQRTFDNGSIPHQIHLGELHAILRRQEDFYPFLKDNREKIEKILTFRIPYYVGPLARGNSRFAWMTRKSEETITPWNFEEVVDKGASAQSFIERMTNFDKNLPNEKVLPKHSLLYEYFTVYNELTKVKYVTEGMRKPAFLSGEQKKAIVDLLFKTNRKVTVKQLKEDYFKKIECFDSVEISGVEDRFNASLGTYHDLLKIIKDKDFLDNEENEDILEDIVLTLTLFEDREMIEERLKTYAHLFDDKVMKQLKRRRYTGWGRLSRKLINGIRDKQSGKTILDFLKSDGFANRNFMQLIHDDSLTFKEDIQKAQVSGQGDSLHEHIANLAGSPAIKKGILQTVKVVDELVKVMGRHKPENIVIEMARENQTTQKGQKNSRERMKRIEEGIKELGSQILKEHPVENTQLQNEKLYLYYLQNGRDMYVDQELDINRLSDYDVDHIVPQSFLKDDSIDNKVLTRSDKARGKSDNVPSEEVVKKMKNYWRQLLNAKLITQRKFDNLTKAERGGLSELDKAGFIKRQLVETRQITKHVAQILDSRMNTKYDENDKLIREVKVITLKSKLVSDFRKDFQFYKVREINNYHHAHDAYLNAVVGTALIKKYPKLESEFVYGDYKVYDVRKMIAKSEQEIGKATAKYFFYSNIMNFFKTEITLANGEIRKRPLIETNGETGEIVWDKGRDFATVRKVLSMPQVNIVKKTEVQTGGFSKESILPKRNSDKLIARKKDWDPKKYGGFDSPTVAYSVLVVAKVEKGKSKKLKSVKELLGITIMERSSFEKNPIDFLEAKGYKEVKKDLIIKLPKYSLFELENGRKRMLASAGELQKGNELALPSKYVNFLYLASHYEKLKGSPEDNEQKQLFVEQHKHYLDEIIEQISEFSKRVILADANLDKVLSAYNKHRDKPIREQAENIIHLFTLTNLGAPAAFKYFDTTIDRKRYTSTKEVLDATLIHQSITGLYETRIDLSQLGGDGGGSSGSSGSSGSSGSSGSSGGIPWLMKKPLQLTTLVPLQEYEERLLKQTMLTGSYKEKLQSLFLKYDALWQHWENQVGHRRIKPHHIATGTVNPRPQKQYPINPKAKASIQTVINDLLKQGVLIQQNSIMNTPVYPVPKPDGKWRMVLDYREVNKTIPLIAAQNQHSAGILSSIFRGKYKTTLDLSNGFWAHSITPESYWLTAFTWLGQQYCWTRLPQGFLNSPALFNADVVDLLKEVPNVQVYVDDIYISHDDPREHLEQLEKVFSLLLNAGYVVSLKKSEIAQHEVEFLGFNITKEGRGLTETFKQKLLNITPPRDLKQLQSILGKLNFARNFIPNFSELVKPLYNIIATAPGKYITWTTDNSQQLQNIISMLNSAENLEERNPEVRLIMKVNTSPSAGYIRFYNEFAKRPIMYLNYVYTKAEVKFTNTEKLLTTIHKGLIKALDLGMGQEILVYSPIVSMTKIQKTPLPERKALPIRWITWMSYLEDPRIQFHYDKTLPELQQVPTVTDDIIAKIKHPSEFSMVFYTDGSAIKHPNVNKSHNAGMGIAQVQFKPEFTVINTWSIPLGDHTAQLAEVAAVEFACKKALKIDGPVLIVTDSFYVAESVNKELPYWQSNGFFNNKKKPLKHVSKWKSIADCIQLKPDIIIIHEKGHQPTASTFHTEGNNLADKLATQGSYVVNAGKRTADGSEFEKRTADGSEFESPKKKAKVE

SEQ ID NO: 6357 - protein, 2183 aa, synthetic construct
MPAAKRVKLDGGDKKYSIGLDIGTNSVGWAVITDEYKVPSKKFKVLGNTDRHSIKKNLIGALLFDSGETAEATRLKRTARRRYTRRKNRICYLQEIFSNEMAKVDDSFFHRLEESFLVEEDKKHERHPIFGNIVDEVAYHEKYPTIYHLRKKLVDSTDKADLRLIYLALAHMIKFRGHFLIEGDLNPDNSDVDKLFIQLVQTYNQLFEENPINASGVDAKAILSARLSKSRRLENLIAQLPGEKKNGLFGNLIALSLGLTPNFKSNFDLAEDAKLQLSKDTYDDDLDNLLAQIGDQYADLFLAAKNLSDAILLSDILRVNTEITKAPLSASMIKRYDEHHQDLTLLKALVRQQLPEKYKEIFFDQSKNGYAGYIDGGASQEEFYKFIKPILEKMDGTEELLVKLNREDLLRKQRTFDNGSIPHQIHLGELHAILRRQEDFYPFLKDNREKIEKILTFRIPYYVGPLARGNSRFAWMTRKSEETITPWNFEEVVDKGASAQSFIERMTNFDKNLPNEKVLPKHSLLYEYFTVYNELTKVKYVTEGMRKPAFLSGEQKKAIVDLLFKTNRKVTVKQLKEDYFKKIECFDSVEISGVEDRFNASLGTYHDLLKIIKDKDFLDNEENEDILEDIVLTLTLFEDREMIEERLKTYAHLFDDKVMKQLKRRRYTGWGRLSRKLINGIRDKQSGKTILDFLKSDGFANRNFMQLIHDDSLTFKEDIQKAQVSGQGDSLHEHIANLAGSPAIKKGILQTVKVVDELVKVMGRHKPENIVIEMARENQTTQKGQKNSRERMKRIEEGIKELGSQILKEHPVENTQLQNEKLYLYYLQNGRDMYVDQELDINRLSDYDVDHIVPQSFLKDDSIDNKVLTRSDKARGKSDNVPSEEVVKKMKNYWRQLLNAKLITQRKFDNLTKAERGGLSELDKAGFIKRQLVETRQITKHVAQILDSRMNTKYDENDKLIREVKVITLKSKLVSDFRKDFQFYKVREINNYHHAHDAYLNAVVGTALIKKYPKLESEFVYGDYKVYDVRKMIAKSEQEIGKATAKYFFYSNIMNFFKTEITLANGEIRKRPLIETNGETGEIVWDKGRDFATVRKVLSMPQVNIVKKTEVQTGGFSKESILPKRNSDKLIARKKDWDPKKYGGFDSPTVAYSVLVVAKVEKGKSKKLKSVKELLGITIMERSSFEKNPIDFLEAKGYKEVKKDLIIKLPKYSLFELENGRKRMLASAGELQKGNELALPSKYVNFLYLASHYEKLKGSPEDNEQKQLFVEQHKHYLDEIIEQISEFSKRVILADANLDKVLSAYNKHRDKPIREQAENIIHLFTLTNLGAPAAFKYFDTTIDRKRYTSTKEVLDATLIHQSITGLYETRIDLSQLGGDGGGSSGSSGSSGSSGSSGSSGGMDPLQLLQPLEAEIKGTKLKAHWNSGATITCVPQAFLEEEVPIKNIWIKTIHGEKEQPVYYLTFKIQGRKVEAEVISSPYDYILVSPSDIPWLMKKPLQLTTLVPLQEYEERLLKQTMLTGSYKEKLQSLFLKYDALWQHWENQVGHRRIKPHHIATGTVNPRPQKQYPINPKAKASIQTVINDLLKQGVLIQQNSIMNTPVYPVPKPDGKWRMVLDYREVNKTIPLIAAQNQHSAGILSSIFRGKYKTTLDLSNGFWAHSITPESYWLTAFTWLGQQYCWTRLPQGFLNSPALFNADVVDLLKEVPNVQVYVDDIYISHDDPREHLEQLEKVFSLLLNAGYVVSLKKSEIAQHEVEFLGFNITKEGRGLTETFKQKLLNITPPRDLKQLQSILGLLNFARNFIPNFSELVKPLYNIIATAPGKYITWTTDNSQQLQNIISMLNSAENLEERNPEVRLIMKVNTSPSAGYIRFYNEFAKRPIMYLNYVYTKAEVKFTNTEKLLTTIHKGLIKALDLGMGQEILVYSPIVSMTKIQKTPLPERKALPIRWITWMSYLEDPRIQFHYDKTLPELQQVPTVTDDIIAKIKHPSEFSMVFYTDGSAIKHPNVNKSHNAGMGIAQVQFKPEFTVINTWSIPLGDHTAQLAEVAAVEFACKKALKIDGPVLIVTDSFYVAESVNKELPYWQSNGFFNNKKKPLKHVSKWKSIADCIQLKPDIIIIHEKGHQPTASTFHTEGNNLADKLATQGSYVVNAGKRTADGSEFEKRTADGSEFESPKKKAKVE

SEQ ID NO: 6358 - protein, 2101 aa, synthetic construct
MPAAKRVKLDGGDKKYSIGLDIGTNSVGWAVITDEYKVPSKKFKVLGNTDRHSIKKNLIGALLFDSGETAEATRLKRTARRRYTRRKNRICYLQEIFSNEMAKVDDSFFHRLEESFLVEEDKKHERHPIFGNIVDEVAYHEKYPTIYHLRKKLVDSTDKADLRLIYLALAHMIKFRGHFLIEGDLNPDNSDVDKLFIQLVQTYNQLFEENPINASGVDAKAILSARLSKSRRLENLIAQLPGEKKNGLFGNLIALSLGLTPNFKSNFDLAEDAKLQLSKDTYDDDLDNLLAQIGDQYADLFLAAKNLSDAILLSDILRVNTEITKAPLSASMIKRYDEHHQDLTLLKALVRQQLPEKYKEIFFDQSKNGYAGYIDGGASQEEFYKFIKPILEKMDGTEELLVKLNREDLLRKQRTFDNGSIPHQIHLGELHAILRRQEDFYPFLKDNREKIEKILTFRIPYYVGPLARGNSRFAWMTRKSEETITPWNFEEVVDKGASAQSFIERMTNFDKNLPNEKVLPKHSLLYEYFTVYNELTKVKYVTEGMRKPAFLSGEQKKAIVDLLFKTNRKVTVKQLKEDYFKKIECFDSVEISGVEDRFNASLGTYHDLLKIIKDKDFLDNEENEDILEDIVLTLTLFEDREMIEERLKTYAHLFDDKVMKQLKRRRYTGWGRLSRKLINGIRDKQSGKTILDFLKSDGFANRNFMQLIHDDSLTFKEDIQKAQVSGQGDSLHEHIANLAGSPAIKKGILQTVKVVDELVKVMGRHKPENIVIEMARENQTTQKGQKNSRERMKRIEEGIKELGSQILKEHPVENTQLQNEKLYLYYLQNGRDMYVDQELDINRLSDYDVDHIVPQSFLKDDSIDNKVLTRSDKARGKSDNVPSEEVVKKMKNYWRQLLNAKLITQRKFDNLTKAERGGLSELDKAGFIKRQLVETRQITKHVAQILDSRMNTKYDENDKLIREVKVITLKSKLVSDFRKDFQFYKVREINNYHHAHDAYLNAVVGTALIKKYPKLESEFVYGDYKVYDVRKMIAKSEQEIGKATAKYFFYSNIMNFFKTEITLANGEIRKRPLIETNGETGEIVWDKGRDFATVRKVLSMPQVNIVKKTEVQTGGFSKESILPKRNSDKLIARKKDWDPKKYGGFDSPTVAYSVLVVAKVEKGKSKKLKSVKELLGITIMERSSFEKNPIDFLEAKGYKEVKKDLIIKLPKYSLFELENGRKRMLASAGELQKGNELALPSKYVNFLYLASHYEKLKGSPEDNEQKQLFVEQHKHYLDEIIEQISEFSKRVILADANLDKVLSAYNKHRDKPIREQAENIIHLFTLTNLGAPAAFKYFDTTIDRKRYTSTKEVLDATLIHQSITGLYETRIDLSQLGGDGGGSSGSSGSSGSSGSSGSSGGVLNLEEEYRLHEKPVPSSIDPSWLQLFPTVWAERAGMGLANQVPPVVVELRSGASPVAVRQYPMSKEAREGIRPHIQRFLDLGVLVPCQSPWNTPLLPVKKPGTNDYRPVQDLREINKRVQDIHPTVPNPYNLLSSLPPSHTWYSVLDLKDAFFCLKLHPNSQPLFAFEWRDPEKGNTGQLTWTRLPQGFKNSPTLFDEALHRDLAPFRALNPQVVLLQYVDDLLVAAPTYRDCKEGTQKLLQELSKLGYRVSAKKAQLCQKEVTYLGYLLKEGKRWLTPARKATVMKIPPPTTPRQVREFLGTAGFCRLWIPGFASLAAPLYPLTKESIPFIWTEEHQKAFDRIKEALLSAPALALPDLTKPFTLYVDERAGVARGVLTQTLGPWRRPVAYLSKKLDPVASGWPTCLKAVAAVALLLKDADKLTLGQNVTVIASHSLESIVRQPPDRWMTNARMTHYQSLLLNERVSFAPPAVLNPATLLPVESEATPVHRCSEILAEETGTRRDLKDQPLPGVPAWYTDGSSFIAEGKRRAGAAIVDGKRTVWASSLPEGTSAQKAELVALTQALRLAEGKDINIYTDSRYAFATAHIHGAIYKQRGLLTSAGKDIKNKEEILALLEAIHLPKRVAIIHCPGHQKGNDPVATGNRRADEAAKQAALSTRVLAETTKPAGKRTADGSEFEKRTADGSEFESPKKKAKVE

SEQ ID NO: 6359 - protein, 2103 aa, synthetic construct
MPAAKRVKLDGGDKKYSIGLDIGTNSVGWAVITDEYKVPSKKFKVLGNTDRHSIKKNLIGALLFDSGETAEATRLKRTARRRYTRRKNRICYLQEIFSNEMAKVDDSFFHRLEESFLVEEDKKHERHPIFGNIVDEVAYHEKYPTIYHLRKKLVDSTDKADLRLIYLALAHMIKFRGHFLIEGDLNPDNSDVDKLFIQLVQTYNQLFEENPINASGVDAKAILSARLSKSRRLENLIAQLPGEKKNGLFGNLIALSLGLTPNFKSNFDLAEDAKLQLSKDTYDDDLDNLLAQIGDQYADLFLAAKNLSDAILLSDILRVNTEITKAPLSASMIKRYDEHHQDLTLLKALVRQQLPEKYKEIFFDQSKNGYAGYIDGGASQEEFYKFIKPILEKMDGTEELLVKLNREDLLRKQRTFDNGSIPHQIHLGELHAILRRQEDFYPFLKDNREKIEKILTFRIPYYVGPLARGNSRFAWMTRKSEETITPWNFEEVVDKGASAQSFIERMTNFDKNLPNEKVLPKHSLLYEYFTVYNELTKVKYVTEGMRKPAFLSGEQKKAIVDLLFKTNRKVTVKQLKEDYFKKIECFDSVEISGVEDRFNASLGTYHDLLKIIKDKDFLDNEENEDILEDIVLTLTLFEDREMIEERLKTYAHLFDDKVMKQLKRRRYTGWGRLSRKLINGIRDKQSGKTILDFLKSDGFANRNFMQLIHDDSLTFKEDIQKAQVSGQGDSLHEHIANLAGSPAIKKGILQTVKVVDELVKVMGRHKPENIVIEMARENQTTQKGQKNSRERMKRIEEGIKELGSQILKEHPVENTQLQNEKLYLYYLQNGRDMYVDQELDINRLSDYDVDHIVPQSFLKDDSIDNKVLTRSDKARGKSDNVPSEEVVKKMKNYWRQLLNAKLITQRKFDNLTKAERGGLSELDKAGFIKRQLVETRQITKHVAQILDSRMNTKYDENDKLIREVKVITLKSKLVSDFRKDFQFYKVREINNYHHAHDAYLNAVVGTALIKKYPKLESEFVYGDYKVYDVRKMIAKSEQEIGKATAKYFFYSNIMNFFKTEITLANGEIRKRPLIETNGETGEIVWDKGRDFATVRKVLSMPQVNIVKKTEVQTGGFSKESILPKRNSDKLIARKKDWDPKKYGGFDSPTVAYSVLVVAKVEKGKSKKLKSVKELLGITIMERSSFEKNPIDFLEAKGYKEVKKDLIIKLPKYSLFELENGRKRMLASAGELQKGNELALPSKYVNFLYLASHYEKLKGSPEDNEQKQLFVEQHKHYLDEIIEQISEFSKRVILADANLDKVLSAYNKHRDKPIREQAENIIHLFTLTNLGAPAAFKYFDTTIDRKRYTSTKEVLDATLIHQSITGLYETRIDLSQLGGDGGGSSGSSGSSGSSGSSGSSGGTLNIEDEYRLHETSKEPDVPLGSTWLSDFPQAWAETGGMGLAVRQAPLIIPLKATSTPVSIKQYPMSQEARLGIKPHIQRLLDQGILVPCQSPWNTPLLPVKKPGTNDYRPVQDLREVNKRVEDIHPTVPNPYNLLSGLPPSHQWYTVLDLKDAFFCLRLHPTSQPLFAFEWRDPEMGISGQLTWTRLPQGFKNSPTLFNEALHRDLADFRIQHPDLILLQYVDDLLLAATSEQDCQRGTRALLQTLGNLGYRASAKKAQICQKQVKYLGYLLKEGQRWLTEARKETVMGQPTPKTPRQLREFLGTAGFCRLWIPGFAEMAAPLYPLTKPGTLFNWGPDQQKAYQEIKQALLTAPALGLPDLTKPFELFVDEKQGYAKGVLTQKLGPWRRPVAYLSKKLDPVAAGWPPCLRMVAAIAVLTKDAGKLTMGQPLVILAPHAVEALVKQPPDRWLSNARMTHYQAMLLDTDRVQFGPVVALNPATLLPLPEKEAPHDCLEILAETHGTRPDLTDQPIPDADYTWYTDGSSFLQEGQRRAGAAVTTETEVIWARALPAGTSAQRAELIALTQALKMAEGKKLNVYTDSRYAFATAHVHGEIYRRRGWLTSEGREIKNKNEILALLKALFLPKRLSIIHCPGHQKGNSAEARGNRMADQAAREAAMKAVLETSTLLAGKRTADGSEFEKRTADGSEFESPKKKAKVE

SEQ ID NO: 6360 - protein, 2096 aa, synthetic construct
MPAAKRVKLDGGDKKYSIGLDIGTNSVGWAVITDEYKVPSKKFKVLGNTDRHSIKKNLIGALLFDSGETAEATRLKRTARRRYTRRKNRICYLQEIFSNEMAKVDDSFFHRLEESFLVEEDKKHERHPIFGNIVDEVAYHEKYPTIYHLRKKLVDSTDKADLRLIYLALAHMIKFRGHFLIEGDLNPDNSDVDKLFIQLVQTYNQLFEENPINASGVDAKAILSARLSKSRRLENLIAQLPGEKKNGLFGNLIALSLGLTPNFKSNFDLAEDAKLQLSKDTYDDDLDNLLAQIGDQYADLFLAAKNLSDAILLSDILRVNTEITKAPLSASMIKRYDEHHQDLTLLKALVRQQLPEKYKEIFFDQSKNGYAGYIDGGASQEEFYKFIKPILEKMDGTEELLVKLNREDLLRKQRTFDNGSIPHQIHLGELHAILRRQEDFYPFLKDNREKIEKILTFRIPYYVGPLARGNSRFAWMTRKSEETITPWNFEEVVDKGASAQSFIERMTNFDKNLPNEKVLPKHSLLYEYFTVYNELTKVKYVTEGMRKPAFLSGEQKKAIVDLLFKTNRKVTVKQLKEDYFKKIECFDSVEISGVEDRFNASLGTYHDLLKIIKDKDFLDNEENEDILEDIVLTLTLFEDREMIEERLKTYAHLFDDKVMKQLKRRRYTGWGRLSRKLINGIRDKQSGKTILDFLKSDGFANRNFMQLIHDDSLTFKEDIQKAQVSGQGDSLHEHIANLAGSPAIKKGILQTVKVVDELVKVMGRHKPENIVIEMARENQTTQKGQKNSRERMKRIEEGIKELGSQILKEHPVENTQLQNEKLYLYYLQNGRDMYVDQELDINRLSDYDVDHIVPQSFLKDDSIDNKVLTRSDKARGKSDNVPSEEVVKKMKNYWRQLLNAKLITQRKFDNLTKAERGGLSELDKAGFIKRQLVETRQITKHVAQILDSRMNTKYDENDKLIREVKVITLKSKLVSDFRKDFQFYKVREINNYHHAHDAYLNAVVGTALIKKYPKLESEFVYGDYKVYDVRKMIAKSEQEIGKATAKYFFYSNIMNFFKTEITLANGEIRKRPLIETNGETGEIVWDKGRDFATVRKVLSMPQVNIVKKTEVQTGGFSKESILPKRNSDKLIARKKDWDPKKYGGFDSPTVAYSVLVVAKVEKGKSKKLKSVKELLGITIMERSSFEKNPIDFLEAKGYKEVKKDLIIKLPKYSLFELENGRKRMLASAGELQKGNELALPSKYVNFLYLASHYEKLKGSPEDNEQKQLFVEQHKHYLDEIIEQISEFSKRVILADANLDKVLSAYNKHRDKPIREQAENIIHLFTLTNLGAPAAFKYFDTTIDRKRYTSTKEVLDATLIHQSITGLYETRIDLSQLGGDGGEAAAKGGTVSLQDEHRLFDIPVTTSLPDVWLQDFPQAWAETGGLGRAKCQAPIIIDLKPTAVPVSIKQYPMSLEAHMGIRQHIIKFLELGVLRPCRSPWNTPLLPVKKPGTQDYRPVQDLREINKRTVDIHPTVPNPYNLLSTLKPDYSWYTVLDLKDAFFCLPLAPQSQELFAFEWKDPERGISGQLTWTRLPQGFKNSPTLFNEALHRDLTDFRTQHPEVTLLQYVDDLLLAAPTKKACTQGTRHLLQELGEKGYRASAKKAQICQTKVTYLGYILSEGKRWLTPGRIETVARIPPPRNPREVREFLGTAGFCRLWIPGFAELAAPLYALTKPSTPFTWQTEHQLAFEALKKALLSAPALGLPDTSKPFTLFLDERQGIAKGVLTQKLGPWKRPVAYLSKKLDPVAAGWPPCLRIMAATAMLVKDSAKLTLGQPLTVITPHTLEAIVRQPPDRWITNARLTHYQALLLDTDRVQFGPPVTLNPATLLPVPENQPSPHDCRQVLAETHGTREDLKDQELPDADHTWYTDGSSYLDSGTRRAGAAVVDGHNTIWAQSLPPGTSAQKAELIALTKALELSKGKKANIYTDSRYAFATAHTHGSIYERRGWLTSEGKEIKNKAEIIALLKALFLPQEVAIIHCPGHQKGQDPVAVGNRQADRVARQAAMAEVLTLATEPDNTSHITAGKRTADGSEFEKRTADGSEFESPKKKAKVE

SEQ ID NO: 6361 - protein, 2167 aa, synthetic construct
MPAAKRVKLDGGDKKYSIGLDIGTNSVGWAVITDEYKVPSKKFKVLGNTDRHSIKKNLIGALLFDSGETAEATRLKRTARRRYTRRKNRICYLQEIFSNEMAKVDDSFFHRLEESFLVEEDKKHERHPIFGNIVDEVAYHEKYPTIYHLRKKLVDSTDKADLRLIYLALAHMIKFRGHFLIEGDLNPDNSDVDKLFIQLVQTYNQLFEENPINASGVDAKAILSARLSKSRRLENLIAQLPGEKKNGLFGNLIALSLGLTPNFKSNFDLAEDAKLQLSKDTYDDDLDNLLAQIGDQYADLFLAAKNLSDAILLSDILRVNTEITKAPLSASMIKRYDEHHQDLTLLKALVRQQLPEKYKEIFFDQSKNGYAGYIDGGASQEEFYKFIKPILEKMDGTEELLVKLNREDLLRKQRTFDNGSIPHQIHLGELHAILRRQEDFYPFLKDNREKIEKILTFRIPYYVGPLARGNSRFAWMTRKSEETITPWNFEEVVDKGASAQSFIERMTNFDKNLPNEKVLPKHSLLYEYFTVYNELTKVKYVTEGMRKPAFLSGEQKKAIVDLLFKTNRKVTVKQLKEDYFKKIECFDSVEISGVEDRFNASLGTYHDLLKIIKDKDFLDNEENEDILEDIVLTLTLFEDREMIEERLKTYAHLFDDKVMKQLKRRRYTGWGRLSRKLINGIRDKQSGKTILDFLKSDGFANRNFMQLIHDDSLTFKEDIQKAQVSGQGDSLHEHIANLAGSPAIKKGILQTVKVVDELVKVMGRHKPENIVIEMARENQTTQKGQKNSRERMKRIEEGIKELGSQILKEHPVENTQLQNEKLYLYYLQNGRDMYVDQELDINRLSDYDVDHIVPQSFLKDDSIDNKVLTRSDKARGKSDNVPSEEVVKKMKNYWRQLLNAKLITQRKFDNLTKAERGGLSELDKAGFIKRQLVETRQITKHVAQILDSRMNTKYDENDKLIREVKVITLKSKLVSDFRKDFQFYKVREINNYHHAHDAYLNAVVGTALIKKYPKLESEFVYGDYKVYDVRKMIAKSEQEIGKATAKYFFYSNIMNFFKTEITLANGEIRKRPLIETNGETGEIVWDKGRDFATVRKVLSMPQVNIVKKTEVQTGGFSKESILPKRNSDKLIARKKDWDPKKYGGFDSPTVAYSVLVVAKVEKGKSKKLKSVKELLGITIMERSSFEKNPIDFLEAKGYKEVKKDLIIKLPKYSLFELENGRKRMLASAGELQKGNELALPSKYVNFLYLASHYEKLKGSPEDNEQKQLFVEQHKHYLDEIIEQISEFSKRVILADANLDKVLSAYNKHRDKPIREQAENIIHLFTLTNLGAPAAFKYFDTTIDRKRYTSTKEVLDATLIHQSITGLYETRIDLSQLGGDGGEAAAKGGMDLLKPLTVERKGVKIKGYWNSQADITCVPKDLLQGEEPVRQQNVTTIHGTQEGDVYYVNLKIDGRRINTEVIGTTLDYAIITPGDVPWILKKPLELTIKLDLEEQQGTLLNNSILSKKGKEELKQLFEKYSALWQSWENQVGHRRIRPHKIATGTVKPTPQKQYHINPKAKPDIQIVINDLLKQGVLIQKESTMNTPVYPVPKPNGRWRMVLDYRAVNKVTPLIAVQNQHSYGILGSLFKGRYKTTIDLSNGFWAHPIVPEDYWITAFTWQGKQYCWTVLPQGFLNSPGLFNGDVVDLLQGIPNVEVYVDDVYISHDSEKEHLEYLDILFNRLKEAGYIISLKKSNIANSIVDFLGFQITNEGRGLTDTFKEKLENITAPTTLKQLQSILGLLNFARNFIPDFTELIAPLYALIPKSPKNYVPWQIEHSTTLETLITKLNGAEYLQGRKGDKTLIMKVNASYTTGYIRYYNEGEKKPISYVSIVFSKTELKFTELEKLLTTVHKGLLKALDLSMGQNIHVYSPIVSMQNIQKTPQTAKKALASRWLSWLSYLEDPRIRFFYDPQMPALKDLPAVDTGKDNKKHPSNFQHIFYTDGSAITSPTKEGHLNAGMGIVYFINKDGNLQKQQEWSISLGNHTAQFAEIAAFEFALKKCLPLGGNILVVTDSNYVAKAYNEELDVWASNGFVNNRKKPLKHISKWKSVADLKRLRPDVVVTHEPGHQKLDSSPHAYGNNLADQLATQASFKVHAGKRTADGSEFEKRTADGSEFESPKKKAKVE

SEQ ID NO: 6362 - protein, 2121 aa, synthetic construct
MPAAKRVKLDGGDKKYSIGLDIGTNSVGWAVITDEYKVPSKKFKVLGNTDRHSIKKNLIGALLFDSGETAEATRLKRTARRRYTRRKNRICYLQEIFSNEMAKVDDSFFHRLEESFLVEEDKKHERHPIFGNIVDEVAYHEKYPTIYHLRKKLVDSTDKADLRLIYLALAHMIKFRGHFLIEGDLNPDNSDVDKLFIQLVQTYNQLFEENPINASGVDAKAILSARLSKSRRLENLIAQLPGEKKNGLFGNLIALSLGLTPNFKSNFDLAEDAKLQLSKDTYDDDLDNLLAQIGDQYADLFLAAKNLSDAILLSDILRVNTEITKAPLSASMIKRYDEHHQDLTLLKALVRQQLPEKYKEIFFDQSKNGYAGYIDGGASQEEFYKFIKPILEKMDGTEELLVKLNREDLLRKQRTFDNGSIPHQIHLGELHAILRRQEDFYPFLKDNREKIEKILTFRIPYYVGPLARGNSRFAWMTRKSEETITPWNFEEVVDKGASAQSFIERMTNFDKNLPNEKVLPKHSLLYEYFTVYNELTKVKYVTEGMRKPAFLSGEQKKAIVDLLFKTNRKVTVKQLKEDYFKKIECFDSVEISGVEDRFNASLGTYHDLLKIIKDKDFLDNEENEDILEDIVLTLTLFEDREMIEERLKTYAHLFDDKVMKQLKRRRYTGWGRLSRKLINGIRDKQSGKTILDFLKSDGFANRNFMQLIHDDSLTFKEDIQKAQVSGQGDSLHEHIANLAGSPAIKKGILQTVKVVDELVKVMGRHKPENIVIEMARENQTTQKGQKNSRERMKRIEEGIKELGSQILKEHPVENTQLQNEKLYLYYLQNGRDMYVDQELDINRLSDYDVDHIVPQSFLKDDSIDNKVLTRSDKARGKSDNVPSEEVVKKMKNYWRQLLNAKLITQRKFDNLTKAERGGLSELDKAGFIKRQLVETRQITKHVAQILDSRMNTKYDENDKLIREVKVITLKSKLVSDFRKDFQFYKVREINNYHHAHDAYLNAVVGTALIKKYPKLESEFVYGDYKVYDVRKMIAKSEQEIGKATAKYFFYSNIMNFFKTEITLANGEIRKRPLIETNGETGEIVWDKGRDFATVRKVLSMPQVNIVKKTEVQTGGFSKESILPKRNSDKLIARKKDWDPKKYGGFDSPTVAYSVLVVAKVEKGKSKKLKSVKELLGITIMERSSFEKNPIDFLEAKGYKEVKKDLIIKLPKYSLFELENGRKRMLASAGELQKGNELALPSKYVNFLYLASHYEKLKGSPEDNEQKQLFVEQHKHYLDEIIEQISEFSKRVILADANLDKVLSAYNKHRDKPIREQAENIIHLFTLTNLGAPAAFKYFDTTIDRKRYTSTKEVLDATLIHQSITGLYETRIDLSQLGGDGGEAAAKGGLLGRDLLTKLKAQIQFSTEGPQVTWEDRPAMCLVLNLEEEYRLHEKPVPPSIDPSWLQLFPMVWAEKAGMGLANQVPPVVVELKSDASPVAVRQYPMSKEAREGIRPHIQRFLDLGILVPCQSPWNTPLLPVKKPGTNDYRPVQDLREVNKRVQDIHPTVPNPYNLLSSLPPSHTWYSVLDLKDAFFCLKLHPNSQPLFAFEWRDPEKGNTGQLTWTRLPQGFKNSPTLFNEALHRDLASFRALNPQVVMLQYVDDLLVAAPTYRDCKEGTRRLLQELSKLGYRVSAKKAQLCREEVTYLGYLLKGGKRWLTPARKATVMKIPTPTTPRQVREFLGTAGFCRLWIPGFASLAAPLYPLTRPKVPFTWTEAHQEAFGRIKEALLSAPALALPDLTKPFALYVDEKEGVARGVLTQTLGPWRRPVAYLSKKLDPVASGWPTCLKAIAAVALLLKDADKLTLGQNVLVIAPHNLESIVRQPPDRWMTNARMTHYQSLLLNERVSFAPPAILNPATLLPVESDDTPIHICSEILAEETGTRPDLRDQPLPGVPAWYTDGSSFIMDGRRQAGAAIVDNKRTVWASNLPEGTSAQKAELIALTQALRLAEGKSINIYTDSRYAFATAHVHGAIYKQRGWLTSAGKDIKNKEEILALLEAIHLPKRVAIIHCPGHQRGTDPVATGNRKADEAAKQAAQSTRILTETTKNAGKRTADGSEFEKRTADGSEFESPKKKAKVE

SEQ ID NO: 6363 - protein, 2212 aa, synthetic construct
MPAAKRVKLDGGDKKYSIGLDIGTNSVGWAVITDEYKVPSKKFKVLGNTDRHSIKKNLIGALLFDSGETAEATRLKRTARRRYTRRKNRICYLQEIFSNEMAKVDDSFFHRLEESFLVEEDKKHERHPIFGNIVDEVAYHEKYPTIYHLRKKLVDSTDKADLRLIYLALAHMIKFRGHFLIEGDLNPDNSDVDKLFIQLVQTYNQLFEENPINASGVDAKAILSARLSKSRRLENLIAQLPGEKKNGLFGNLIALSLGLTPNFKSNFDLAEDAKLQLSKDTYDDDLDNLLAQIGDQYADLFLAAKNLSDAILLSDILRVNTEITKAPLSASMIKRYDEHHQDLTLLKALVRQQLPEKYKEIFFDQSKNGYAGYIDGGASQEEFYKFIKPILEKMDGTEELLVKLNREDLLRKQRTFDNGSIPHQIHLGELHAILRRQEDFYPFLKDNREKIEKILTFRIPYYVGPLARGNSRFAWMTRKSEETITPWNFEEVVDKGASAQSFIERMTNFDKNLPNEKVLPKHSLLYEYFTVYNELTKVKYVTEGMRKPAFLSGEQKKAIVDLLFKTNRKVTVKQLKEDYFKKIECFDSVEISGVEDRFNASLGTYHDLLKIIKDKDFLDNEENEDILEDIVLTLTLFEDREMIEERLKTYAHLFDDKVMKQLKRRRYTGWGRLSRKLINGIRDKQSGKTILDFLKSDGFANRNFMQLIHDDSLTFKEDIQKAQVSGQGDSLHEHIANLAGSPAIKKGILQTVKVVDELVKVMGRHKPENIVIEMARENQTTQKGQKNSRERMKRIEEGIKELGSQILKEHPVENTQLQNEKLYLYYLQNGRDMYVDQELDINRLSDYDVDHIVPQSFLKDDSIDNKVLTRSDKARGKSDNVPSEEVVKKMKNYWRQLLNAKLITQRKFDNLTKAERGGLSELDKAGFIKRQLVETRQITKHVAQILDSRMNTKYDENDKLIREVKVITLKSKLVSDFRKDFQFYKVREINNYHHAHDAYLNAVVGTALIKKYPKLESEFVYGDYKVYDVRKMIAKSEQEIGKATAKYFFYSNIMNFFKTEITLANGEIRKRPLIETNGETGEIVWDKGRDFATVRKVLSMPQVNIVKKTEVQTGGFSKESILPKRNSDKLIARKKDWDPKKYGGFDSPTVAYSVLVVAKVEKGKSKKLKSVKELLGITIMERSSFEKNPIDFLEAKGYKEVKKDLIIKLPKYSLFELENGRKRMLASAGELQKGNELALPSKYVNFLYLASHYEKLKGSPEDNEQKQLFVEQHKHYLDEIIEQISEFSKRVILADANLDKVLSAYNKHRDKPIREQAENIIHLFTLTNLGAPAAFKYFDTTIDRKRYTSTKEVLDATLIHQSITGLYETRIDLSQLGGDGGEAAAKGGTLGDQGSRGSDPLPEPRVTLTVEGIPTEFLVNTGAEHSVLTKPMGKMGSKRTVVAGATGSKVYPWTTKRLLKIGQKQVTHSFLVIPECPAPLLGRDLLTKLKAQIQFSTEGPQVTWEDRPAMCLVLNLEEEYRLHEKPVPPSIDPSWLQLFPMVWAEKAGMGLANQVPPVVVELKSDASPVAVRQYPMSKEAREGIRPHIQRFLDLGILVPCQSPWNTPLLPVKKPGTNDYRPVQDLREVNKRVQDIHPTVPNPYNLLSSLPPSHTWYSVLDLKDAFFCLKLHPNSQPLFAFEWRDPEKGNTGQLTWTRLPQGFKNSPTLFNEALHRDLASFRALNPQVVMLQYVDDLLVAAPTYRDCKEGTRRLLQELSKLGYRVSAKKAQLCREEVTYLGYLLKGGKRWLTPARKATVMKIPTPTTPRQVREFLGTAGFCRLWIPGFASLAAPLYPLTRPKVPFTWTEAHQEAFGRIKEALLSAPALALPDLTKPFALYVDEKEGVARGVLTQTLGPWRRPVAYLSKKLDPVASGWPTCLKAIAAVALLLKDADKLTLGQNVLVIAPHNLESIVRQPPDRWMTNARMTHYQSLLLNERVSFAPPAILNPATLLPVESDDTPIHICSEILAEETGTRPDLRDQPLPGVPAWYTDGSSFIMDGRRQAGAAIVDNKRTVWASNLPEGTSAQKAELIALTQALRLAEGKSINIYTDSRYAFATAHVHGAIYKQRGWLTSAGKDIKNKEEILALLEAIHLPKRVAIIHCPGHQRGTDPVATGNRKADEAAKQAAQSTRILTETTKNAGKRTADGSEFEKRTADGSEFESPKKKAKVE

SEQ ID NO: 6364 - protein, 2212 aa, synthetic construct
MPAAKRVKLDGGDKKYSIGLDIGTNSVGWAVITDEYKVPSKKFKVLGNTDRHSIKKNLIGALLFDSGETAEATRLKRTARRRYTRRKNRICYLQEIFSNEMAKVDDSFFHRLEESFLVEEDKKHERHPIFGNIVDEVAYHEKYPTIYHLRKKLVDSTDKADLRLIYLALAHMIKFRGHFLIEGDLNPDNSDVDKLFIQLVQTYNQLFEENPINASGVDAKAILSARLSKSRRLENLIAQLPGEKKNGLFGNLIALSLGLTPNFKSNFDLAEDAKLQLSKDTYDDDLDNLLAQIGDQYADLFLAAKNLSDAILLSDILRVNTEITKAPLSASMIKRYDEHHQDLTLLKALVRQQLPEKYKEIFFDQSKNGYAGYIDGGASQEEFYKFIKPILEKMDGTEELLVKLNREDLLRKQRTFDNGSIPHQIHLGELHAILRRQEDFYPFLKDNREKIEKILTFRIPYYVGPLARGNSRFAWMTRKSEETITPWNFEEVVDKGASAQSFIERMTNFDKNLPNEKVLPKHSLLYEYFTVYNELTKVKYVTEGMRKPAFLSGEQKKAIVDLLFKTNRKVTVKQLKEDYFKKIECFDSVEISGVEDRFNASLGTYHDLLKIIKDKDFLDNEENEDILEDIVLTLTLFEDREMIEERLKTYAHLFDDKVMKQLKRRRYTGWGRLSRKLINGIRDKQSGKTILDFLKSDGFANRNFMQLIHDDSLTFKEDIQKAQVSGQGDSLHEHIANLAGSPAIKKGILQTVKVVDELVKVMGRHKPENIVIEMARENQTTQKGQKNSRERMKRIEEGIKELGSQILKEHPVENTQLQNEKLYLYYLQNGRDMYVDQELDINRLSDYDVDHIVPQSFLKDDSIDNKVLTRSDKARGKSDNVPSEEVVKKMKNYWRQLLNAKLITQRKFDNLTKAERGGLSELDKAGFIKRQLVETRQITKHVAQILDSRMNTKYDENDKLIREVKVITLKSKLVSDFRKDFQFYKVREINNYHHAHDAYLNAVVGTALIKKYPKLESEFVYGDYKVYDVRKMIAKSEQEIGKATAKYFFYSNIMNFFKTEITLANGEIRKRPLIETNGETGEIVWDKGRDFATVRKVLSMPQVNIVKKTEVQTGGFSKESILPKRNSDKLIARKKDWDPKKYGGFDSPTVAYSVLVVAKVEKGKSKKLKSVKELLGITIMERSSFEKNPIDFLEAKGYKEVKKDLIIKLPKYSLFELENGRKRMLASAGELQKGNELALPSKYVNFLYLASHYEKLKGSPEDNEQKQLFVEQHKHYLDEIIEQISEFSKRVILADANLDKVLSAYNKHRDKPIREQAENIIHLFTLTNLGAPAAFKYFDTTIDRKRYTSTKEVLDATLIHQSITGLYETRIDLSQLGGDGGEAAAKGGTLGDQGSRGSDPLPEPRVTLTVEGIPTEFLVNTGAEHSVLTKPMGKMGSKRTVVAGATGSKVYPWTTKRLLKIGQKQVTHSFLVIPECPAPLLGRDLLTKLKAQIQFSTEGPQVTWEDRPAMCLVLNLEEEYRLHEKPVPPSIDPSWLQLFPMVWAEKAGMGLANQVPPVVVELKSDASPVAVRQYPMSKEAREGIRPHIQRFLDLGILVPCQSPWNTPLLPVKKPGTNDYRPVQDLREVNKRVQDIHPTVPNPYNLLSSLPPSHTWYSVLDLKDAFFCLKLHPNSQPLFAFEWRDPEKGNTGQLTWTRLPQGFKNSPTLFNEALHRDLASFRALNPQVVMLQYVDDLLVAAPTYRDCKEGTRRLLQELSKLGYRVSAKKAQLCREEVTYLGYLLKGGKRWLTPARKATVMKIPTPTTPRQVREFLGKAGFCRLFIPGFASLAAPLYPLTRPKVPFTWTEAHQEAFGRIKEALLSAPALALPDLTKPFALYVDEKEGVARGVLTQTLGPWRRPVAYLSKKLDPVASGWPTCLKAIAAVALLLKDADKLTLGQNVLVIAPHNLESIVRQPPDRWMTNARMTHYQSLLLNERVSFAPPAILNPATLLPVESDDTPIHICSEILAEETGTRPDLRDQPLPGVPAWYTDGSSFIMDGRRQAGAAIVDNKRTVWASNLPEGTSAQKAELIALTQALRLAEGKSINIYTDSRYAFATAHVHGAIYKQRGWLTSAGKDIKNKEEILALLEAIHLPKRVAIIHCPGHQRGTDPVATGNRKADEAAKQAAQSTRILTETTKNAGKRTADGSEFEKRTADGSEFESPKKKAKVE

SEQ ID NO: 6365 - protein, 2090 aa, synthetic construct
MPAAKRVKLDGGDKKYSIGLDIGTNSVGWAVITDEYKVPSKKFKVLGNTDRHSIKKNLIGALLFDSGETAEATRLKRTARRRYTRRKNRICYLQEIFSNEMAKVDDSFFHRLEESFLVEEDKKHERHPIFGNIVDEVAYHEKYPTIYHLRKKLVDSTDKADLRLIYLALAHMIKFRGHFLIEGDLNPDNSDVDKLFIQLVQTYNQLFEENPINASGVDAKAILSARLSKSRRLENLIAQLPGEKKNGLFGNLIALSLGLTPNFKSNFDLAEDAKLQLSKDTYDDDLDNLLAQIGDQYADLFLAAKNLSDAILLSDILRVNTEITKAPLSASMIKRYDEHHQDLTLLKALVRQQLPEKYKEIFFDQSKNGYAGYIDGGASQEEFYKFIKPILEKMDGTEELLVKLNREDLLRKQRTFDNGSIPHQIHLGELHAILRRQEDFYPFLKDNREKIEKILTFRIPYYVGPLARGNSRFAWMTRKSEETITPWNFEEVVDKGASAQSFIERMTNFDKNLPNEKVLPKHSLLYEYFTVYNELTKVKYVTEGMRKPAFLSGEQKKAIVDLLFKTNRKVTVKQLKEDYFKKIECFDSVEISGVEDRFNASLGTYHDLLKIIKDKDFLDNEENEDILEDIVLTLTLFEDREMIEERLKTYAHLFDDKVMKQLKRRRYTGWGRLSRKLINGIRDKQSGKTILDFLKSDGFANRNFMQLIHDDSLTFKEDIQKAQVSGQGDSLHEHIANLAGSPAIKKGILQTVKVVDELVKVMGRHKPENIVIEMARENQTTQKGQKNSRERMKRIEEGIKELGSQILKEHPVENTQLQNEKLYLYYLQNGRDMYVDQELDINRLSDYDVDHIVPQSFLKDDSIDNKVLTRSDKARGKSDNVPSEEVVKKMKNYWRQLLNAKLITQRKFDNLTKAERGGLSELDKAGFIKRQLVETRQITKHVAQILDSRMNTKYDENDKLIREVKVITLKSKLVSDFRKDFQFYKVREINNYHHAHDAYLNAVVGTALIKKYPKLESEFVYGDYKVYDVRKMIAKSEQEIGKATAKYFFYSNIMNFFKTEITLANGEIRKRPLIETNGETGEIVWDKGRDFATVRKVLSMPQVNIVKKTEVQTGGFSKESILPKRNSDKLIARKKDWDPKKYGGFDSPTVAYSVLVVAKVEKGKSKKLKSVKELLGITIMERSSFEKNPIDFLEAKGYKEVKKDLIIKLPKYSLFELENGRKRMLASAGELQKGNELALPSKYVNFLYLASHYEKLKGSPEDNEQKQLFVEQHKHYLDEIIEQISEFSKRVILADANLDKVLSAYNKHRDKPIREQAENIIHLFTLTNLGAPAAFKYFDTTIDRKRYTSTKEVLDATLIHQSITGLYETRIDLSQLGGDGGEAAAKGGTLNIEDEHRLHETSKEPDVSLGSTWLSDFPQAWAETGGMGLAVRQAPLIIPLKATSTPVSIKQYPMSQEARLGIKPHIQRLLDQGILVPCQSPWNTPLLPVKKPGTNDYRPVQDLREVNKRVEDIHPTVPNPYNLLSGLPPSHQWYTVLDLKDAFFCLRLHPTSQPLFAFEWRDPEMGISGQLTWTRLPQGFKNSPTLFDEALHRDLADFRIQHPDLILLQYVDDLLLAATSELDCQQGTRALLQTLGNLGYRASAKKAQICQKQVKYLGYLLKEGQRWLTEARKETVMGQPTPKTPRQLREFLGTAGFCRLWIPGFAEMAAPLYPLTKTGTLFNWGPDQQKAYQEIKQALLTAPALGLPDLTKPFELFVDEKQGYAKGVLTQKLGPWRRPVAYLSKKLDPVAAGWPPCLRMVAAIAVLTKDAGKLTMGQPLVILAPHAVEALVKQPPDRWLSNARMTHYQALLLDTDRVQFGPVVALNPATLLPLPEEGLQHNCLDILAEAHGTRPDLTDQPLPDADHTWYTDGSSLLQEGQRKAGAAVTTETEVIWAKALPAGTSAQRAELIALTQALKMAEGKKLNVYTDSRYAFATAHIHGEIYRRRGLLTSEGKEIKNKDEILALLKALFLPKRLSIIHCPGHQKGHSAEARGNRMADQAARKAAITETPDTSTLLAGKRTADGSEFEKRTADGSEFESPKKKAKVE

SEQ ID NO: 6366 - protein, 2082 aa, synthetic construct
MPAAKRVKLDGGDKKYSIGLDIGTNSVGWAVITDEYKVPSKKFKVLGNTDRHSIKKNLIGALLFDSGETAEATRLKRTARRRYTRRKNRICYLQEIFSNEMAKVDDSFFHRLEESFLVEEDKKHERHPIFGNIVDEVAYHEKYPTIYHLRKKLVDSTDKADLRLIYLALAHMIKFRGHFLIEGDLNPDNSDVDKLFIQLVQTYNQLFEENPINASGVDAKAILSARLSKSRRLENLIAQLPGEKKNGLFGNLIALSLGLTPNFKSNFDLAEDAKLQLSKDTYDDDLDNLLAQIGDQYADLFLAAKNLSDAILLSDILRVNTEITKAPLSASMIKRYDEHHQDLTLLKALVRQQLPEKYKEIFFDQSKNGYAGYIDGGASQEEFYKFIKPILEKMDGTEELLVKLNREDLLRKQRTFDNGSIPHQIHLGELHAILRRQEDFYPFLKDNREKIEKILTFRIPYYVGPLARGNSRFAWMTRKSEETITPWNFEEVVDKGASAQSFIERMTNFDKNLPNEKVLPKHSLLYEYFTVYNELTKVKYVTEGMRKPAFLSGEQKKAIVDLLFKTNRKVTVKQLKEDYFKKIECFDSVEISGVEDRFNASLGTYHDLLKIIKDKDFLDNEENEDILEDIVLTLTLFEDREMIEERLKTYAHLFDDKVMKQLKRRRYTGWGRLSRKLINGIRDKQSGKTILDFLKSDGFANRNFMQLIHDDSLTFKEDIQKAQVSGQGDSLHEHIANLAGSPAIKKGILQTVKVVDELVKVMGRHKPENIVIEMARENQTTQKGQKNSRERMKRIEEGIKELGSQILKEHPVENTQLQNEKLYLYYLQNGRDMYVDQELDINRLSDYDVDHIVPQSFLKDDSIDNKVLTRSDKARGKSDNVPSEEVVKKMKNYWRQLLNAKLITQRKFDNLTKAERGGLSELDKAGFIKRQLVETRQITKHVAQILDSRMNTKYDENDKLIREVKVITLKSKLVSDFRKDFQFYKVREINNYHHAHDAYLNAVVGTALIKKYPKLESEFVYGDYKVYDVRKMIAKSEQEIGKATAKYFFYSNIMNFFKTEITLANGEIRKRPLIETNGETGEIVWDKGRDFATVRKVLSMPQVNIVKKTEVQTGGFSKESILPKRNSDKLIARKKDWDPKKYGGFDSPTVAYSVLVVAKVEKGKSKKLKSVKELLGITIMERSSFEKNPIDFLEAKGYKEVKKDLIIKLPKYSLFELENGRKRMLASAGELQKGNELALPSKYVNFLYLASHYEKLKGSPEDNEQKQLFVEQHKHYLDEIIEQISEFSKRVILADANLDKVLSAYNKHRDKPIREQAENIIHLFTLTNLGAPAAFKYFDTTIDRKRYTSTKEVLDATLIHQSITGLYETRIDLSQLGGDGGEAAAKGGLDDEYRLYSPLVKPDQNIQFWLEQFPQAWAETAGMGLAKQVPPQVIQLKASATPVSVRQYPLSKEAQEGIRPHVQRLIQQGILVPVQSPWNTPLLPVRKPGTNDYRPVQDLREVNKRVQDIHPTVPNPYNLLCALPPQRSWYTVLDLKDAFFCLRLHPTSQPLFAFEWRDPGTGRTGQLTWTRLPQGFKNSPTIFNEALHRDLANFRIQHPQVTLLQYVDDLLLAGATKQDCLEGTKALLLELSDLGYRASAKKAQICRREVTYLGYSLRDGQRWLTEARKKTVVQIPAPTTAKQVREFLGKAGFCRLFIPGFATLAAPLYPLTKPKGEFSWAPEHQKAFDAIKKALLSAPALALPDVTKPFTLYVDERKGVARGVLTQTLGPWRRPVAYLSKKLDPVASGWPVCLKAIAAVAILVKDADKLTLGQNITVIAPHALENIVRQPPDRWMTNARMTHYQSLLLTERVTFAPPAALNPATLLPEETDEPVTHDCHQLLIEETGVRKDLTDIPLTGEVLTWFTDGSSYVVEGKRMAGAAVVDGTRTIWASSLPEGTSAQKAELMALTQALRLAEGKSINIYTDSRYAFATAHVHGAIYKQRGWLTSAGREIKNKEEILSLLEALHLPKRLAIIHCPGHQKAKDPISRGNQMADRVAKQAAQGVNLLPAGKRTADGSEFEKRTADGSEFESPKKKAKVE

SEQ ID NO: 6367 - protein, 2084 aa, synthetic construct
MPAAKRVKLDGGDKKYSIGLDIGTNSVGWAVITDEYKVPSKKFKVLGNTDRHSIKKNLIGALLFDSGETAEATRLKRTARRRYTRRKNRICYLQEIFSNEMAKVDDSFFHRLEESFLVEEDKKHERHPIFGNIVDEVAYHEKYPTIYHLRKKLVDSTDKADLRLIYLALAHMIKFRGHFLIEGDLNPDNSDVDKLFIQLVQTYNQLFEENPINASGVDAKAILSARLSKSRRLENLIAQLPGEKKNGLFGNLIALSLGLTPNFKSNFDLAEDAKLQLSKDTYDDDLDNLLAQIGDQYADLFLAAKNLSDAILLSDILRVNTEITKAPLSASMIKRYDEHHQDLTLLKALVRQQLPEKYKEIFFDQSKNGYAGYIDGGASQEEFYKFIKPILEKMDGTEELLVKLNREDLLRKQRTFDNGSIPHQIHLGELHAILRRQEDFYPFLKDNREKIEKILTFRIPYYVGPLARGNSRFAWMTRKSEETITPWNFEEVVDKGASAQSFIERMTNFDKNLPNEKVLPKHSLLYEYFTVYNELTKVKYVTEGMRKPAFLSGEQKKAIVDLLFKTNRKVTVKQLKEDYFKKIECFDSVEISGVEDRFNASLGTYHDLLKIIKDKDFLDNEENEDILEDIVLTLTLFEDREMIEERLKTYAHLFDDKVMKQLKRRRYTGWGRLSRKLINGIRDKQSGKTILDFLKSDGFANRNFMQLIHDDSLTFKEDIQKAQVSGQGDSLHEHIANLAGSPAIKKGILQTVKVVDELVKVMGRHKPENIVIEMARENQTTQKGQKNSRERMKRIEEGIKELGSQILKEHPVENTQLQNEKLYLYYLQNGRDMYVDQELDINRLSDYDVDHIVPQSFLKDDSIDNKVLTRSDKARGKSDNVPSEEVVKKMKNYWRQLLNAKLITQRKFDNLTKAERGGLSELDKAGFIKRQLVETRQITKHVAQILDSRMNTKYDENDKLIREVKVITLKSKLVSDFRKDFQFYKVREINNYHHAHDAYLNAVVGTALIKKYPKLESEFVYGDYKVYDVRKMIAKSEQEIGKATAKYFFYSNIMNFFKTEITLANGEIRKRPLIETNGETGEIVWDKGRDFATVRKVLSMPQVNIVKKTEVQTGGFSKESILPKRNSDKLIARKKDWDPKKYGGFDSPTVAYSVLVVAKVEKGKSKKLKSVKELLGITIMERSSFEKNPIDFLEAKGYKEVKKDLIIKLPKYSLFELENGRKRMLASAGELQKGNELALPSKYVNFLYLASHYEKLKGSPEDNEQKQLFVEQHKHYLDEIIEQISEFSKRVILADANLDKVLSAYNKHRDKPIREQAENIIHLFTLTNLGAPAAFKYFDTTIDRKRYTSTKEVLDATLIHQSITGLYETRIDLSQLGGDGGEAAAKGGTLQLDDEYRLYSPLVKPDQNIQFWLEQFPQAWAETAGMGLAKQVPPQVIQLKASATPVSVRQYPLSKEAQEGIRPHVQRLIQQGILVPVQSPWNTPLLPVRKPGTNDYRPVQDLREVNKRVQDIHPTVPNPYNLLCALPPQRSWYTVLDLKDAFFCLRLHPTSQPLFAFEWRDPGTGRTGQLTWTRLPQGFKNSPTIFDEALHRDLANFRIQHPQVTLLQYVDDLLLAGATKQDCLEGTKALLLELSDLGYRASAKKAQICRREVTYLGYSLRDGQRWLTEARKKTVVQIPAPTTAKQVREFLGTAGFCRLWIPGFATLAAPLYPLTKEKGEFSWAPEHQKAFDAIKKALLSAPALALPDVTKPFTLYVDERKGVARGVLTQTLGPWRRPVAYLSKKLDPVASGWPVCLKAIAAVAILVKDADKLTLGQNITVIAPHALENIVRQPPDRWMTNARMTHYQSLLLTERVTFAPPAALNPATLLPEETDEPVTHDCHQLLIEETGVRKDLTDIPLTGEVLTWFTDGSSYVVEGKRMAGAAVVDGTRTIWASSLPEGTSAQKAELMALTQALRLAEGKSINIYTDSRYAFATAHVHGAIYKQRGLLTSAGREIKNKEEILSLLEALHLPKRLAIIHCPGHQKAKDPISRGNQMADRVAKQAAQGVNLLAGKRTADGSEFEKRTADGSEFESPKKKAKVE

SEQ ID NO: 6368 - protein, 2082 aa, synthetic construct; identical to SEQ ID NO: 6366

SEQ ID NO: 6369 - protein, 2081 aa, synthetic construct
MPAAKRVKLDGGDKKYSIGLDIGTNSVGWAVITDEYKVPSKKFKVLGNTDRHSIKKNLIGALLFDSGETAEATRLKRTARRRYTRRKNRICYLQEIFSNEMAKVDDSFFHRLEESFLVEEDKKHERHPIFGNIVDEVAYHEKYPTIYHLRKKLVDSTDKADLRLIYLALAHMIKFRGHFLIEGDLNPDNSDVDKLFIQLVQTYNQLFEENPINASGVDAKAILSARLSKSRRLENLIAQLPGEKKNGLFGNLIALSLGLTPNFKSNFDLAEDAKLQLSKDTYDDDLDNLLAQIGDQYADLFLAAKNLSDAILLSDILRVNTEITKAPLSASMIKRYDEHHQDLTLLKALVRQQLPEKYKEIFFDQSKNGYAGYIDGGASQEEFYKFIKPILEKMDGTEELLVKLNREDLLRKQRTFDNGSIPHQIHLGELHAILRRQEDFYPFLKDNREKIEKILTFRIPYYVGPLARGNSRFAWMTRKSEETITPWNFEEVVDKGASAQSFIERMTNFDKNLPNEKVLPKHSLLYEYFTVYNELTKVKYVTEGMRKPAFLSGEQKKAIVDLLFKTNRKVTVKQLKEDYFKKIECFDSVEISGVEDRFNASLGTYHDLLKIIKDKDFLDNEENEDILEDIVLTLTLFEDREMIEERLKTYAHLFDDKVMKQLKRRRYTGWGRLSRKLINGIRDKQSGKTILDFLKSDGFANRNFMQLIHDDSLTFKEDIQKAQVSGQGDSLHEHIANLAGSPAIKKGILQTVKVVDELVKVMGRHKPENIVIEMARENQTTQKGQKNSRERMKRIEEGIKELGSQILKEHPVENTQLQNEKLYLYYLQNGRDMYVDQELDINRLSDYDVDHIVPQSFLKDDSIDNKVLTRSDKARGKSDNVPSEEVVKKMKNYWRQLLNAKLITQRKFDNLTKAERGGLSELDKAGFIKRQLVETRQITKHVAQILDSRMNTKYDENDKLIREVKVITLKSKLVSDFRKDFQFYKVREINNYHHAHDAYLNAVVGTALIKKYPKLESEFVYGDYKVYDVRKMIAKSEQEIGKATAKYFFYSNIMNFFKTEITLANGEIRKRPLIETNGETGEIVWDKGRDFATVRKVLSMPQVNIVKKTEVQTGGFSKESILPKRNSDKLIARKKDWDPKKYGGFDSPTVAYSVLVVAKVEKGKSKKLKSVKELLGITIMERSSFEKNPIDFLEAKGYKEVKKDLIIKLPKYSLFELENGRKRMLASAGELQKGNELALPSKYVNFLYLASHYEKLKGSPEDNEQKQLFVEQHKHYLDEIIEQISEFSKRVILADANLDKVLSAYNKHRDKPIREQAENIIHLFTLTNLGAPAAFKYFDTTIDRKRYTSTKEVLDATLIHQSITGLYETRIDLSQLGGDGGEAAAKGGIPWLMKKPLQLTTLVPLQEYEERLLKQTMLTGSYKEKLQSLFLKYDALWQHWENQVGHRRIKPHHIATGTVNPRPQKQYPINPKAKASIQTVINDLLKQGVLIQQNSIMNTPVYPVPKPDGKWRMVLDYREVNKTIPLIAAQNQHSAGILSSIFRGKYKTTLDLSNGFWAHSITPESYWLTAFTWLGQQYCWTRLPQGFLNSPALFNADVVDLLKEVPNVQVYVDDIYISHDDPREHLEQLEKVFSLLLNAGYVVSLKKSEIAQHEVEFLGFNITKEGRGLTETFKQKLLNITPPRDLKQLQSILGLLNFARNFIPNFSELVKPLYNIIATAPGKYITWTTDNSQQLQNIISMLNSAENLEERNPEVRLIMKVNTSPSAGYIRFYNEFAKRPIMYLNYVYTKAEVKFTNTEKLLTTIHKGLIKALDLGMGQEILVYSPIVSMTKIQKTPLPERKALPIRWITWMSYLEDPRIQFHYDKTLPELQQVPTVTDDIIAKIKHPSEFSMVFYTDGSAIKHPNVNKSHNAGMGIAQVQFKPEFTVINTWSIPLGDHTAQLAEVAAVEFACKKALKIDGPVLIVTDSFYVAESVNKELPYWQSNGFFNNKKKPLKHVSKWKSIADCIQLKPDIIIIHEKGHQPTASTFHTEGNNLADKLATQGSYVVNAGKRTADGSEFEKRTADGSEFESPKKKAKVE

SEQ ID NO: 6370 - protein, 2097 aa, synthetic construct
MPAAKRVKLDGGDKKYSIGLDIGTNSVGWAVITDEYKVPSKKFKVLGNTDRHSIKKNLIGALLFDSGETAEATRLKRTARRRYTRRKNRICYLQEIFSNEMAKVDDSFFHRLEESFLVEEDKKHERHPIFGNIVDEVAYHEKYPTIYHLRKKLVDSTDKADLRLIYLALAHMIKFRGHFLIEGDLNPDNSDVDKLFIQLVQTYNQLFEENPINASGVDAKAILSARLSKSRRLENLIAQLPGEKKNGLFGNLIALSLGLTPNFKSNFDLAEDAKLQLSKDTYDDDLDNLLAQIGDQYADLFLAAKNLSDAILLSDILRVNTEITKAPLSASMIKRYDEHHQDLTLLKALVRQQLPEKYKEIFFDQSKNGYAGYIDGGASQEEFYKFIKPILEKMDGTEELLVKLNREDLLRKQRTFDNGSIPHQIHLGELHAILRRQEDFYPFLKDNREKIEKILTFRIPYYVGPLARGNSRFAWMTRKSEETITPWNFEEVVDKGASAQSFIERMTNFDKNLPNEKVLPKHSLLYEYFTVYNELTKVKYVTEGMRKPAFLSGEQKKAIVDLLFKTNRKVTVKQLKEDYFKKIECFDSVEISGVEDRFNASLGTYHDLLKIIKDKDFLDNEENEDILEDIVLTLTLFEDREMIEERLKTYAHLFDDKVMKQLKRRRYTGWGRLSRKLINGIRDKQSGKTILDFLKSDGFANRNFMQLIHDDSLTFKEDIQKAQVSGQGDSLHEHIANLAGSPAIKKGILQTVKVVDELVKVMGRHKPENIVIEMARENQTTQKGQKNSRERMKRIEEGIKELGSQILKEHPVENTQLQNEKLYLYYLQNGRDMYVDQELDINRLSDYDVDHIVPQSFLKDDSIDNKVLTRSDKARGKSDNVPSEEVVKKMKNYWRQLLNAKLITQRKFDNLTKAERGGLSELDKAGFIKRQLVETRQITKHVAQILDSRMNTKYDENDKLIREVKVITLKSKLVSDFRKDFQFYKVREINNYHHAHDAYLNAVVGTALIKKYPKLESEFVYGDYKVYDVRKMIAKSEQEIGKATAKYFFYSNIMNFFKTEITLANGEIRKRPLIETNGETGEIVWDKGRDFATVRKVLSMPQVNIVKKTEVQTGGFSKESILPKRNSDKLIARKKDWDPKKYGGFDSPTVAYSVLVVAKVEKGKSKKLKSVKELLGITIMERSSFEKNPIDFLEAKGYKEVKKDLIIKLPKYSLFELENGRKRMLASAGELQKGNELALPSKYVNFLYLASHYEKLKGSPEDNEQKQLFVEQHKHYLDEIIEQISEFSKRVILADANLDKVLSAYNKHRDKPIREQAENIIHLFTLTNLGAPAAFKYFDTTIDRKRYTSTKEVLDATLIHQSITGLYETRIDLSQLGGDGGEAAAKEAAAKGGTAPLEEEYRLFLEAPIQNVTLLEQWKREIPKVWAEINPPGLASTQAPIHVQLLSTALPVRVRQYPITLEAKRSLRETIRKFRAAGILRPVHSPWNTPLLPVRKSGTSEYRMVQDLREVNKRVETIHPTVPNPYTLLSLLPPDRIWYSVLDLKDAFFCIPLAPESQLIFAFEWADAEEGESGQLTWTRLPQGFKNSPTLFNEALNRDLQGFRLDHPSVSLLQYVDDLLIAADTQAACLSATRDLLMTLAELGYRVSGKKAQLCQEEVTYLGFKIHKGSRSLSNSRTQAILQIPVPKTKRQVREFLGKIGYCRLFIPGFAELAQPLYAATRPGNDPLVWGEKEEEAFQSLKLALTQPPALALPSLDKPFQLFVEETSGAAKGVLTQALGPWKRPVAYLSKRLDPVAAGWPRCLRAIAAAALLTREASKLTFGQDIEITSSHNLESLLRSPPDKWLTNARITQYQVLLLDPPRVRFKQTAALNPATLLPETDDTLPIHHCLDTLDSLTSTRPDLTDQPLAQAEATLFTDGSSYIRDGKRYAGAAVVTLDSVIWAEPLPIGTSAQKAELIALTKALEWSKDKSVNIYTDSRYAFATLHVHGMIYRERGWLTAGGKAIKNAPEILALLTAVWLPKRVAVMHCKGHQKDDAPTSTGNRRADEVAREVAIRPLSTQATISAGKRTADGSEFEKRTADGSEFESPKKKAKVE

SEQ ID NO: 6371 - protein, 2172 aa, synthetic construct
MPAAKRVKLDGGDKKYSIGLDIGTNSVGWAVITDEYKVPSKKFKVLGNTDRHSIKKNLIGALLFDSGETAEATRLKRTARRRYTRRKNRICYLQEIFSNEMAKVDDSFFHRLEESFLVEEDKKHERHPIFGNIVDEVAYHEKYPTIYHLRKKLVDSTDKADLRLIYLALAHMIKFRGHFLIEGDLNPDNSDVDKLFIQLVQTYNQLFEENPINASGVDAKAILSARLSKSRRLENLIAQLPGEKKNGLFGNLIALSLGLTPNFKSNFDLAEDAKLQLSKDTYDDDLDNLLAQIGDQYADLFLAAKNLSDAILLSDILRVNTEITKAPLSASMIKRYDEHHQDLTLLKALVRQQLPEKYKEIFFDQSKNGYAGYIDGGASQEEFYKFIKPILEKMDGTEELLVKLNREDLLRKQRTFDNGSIPHQIHLGELHAILRRQEDFYPFLKDNREKIEKILTFRIPYYVGPLARGNSRFAWMTRKSEETITPWNFEEVVDKGASAQSFIERMTNFDKNLPNEKVLPKHSLLYEYFTVYNELTKVKYVTEGMRKPAFLSGEQKKAIVDLLFKTNRKVTVKQLKEDYFKKIECFDSVEISGVEDRFNASLGTYHDLLKIIKDKDFLDNEENEDILEDIVLTLTLFEDREMIEERLKTYAHLFDDKVMKQLKRRRYTGWGRLSRKLINGIRDKQSGKTILDFLKSDGFANRNFMQLIHDDSLTFKEDIQKAQVSGQGDSLHEHIANLAGSPAIKKGILQTVKVVDELVKVMGRHKPENIVIEMARENQTTQKGQKNSRERMKRIEEGIKELGSQILKEHPVENTQLQNEKLYLYYLQNGRDMYVDQELDINRLSDYDVDHIVPQSFLKDDSIDNKVLTRSDKARGKSDNVPSEEVVKKMKNYWRQLLNAKLITQRKFDNLTKAERGGLSELDKAGFIKRQLVETRQITKHVAQILDSRMNTKYDENDKLIREVKVITLKSKLVSDFRKDFQFYKVREINNYHHAHDAYLNAVVGTALIKKYPKLESEFVYGDYKVYDVRKMIAKSEQEIGKATAKYFFYSNIMNFFKTEITLANGEIRKRPLIETNGETGEIVWDKGRDFATVRKVLSMPQVNIVKKTEVQTGGFSKESILPKRNSDKLIARKKDWDPKKYGGFDSPTVAYSVLVVAKVEKGKSKKLKSVKELLGITIMERSSFEKNPIDFLEAKGYKEVKKDLIIKLPKYSLFELENGRKRMLASAGELQKGNELALPSKYVNFLYLASHYEKLKGSPEDNEQKQLFVEQHKHYLDEIIEQISEFSKRVILADANLDKVLSAYNKHRDKPIREQAENIIHLFTLTNLGAPAAFKYFDTTIDRKRYTSTKEVLDATLIHQSITGLYETRIDLSQLGGDGGEAAAKEAAAKGGMDLLKPLTVERKGVKIKGYWNSQADITCVPKDLLQGEEPVRQQNVTTIHGTQEGDVYYVNLKIDGRRINTEVIGTTLDYAIITPGDVPWILKKPLELTIKLDLEEQQGTLLNNSILSKKGKEELKQLFEKYSALWQSWENQVGHRRIRPHKIATGTVKPTPQKQYHINPKAKPDIQIVINDLLKQGVLIQKESTMNTPVYPVPKPNGRWRMVLDYRAVNKVTPLIAVQNQHSYGILGSLFKGRYKTTIDLSNGFWAHPIVPEDYWITAFTWQGKQYCWTVLPQGFLNSPGLFTGDVVDLLQGIPNVEVYVDDVYISHDSEKEHLEYLDILFNRLKEAGYIISLKKSNIANSIVDFLGFQITNEGRGLTDTFKEKLENITAPTTLKQLQSILGLLNFARNFIPDFTELIAPLYALIPKSTKNYVPWQIEHSTTLETLITKLNGAEYLQGRKGDKTLIMKVNASYTTGYIRYYNEGEKKPISYVSIVFSKTELKFTELEKLLTTVHKGLLKALDLSMGQNIHVYSPIVSMQNIQKTPQTAKKALASRWLSWLSYLEDPRIRFFYDPQMPALKDLPAVDTGKDNKKHPSNFQHIFYTDGSAITSPTKEGHLNAGMGIVYFINKDGNLQKQQEWSISLGNHTAQFAEIAAFEFALKKCLPLGGNILVVTDSNYVAKAYNEELDVWASNGFVNNRKKPLKHISKWKSVADLKRLRPDVVVTHEPGHQKLDSSPHAYGNNLADQLATQASFKVHAGKRTADGSEFEKRTADGSEFESPKKKAKVE

SEQ ID NO: 6372 - protein, 2086 aa, synthetic construct
MPAAKRVKLDGGDKKYSIGLDIGTNSVGWAVITDEYKVPSKKFKVLGNTDRHSIKKNLIGALLFDSGETAEATRLKRTARRRYTRRKNRICYLQEIFSNEMAKVDDSFFHRLEESFLVEEDKKHERHPIFGNIVDEVAYHEKYPTIYHLRKKLVDSTDKADLRLIYLALAHMIKFRGHFLIEGDLNPDNSDVDKLFIQLVQTYNQLFEENPINASGVDAKAILSARLSKSRRLENLIAQLPGEKKNGLFGNLIALSLGLTPNFKSNFDLAEDAKLQLSKDTYDDDLDNLLAQIGDQYADLFLAAKNLSDAILLSDILRVNTEITKAPLSASMIKRYDEHHQDLTLLKALVRQQLPEKYKEIFFDQSKNGYAGYIDGGASQEEFYKFIKPILEKMDGTEELLVKLNREDLLRKQRTFDNGSIPHQIHLGELHAILRRQEDFYPFLKDNREKIEKILTFRIPYYVGPLARGNSRFAWMTRKSEETITPWNFEEVVDKGASAQSFIERMTNFDKNLPNEKVLPKHSLLYEYFTVYNELTKVKYVTEGMRKPAFLSGEQKKAIVDLLFKTNRKVTVKQLKEDYFKKIECFDSVEISGVEDRFNASLGTYHDLLKIIKDKDFLDNEENEDILEDIVLTLTLFEDREMIEERLKTYAHLFDDKVMKQLKRRRYTGWGRLSRKLINGIRDKQSGKTILDFLKSDGFANRNFMQLIHDDSLTFKEDIQKAQVSGQGDSLHEHIANLAGSPAIKKGILQTVKVVDELVKVMGRHKPENIVIEMARENQTTQKGQKNSRERMKRIEEGIKELGSQILKEHPVENTQLQNEKLYLYYLQNGRDMYVDQELDINRLSDYDVDHIVPQSFLKDDSIDNKVLTRSDKARGKSDNVPSEEVVKKMKNYWRQLLNAKLITQRKFDNLTKAERGGLSELDKAGFIKRQLVETRQITKHVAQILDSRMNTKYDENDKLIREVKVITLKSKLVSDFRKDFQFYKVREINNYHHAHDAYLNAVVGTALIKKYPKLESEFVYGDYKVYDVRKMIAKSEQEIGKATAKYFFYSNIMNFFKTEITLANGEIRKRPLIETNGETGEIVWDKGRDFATVRKVLSMPQVNIVKKTEVQTGGFSKESILPKRNSDKLIARKKDWDPKKYGGFDSPTVAYSVLVVAKVEKGKSKKLKSVKELLGITIMERSSFEKNPIDFLEAKGYKEVKKDLIIKLPKYSLFELENGRKRMLASAGELQKGNELALPSKYVNFLYLASHYEKLKGSPEDNEQKQLFVEQHKHYLDEIIEQISEFSKRVILADANLDKVLSAYNKHRDKPIREQAENIIHLFTLTNLGAPAAFKYFDTTIDRKRYTSTKEVLDATLIHQSITGLYETRIDLSQLGGDGGEAAAKEAAAKGGVPWILKKPLELTIKLDLEEQQGTLLNNSILSKKGKEELKQLFEKYSALWQSWENQVGHRRIRPHKIATGTVKPTPQKQYHINPKAKPDIQIVINDLLKQGVLIQKESTMNTPVYPVPKPNGRWRMVLDYRAVNKVTPLIAVQNQHSYGILGSLFKGRYKTTIDLSNGFWAHPIVPEDYWITAFTWQGKQYCWTVLPQGFLNSPGLFTGDVVDLLQGIPNVEVYVDDVYISHDSEKEHLEYLDILFNRLKEAGYIISLKKSNIANSIVDFLGFQITNEGRGLTDTFKEKLENITAPTTLKQLQSILGLLNFARNFIPDFTELIAPLYALIPKSTKNYVPWQIEHSTTLETLITKLNGAEYLQGRKGDKTLIMKVNASYTTGYIRYYNEGEKKPISYVSIVFSKTELKFTELEKLLTTVHKGLLKALDLSMGQNIHVYSPIVSMQNIQKTPQTAKKALASRWLSWLSYLEDPRIRFFYDPQMPALKDLPAVDTGKDNKKHPSNFQHIFYTDGSAITSPTKEGHLNAGMGIVYFINKDGNLQKQQEWSISLGNHTAQFAEIAAFEFALKKCLPLGGNILVVTDSNYVAKAYNEELDVWASNGFVNNRKKPLKHISKWKSVADLKRLRPDVVVTHEPGHQKLDSSPHAYGNNLADQLATQASFKVHAGKRTADGSEFEKRTADGSEFESPKKKAKVE

SEQ ID NO: 6373 - protein, 2172 aa, synthetic construct
MPAAKRVKLDGGDKKYSIGLDIGTNSVGWAVITDEYKVPSKKFKVLGNTDRHSIKKNLIGALLFDSGETAEATRLKRTARRRYTRRKNRICYLQEIFSNEMAKVDDSFFHRLEESFLVEEDKKHERHPIFGNIVDEVAYHEKYPTIYHLRKKLVDSTDKADLRLIYLALAHMIKFRGHFLIEGDLNPDNSDVDKLFIQLVQTYNQLFEENPINASGVDAKAILSARLSKSRRLENLIAQLPGEKKNGLFGNLIALSLGLTPNFKSNFDLAEDAKLQLSKDTYDDDLDNLLAQIGDQYADLFLAAKNLSDAILLSDILRVNTEITKAPLSASMIKRYDEHHQDLTLLKALVRQQLPEKYKEIFFDQSKNGYAGYIDGGASQEEFYKFIKPILEKMDGTEELLVKLNREDLLRKQRTFDNGSIPHQIHLGELHAILRRQEDFYPFLKDNREKIEKILTFRIPYYVGPLARGNSRFAWMTRKSEETITPWNFEEVVDKGASAQSFIERMTNFDKNLPNEKVLPKHSLLYEYFTVYNELTKVKYVTEGMRKPAFLSGEQKKAIVDLLFKTNRKVTVKQLKEDYFKKIECFDSVEISGVEDRFNASLGTYHDLLKIIKDKDFLDNEENEDILEDIVLTLTLFEDREMIEERLKTYAHLFDDKVMKQLKRRRYTGWGRLSRKLINGIRDKQSGKTILDFLKSDGFANRNFMQLIHDDSLTFKEDIQKAQVSGQGDSLHEHIANLAGSPAIKKGILQTVKVVDELVKVMGRHKPENIVIEMARENQTTQKGQKNSRERMKRIEEGIKELGSQILKEHPVENTQLQNEKLYLYYLQNGRDMYVDQELDINRLSDYDVDHIVPQSFLKDDSIDNKVLTRSDKARGKSDNVPSEEVVKKMKNYWRQLLNAKLITQRKFDNLTKAERGGLSELDKAGFIKRQLVETRQITKHVAQILDSRMNTKYDENDKLIREVKVITLKSKLVSDFRKDFQFYKVREINNYHHAHDAYLNAVVGTALIKKYPKLESEFVYGDYKVYDVRKMIAKSEQEIGKATAKYFFYSNIMNFFKTEITLANGEIRKRPLIETNGETGEIVWDKGRDFATVRKVLSMPQVNIVKKTEVQTGGFSKESILPKRNSDKLIARKKDWDPKKYGGFDSPTVAYSVLVVAKVEKGKSKKLKSVKELLGITIMERSSFEKNPIDFLEAKGYKEVKKDLIIKLPKYSLFELENGRKRMLASAGELQKGNELALPSKYVNFLYLASHYEKLKGSPEDNEQKQLFVEQHKHYLDEIIEQISEFSKRVILADANLDKVLSAYNKHRDKPIREQAENIIHLFTLTNLGAPAAFKYFDTTIDRKRYTSTKEVLDATLIHQSITGLYETRIDLSQLGGDGGEAAAKEAAAKGGMDLLKPLTVERKGVKIKGYWNSQADITCVPKDLLQGEEPVRQQNVTTIHGTQEGDVYYVNLKIDGRRINTEVIGTTLDYAIITPGDVPWILKKPLELTIKLDLEEQQGTLLNNSILSKKGKEELKQLFEKYSALWQSWENQVGHRRIRPHKIATGTVKPTPQKQYHINPKAKPDIQIVINDLLKQGVLIQKESTMNTPVYPVPKPNGRWRMVLDYRAVNKVTPLIAVQNQHSYGILGSLFKGRYKTTIDLSNGFWAHPIVPEDYWITAFTWQGKQYCWTVLPQGFLNSPGLFNGDVVDLLQGIPNVEVYVDDVYISHDSEKEHLEYLDILFNRLKEAGYIISLKKSNIANSIVDFLGFQITNEGRGLTDTFKEKLENITAPTTLKQLQSILGLLNFARNFIPDFTELIAPLYALIPKSPKNYVPWQIEHSTTLETLITKLNGAEYLQGRKGDKTLIMKVNASYTTGYIRYYNEGEKKPISYVSIVFSKTELKFTELEKLLTTVHKGLLKALDLSMGQNIHVYSPIVSMQNIQKTPQTAKKALASRWLSWLSYLEDPRIRFFYDPQMPALKDLPAVDTGKDNKKHPSNFQHIFYTDGSAITSPTKEGHLNAGMGIVYFINKDGNLQKQQEWSISLGNHTAQFAEIAAFEFALKKCLPLGGNILVVTDSNYVAKAYNEELDVWASNGFVNNRKKPLKHISKWKSVADLKRLRPDVVVTHEPGHQKLDSSPHAYGNNLADQLATQASFKVHAGKRTADGSEFEKRTADGSEFESPKKKAKVE

SEQ ID NO: 6374 - protein, 2093 aa, synthetic construct
MPAAKRVKLDGGDKKYSIGLDIGTNSVGWAVITDEYKVPSKKFKVLGNTDRHSIKKNLIGALLFDSGETAEATRLKRTARRRYTRRKNRICYLQEIFSNEMAKVDDSFFHRLEESFLVEEDKKHERHPIFGNIVDEVAYHEKYPTIYHLRKKLVDSTDKADLRLIYLALAHMIKFRGHFLIEGDLNPDNSDVDKLFIQLVQTYNQLFEENPINASGVDAKAILSARLSKSRRLENLIAQLPGEKKNGLFGNLIALSLGLTPNFKSNFDLAEDAKLQLSKDTYDDDLDNLLAQIGDQYADLFLAAKNLSDAILLSDILRVNTEITKAPLSASMIKRYDEHHQDLTLLKALVRQQLPEKYKEIFFDQSKNGYAGYIDGGASQEEFYKFIKPILEKMDGTEELLVKLNREDLLRKQRTFDNGSIPHQIHLGELHAILRRQEDFYPFLKDNREKIEKILTFRIPYYVGPLARGNSRFAWMTRKSEETITPWNFEEVVDKGASAQSFIERMTNFDKNLPNEKVLPKHSLLYEYFTVYNELTKVKYVTEGMRKPAFLSGEQKKAIVDLLFKTNRKVTVKQLKEDYFKKIECFDSVEISGVEDRFNASLGTYHDLLKIIKDKDFLDNEENEDILEDIVLTLTLFEDREMIEERLKTYAHLFDDKVMKQLKRRRYTGWGRLSRKLINGIRDKQSGKTILDFLKSDGFANRNFMQLIHDDSLTFKEDIQKAQVSGQGDSLHEHIANLAGSPAIKKGILQTVKVVDELVKVMGRHKPENIVIEMARENQTTQKGQKNSRERMKRIEEGIKELGSQILKEHPVENTQLQNEKLYLYYLQNGRDMYVDQELDINRLSDYDVDHIVPQSFLKDDSIDNKVLTRSDKARGKSDNVPSEEVVKKMKNYWRQLLNAKLITQRKFDNLTKAERGGLSELDKAGFIKRQLVETRQITKHVAQILDSRMNTKYDENDKLIREVKVITLKSKLVSDFRKDFQFYKVREINNYHHAHDAYLNAVVGTALIKKYPKLESEFVYGDYKVYDVRKMIAKSEQEIGKATAKYFFYSNIMNFFKTEITLANGEIRKRPLIETNGETGEIVWDKGRDFATVRKVLSMPQVNIVKKTEVQTGGFSKESILPKRNSDKLIARKKDWDPKKYGGFDSPTVAYSVLVVAKVEKGKSKKLKSVKELLGITIMERSSFEKNPIDFLEAKGYKEVKKDLIIKLPKYSLFELENGRKRMLASAGELQKGNELALPSKYVNFLYLASHYEKLKGSPEDNEQKQLFVEQHKHYLDEIIEQISEFSKRVILADANLDKVLSAYNKHRDKPIREQAENIIHLFTLTNLGAPAAFKYFDTTIDRKRYTSTKEVLDATLIHQSITGLYETRIDLSQLGGDGGEAAAKEAAAKGGVLNLEEEYRLHEKPVPSSIDPSWLQLFPTVWAERAGMGLANQVPPVVVELRSGASPVAVRQYPMSKEAREGIRPHIQKFLDLGVLVPCRSPWNTPLLPVKKPGTNDYRPVQDLREINKRVQDIHPTVPNPYNLLSSLPPSYTWYSVLDLKDAFFCLRLHPNSQPLFAFEWKDPEKGNTGQLTWTRLPQGFKNSPTLFNEALHRDLAPFRALNPQVVLLQYVDDLLVAAPTYEDCKKGTQKLLQELSKLGYRVSAKKAQLCQREVTYLGYLLKEGKRWLTPARKATVMKIPVPTTPRQVREFLGKAGFCRLFIPGFASLAAPLYPLTKPSIPFIWTEEHQQAFDHIKKALLSAPALALPDLTKPFTLYIDERAGVARGVLTQTLGPWRRPVAYLSKKLDPVASGWPTCLKAVAAVALLLKDADKLTLGQNVTVIASHSLESIVRQPPDRWMTNARMTHYQSLLLNERVSFAPPAVLNPATLLPVESEATPVHRCSEILAEETGTRRDLEDQPLPGVPTWYTDGSSFITEGKRRAGAPIVDGKRTVWASSLPEGTSAQKAELVALTQALRLAEGKNINIYTDSRYAFATAHIHGAIYKQRGWLTSAGKDIKNKEEILALLEAIHLPRRVAIIHCPGHQRGSNPVATGNRRADEAAKQAALSTRVLAGTTKPAGKRTADGSEFEKRTADGSEFESPKKKAKVE

SEQ ID NO: 6375 - protein, 2126 aa, synthetic construct
MPAAKRVKLDGGDKKYSIGLDIGTNSVGWAVITDEYKVPSKKFKVLGNTDRHSIKKNLIGALLFDSGETAEATRLKRTARRRYTRRKNRICYLQEIFSNEMAKVDDSFFHRLEESFLVEEDKKHERHPIFGNIVDEVAYHEKYPTIYHLRKKLVDSTDKADLRLIYLALAHMIKFRGHFLIEGDLNPDNSDVDKLFIQLVQTYNQLFEENPINASGVDAKAILSARLSKSRRLENLIAQLPGEKKNGLFGNLIALSLGLTPNFKSNFDLAEDAKLQLSKDTYDDDLDNLLAQIGDQYADLFLAAKNLSDAILLSDILRVNTEITKAPLSASMIKRYDEHHQDLTLLKALVRQQLPEKYKEIFFDQSKNGYAGYIDGGASQEEFYKFIKPILEKMDGTEELLVKLNREDLLRKQRTFDNGSIPHQIHLGELHAILRRQEDFYPFLKDNREKIEKILTFRIPYYVGPLARGNSRFAWMTRKSEETITPWNFEEVVDKGASAQSFIERMTNFDKNLPNEKVLPKHSLLYEYFTVYNELTKVKYVTEGMRKPAFLSGEQKKAIVDLLFKTNRKVTVKQLKEDYFKKIECFDSVEISGVEDRFNASLGTYHDLLKIIKDKDFLDNEENEDILEDIVLTLTLFEDREMIEERLKTYAHLFDDKVMKQLKRRRYTGWGRLSRKLINGIRDKQSGKTILDFLKSDGFANRNFMQLIHDDSLTFKEDIQKAQVSGQGDSLHEHIANLAGSPAIKKGILQTVKVVDELVKVMGRHKPENIVIEMARENQTTQKGQKNSRERMKRIEEGIKELGSQILKEHPVENTQLQNEKLYLYYLQNGRDMYVDQELDINRLSDYDVDHIVPQSFLKDDSIDNKVLTRSDKARGKSDNVPSEEVVKKMKNYWRQLLNAKLITQRKFDNLTKAERGGLSELDKAGFIKRQLVETRQITKHVAQILDSRMNTKYDENDKLIREVKVITLKSKLVSDFRKDFQFYKVREINNYHHAHDAYLNAVVGTALIKKYPKLESEFVYGDYKVYDVRKMIAKSEQEIGKATAKYFFYSNIMNFFKTEITLANGEIRKRPLIETNGETGEIVWDKGRDFATVRKVLSMPQVNIVKKTEVQTGGFSKESILPKRNSDKLIARKKDWDPKKYGGFDSPTVAYSVLVVAKVEKGKSKKLKSVKELLGITIMERSSFEKNPIDFLEAKGYKEVKKDLIIKLPKYSLFELENGRKRMLASAGELQKGNELALPSKYVNFLYLASHYEKLKGSPEDNEQKQLFVEQHKHYLDEIIEQISEFSKRVILADANLDKVLSAYNKHRDKPIREQAENIIHLFTLTNLGAPAAFKYFDTTIDRKRYTSTKEVLDATLIHQSITGLYETRIDLSQLGGDGGEAAAKEAAAKGGLLGRDLLTKLKAQIQFSTEGPQVTWEDRPAMCLVLNLEEEYRLHEKPVPPSIDPSWLQLFPMVWAEKAGMGLANQVPPVVVELKSDASPVAVRQYPMSKEAREGIRPHIQRFLDLGILVPCQSPWNTPLLPVKKPGTNDYRPVQDLREVNKRVQDIHPTVPNPYNLLSSLPPSHTWYSVLDLKDAFFCLKLHPNSQPLFAFEWRDPEKGNTGQLTWTRLPQGFKNSPTLFNEALHRDLASFRALNPQVVMLQYVDDLLVAAPTYRDCKEGTRRLLQELSKLGYRVSAKKAQLCREEVTYLGYLLKGGKRWLTPARKATVMKIPTPTTPRQVREFLGTAGFCRLWIPGFASLAAPLYPLTRPKVPFTWTEAHQEAFGRIKEALLSAPALALPDLTKPFALYVDEKEGVARGVLTQTLGPWRRPVAYLSKKLDPVASGWPTCLKAIAAVALLLKDADKLTLGQNVLVIAPHNLESIVRQPPDRWMTNARMTHYQSLLLNERVSFAPPAILNPATLLPVESDDTPIHICSEILAEETGTRPDLRDQPLPGVPAWYTDGSSFIMDGRRQAGAAIVDNKRTVWASNLPEGTSAQKAELIALTQALRLAEGKSINIYTDSRYAFATAHVHGAIYKQRGWLTSAGKDIKNKEEILALLEAIHLPKRVAIIHCPGHQRGTDPVATGNRKADEAAKQAAQSTRILTETTKNAGKRTADGSEFEKRTADGSEFESPKKKAKVE

SEQ ID NO: 6376 - protein, 2126 aa, synthetic construct
MPAAKRVKLDGGDKKYSIGLDIGTNSVGWAVITDEYKVPSKKFKVLGNTDRHSIKKNLIGALLFDSGETAEATRLKRTARRRYTRRKNRICYLQEIFSNEMAKVDDSFFHRLEESFLVEEDKKHERHPIFGNIVDEVAYHEKYPTIYHLRKKLVDSTDKADLRLIYLALAHMIKFRGHFLIEGDLNPDNSDVDKLFIQLVQTYNQLFEENPINASGVDAKAILSARLSKSRRLENLIAQLPGEKKNGLFGNLIALSLGLTPNFKSNFDLAEDAKLQLSKDTYDDDLDNLLAQIGDQYADLFLAAKNLSDAILLSDILRVNTEITKAPLSASMIKRYDEHHQDLTLLKALVRQQLPEKYKEIFFDQSKNGYAGYIDGGASQEEFYKFIKPILEKMDGTEELLVKLNREDLLRKQRTFDNGSIPHQIHLGELHAILRRQEDFYPFLKDNREKIEKILTFRIPYYVGPLARGNSRFAWMTRKSEETITPWNFEEVVDKGASAQSFIERMTNFDKNLPNEKVLPKHSLLYEYFTVYNELTKVKYVTEGMRKPAFLSGEQKKAIVDLLFKTNRKVTVKQLKEDYFKKIECFDSVEISGVEDRFNASLGTYHDLLKIIKDKDFLDNEENEDILEDIVLTLTLFEDREMIEERLKTYAHLFDDKVMKQLKRRRYTGWGRLSRKLINGIRDKQSGKTILDFLKSDGFANRNFMQLIHDDSLTFKEDIQKAQVSGQGDSLHEHIANLAGSPAIKKGILQTVKVVDELVKVMGRHKPENIVIEMARENQTTQKGQKNSRERMKRIEEGIKELGSQILKEHPVENTQLQNEKLYLYYLQNGRDMYVDQELDINRLSDYDVDHIVPQSFLKDDSIDNKVLTRSDKARGKSDNVPSEEVVKKMKNYWRQLLNAKLITQRKFDNLTKAERGGLSELDKAGFIKRQLVETRQITKHVAQILDSRMNTKYDENDKLIREVKVITLKSKLVSDFRKDFQFYKVREINNYHHAHDAYLNAVVGTALIKKYPKLESEFVYGDYKVYDVRKMIAKSEQEIGKATAKYFFYSNIMNFFKTEITLANGEIRKRPLIETNGETGEIVWDKGRDFATVRKVLSMPQVNIVKKTEVQTGGFSKESILPKRNSDKLIARKKDWDPKKYGGFDSPTVAYSVLVVAKVEKGKSKKLKSVKELLGITIMERSSFEKNPIDFLEAKGYKEVKKDLIIKLPKYSLFELENGRKRMLASAGELQKGNELALPSKYVNFLYLASHYEKLKGSPEDNEQKQLFVEQHKHYLDEIIEQISEFSKRVILADANLDKVLSAYNKHRDKPIREQAENIIHLFTLTNLGAPAAFKYFDTTIDRKRYTSTKEVLDATLIHQSITGLYETRIDLSQLGGDGGEAAAKEAAAKGGLLGRDLLTKLKAQIQFSTEGPQVTWEDRPAMCLVLNLEEEYRLHEKPVPPSIDPSWLQLFPMVWAEKAGMGLANQVPPVVVELKSDASPVAVRQYPMSKEAREGIRPHIQRFLDLGILVPCQSPWNTPLLPVKKPGTNDYRPVQDLREVNKRVQDIHPTVPNPYNLLSSLPPSHTWYSVLDLKDAFFCLKLHPNSQPLFAFEWRDPEKGNTGQLTWTRLPQGFKNSPTLFNEALHRDLASFRALNPQVVMLQYVDDLLVAAPTYRDCKEGTRRLLQELSKLGYRVSAKKAQLCREEVTYLGYLLKGGKRWLTPARKATVMKIPTPTTPRQVREFLGKAGFCRLFIPGFASLAAPLYPLTRPKVPFTWTEAHQEAFGRIKEALLSAPALALPDLTKPFALYVDEKEGVARGVLTQTLGPWRRPVAYLSKKLDPVASGWPTCLKAIAAVALLLKDADKLTLGQNVLVIAPHNLESIVRQPPDRWMTNARMTHYQSLLLNERVSFAPPAILNPATLLPVESDDTPIHICSEILAEETGTRPDLRDQPLPGVPAWYTDGSSFIMDGRRQAGAAIVDNKRTVWASNLPEGTSAQKAELIALTQALRLAEGKSINIYTDSRYAFATAHVHGAIYKQRGWLTSAGKDIKNKEEILALLEAIHLPKRVAIIHCPGHQRGTDPVATGNRKADEAAKQAAQSTRILTETTKNAGKRTADGSEFEKRTADGSEFESPKKKAKVE

SEQ ID NO: 6377 - protein, 2095 aa, synthetic construct
MPAAKRVKLDGGDKKYSIGLDIGTNSVGWAVITDEYKVPSKKFKVLGNTDRHSIKKNLIGALLFDSGETAEATRLKRTARRRYTRRKNRICYLQEIFSNEMAKVDDSFFHRLEESFLVEEDKKHERHPIFGNIVDEVAYHEKYPTIYHLRKKLVDSTDKADLRLIYLALAHMIKFRGHFLIEGDLNPDNSDVDKLFIQLVQTYNQLFEENPINASGVDAKAILSARLSKSRRLENLIAQLPGEKKNGLFGNLIALSLGLTPNFKSNFDLAEDAKLQLSKDTYDDDLDNLLAQIGDQYADLFLAAKNLSDAILLSDILRVNTEITKAPLSASMIKRYDEHHQDLTLLKALVRQQLPEKYKEIFFDQSKNGYAGYIDGGASQEEFYKFIKPILEKMDGTEELLVKLNREDLLRKQRTFDNGSIPHQIHLGELHAILRRQEDFYPFLKDNREKIEKILTFRIPYYVGPLARGNSRFAWMTRKSEETITPWNFEEVVDKGASAQSFIERMTNFDKNLPNEKVLPKHSLLYEYFTVYNELTKVKYVTEGMRKPAFLSGEQKKAIVDLLFKTNRKVTVKQLKEDYFKKIECFDSVEISGVEDRFNASLGTYHDLLKIIKDKDFLDNEENEDILEDIVLTLTLFEDREMIEERLKTYAHLFDDKVMKQLKRRRYTGWGRLSRKLINGIRDKQSGKTILDFLKSDGFANRNFMQLIHDDSLTFKEDIQKAQVSGQGDSLHEHIANLAGSPAIKKGILQTVKVVDELVKVMGRHKPENIVIEMARENQTTQKGQKNSRERMKRIEEGIKELGSQILKEHPVENTQLQNEKLYLYYLQNGRDMYVDQELDINRLSDYDVDHIVPQSFLKDDSIDNKVLTRSDKARGKSDNVPSEEVVKKMKNYWRQLLNAKLITQRKFDNLTKAERGGLSELDKAGFIKRQLVETRQITKHVAQILDSRMNTKYDENDKLIREVKVITLKSKLVSDFRKDFQFYKVREINNYHHAHDAYLNAVVGTALIKKYPKLESEFVYGDYKVYDVRKMIAKSEQEIGKATAKYFFYSNIMNFFKTEITLANGEIRKRPLIETNGETGEIVWDKGRDFATVRKVLSMPQVNIVKKTEVQTGGFSKESILPKRNSDKLIARKKDWDPKKYGGFDSPTVAYSVLVVAKVEKGKSKKLKSVKELLGITIMERSSFEKNPIDFLEAKGYKEVKKDLIIKLPKYSLFELENGRKRMLASAGELQKGNELALPSKYVNFLYLASHYEKLKGSPEDNEQKQLFVEQHKHYLDEIIEQISEFSKRVILADANLDKVLSAYNKHRDKPIREQAENIIHLFTLTNLGAPAAFKYFDTTIDRKRYTSTKEVLDATLIHQSITGLYETRIDLSQLGGDGGEAAAKEAAAKGGTLNLEDEYRLYETSAEPEVSPGSTWLSDFPQAWAETGGMGLAVRQAPLIIPLKATSTPVSIKQYPMSQEAKLGIKPHIQRLLDQGILVPCQSPWNTPLLPVKKPGTNDYRPVQDLREVNKRVEDIHPTVPNPYNLLSGLPPSHRWYTVLDLKDAFFCLRLHPTSQPLFAFEWRDPGMGISGQLTWTRLPQGFKNSPTLFNEALHRDLADFRIQHPDLILLQYVDDILLAATSELDCQQGTRALLLTLGNLGYRASAKKAQLCQKQVKYLGYLLKEGQRWLTEARKETVMGQPTPKTPRQLREFLGKAGFCRLFIPGFAEMAAPLYPLTKPGTLFNWGPDQQKAYQEIKQALLTAPALGLPDLTKPFELFVDEKQGYAKGVLTQKLGPWRRPVAYLSKKLDPVAAGWPPCLRMVAAIAVLRKDAGKLTMGQPLVILAPHAVEALVKQPPDRWLSNARMTHYQAMLLDTDRVQFGPVVALNPATLLPLPEEGAPHDCLEILAETHGTRPDLTDQPIPDADHTWYTDGSSFLQEGQRKAGAAVTTETEVIWARALPAGTSAQRAELIALTQALKMAEGKRLNVYTDSRYAFATAHIHGEIYRRRGWLTSEGREIKNKSEILALLKALFLPKRLSIIHCLGHQKGDSAEARGNRLADQAAREAAIKTPPDTSTLLAGKRTADGSEFEKRTADGSEFESPKKKAKVE

SEQ ID NO: 6378 - protein, 2095 aa, synthetic construct
MPAAKRVKLDGGDKKYSIGLDIGTNSVGWAVITDEYKVPSKKFKVLGNTDRHSIKKNLIGALLFDSGETAEATRLKRTARRRYTRRKNRICYLQEIFSNEMAKVDDSFFHRLEESFLVEEDKKHERHPIFGNIVDEVAYHEKYPTIYHLRKKLVDSTDKADLRLIYLALAHMIKFRGHFLIEGDLNPDNSDVDKLFIQLVQTYNQLFEENPINASGVDAKAILSARLSKSRRLENLIAQLPGEKKNGLFGNLIALSLGLTPNFKSNFDLAEDAKLQLSKDTYDDDLDNLLAQIGDQYADLFLAAKNLSDAILLSDILRVNTEITKAPLSASMIKRYDEHHQDLTLLKALVRQQLPEKYKEIFFDQSKNGYAGYIDGGASQEEFYKFIKPILEKMDGTEELLVKLNREDLLRKQRTFDNGSIPHQIHLGELHAILRRQEDFYPFLKDNREKIEKILTFRIPYYVGPLARGNSRFAWMTRKSEETITPWNFEEVVDKGASAQSFIERMTNFDKNLPNEKVLPKHSLLYEYFTVYNELTKVKYVTEGMRKPAFLSGEQKKAIVDLLFKTNRKVTVKQLKEDYFKKIECFDSVEISGVEDRFNASLGTYHDLLKIIKDKDFLDNEENEDILEDIVLTLTLFEDREMIEERLKTYAHLFDDKVMKQLKRRRYTGWGRLSRKLINGIRDKQSGKTILDFLKSDGFANRNFMQLIHDDSLTFKEDIQKAQVSGQGDSLHEHIANLAGSPAIKKGILQTVKVVDELVKVMGRHKPENIVIEMARENQTTQKGQKNSRERMKRIEEGIKELGSQILKEHPVENTQLQNEKLYLYYLQNGRDMYVDQELDINRLSDYDVDHIVPQSFLKDDSIDNKVLTRSDKARGKSDNVPSEEVVKKMKNYWRQLLNAKLITQRKFDNLTKAERGGLSELDKAGFIKRQLVETRQITKHVAQILDSRMNTKYDENDKLIREVKVITLKSKLVSDFRKDFQFYKVREINNYHHAHDAYLNAVVGTALIKKYPKLESEFVYGDYKVYDVRKMIAKSEQEIGKATAKYFFYSNIMNFFKTEITLANGEIRKRPLIETNGETGEIVWDKGRDFATVRKVLSMPQVNIVKKTEVQTGGFSKESILPKRNSDKLIARKKDWDPKKYGGFDSPTVAYSVLVVAKVEKGKSKKLKSVKELLGITIMERSSFEKNPIDFLEAKGYKEVKKDLIIKLPKYSLFELENGRKRMLASAGELQKGNELALPSKYVNFLYLASHYEKLKGSPEDNEQKQLFVEQHKHYLDEIIEQISEFSKRVILADANLDKVLSAYNKHRDKPIREQAENIIHLFTLTNLGAPAAFKYFDTTIDRKRYTSTKEVLDATLIHQSITGLYETRIDLSQLGGDGGEAAAKEAAAKGGTLGIEDEYRLHETSTEPDVSLGSTWLSDFPQAWAETGGMGLAVRQAPLIIPLKATSTPVSIQQYPMSHEARLGIKPHIQRLLDQGILVPCQSPWNTPLLPVKKPGTNDYRPVQDLREVNKRVEDIHPTVPNPYNLLSGLPPSHQWYTVLDLKDAFFCLRLHPTSQPLFAFEWRDPGMGISGQLTWTRLPQGFKNSPTLFNEALHRDLADFRIQHPDLILLQYVDDILLAATSELDCQQGTRALLQTLGDLGYRASAKKAQICQKQVKYLGYLLREGQRWLTEARKETVMGQPVPKTPRQLREFLGTAGFCRLWIPGFAEMAAPLYPLTKPGTLFSWGPDQQKAYQEIKQALLTAPALGLPDLTKPFELFVDEKQGYAKGVLTQKLGPWRRPVAYLSKKLDPVAAGWPPCLRMVAAIAVLTKDAGKLTMGQPLVILAPHAVEALVKQPPDRWLSNARMTHYQAMLLDTDRVQFGPVVALNPATLLPLPEEGAPHDCLEILAETHGTRPDLTDQPIPDADHTWYTDGSSFLQEGQRKAGAAVTTETEVIWAGALPAGTSAQRAELIALTQALKMAEGKRLNVYTDSRYAFATAHIHGEIYRRRGWLTSEGREIKNKSEILALLKALFLPKRLSIIHCLGHQKGDSAEARGNRLADQAAREAAIKTPPDTSTLLAGKRTADGSEFEKRTADGSEFESPKKKAKVE

SEQ ID NO: 6379 - protein, 2087 aa, synthetic construct
MPAAKRVKLDGGDKKYSIGLDIGTNSVGWAVITDEYKVPSKKFKVLGNTDRHSIKKNLIGALLFDSGETAEATRLKRTARRRYTRRKNRICYLQEIFSNEMAKVDDSFFHRLEESFLVEEDKKHERHPIFGNIVDEVAYHEKYPTIYHLRKKLVDSTDKADLRLIYLALAHMIKFRGHFLIEGDLNPDNSDVDKLFIQLVQTYNQLFEENPINASGVDAKAILSARLSKSRRLENLIAQLPGEKKNGLFGNLIALSLGLTPNFKSNFDLAEDAKLQLSKDTYDDDLDNLLAQIGDQYADLFLAAKNLSDAILLSDILRVNTEITKAPLSASMIKRYDEHHQDLTLLKALVRQQLPEKYKEIFFDQSKNGYAGYIDGGASQEEFYKFIKPILEKMDGTEELLVKLNREDLLRKQRTFDNGSIPHQIHLGELHAILRRQEDFYPFLKDNREKIEKILTFRIPYYVGPLARGNSRFAWMTRKSEETITPWNFEEVVDKGASAQSFIERMTNFDKNLPNEKVLPKHSLLYEYFTVYNELTKVKYVTEGMRKPAFLSGEQKKAIVDLLFKTNRKVTVKQLKEDYFKKIECFDSVEISGVEDRFNASLGTYHDLLKIIKDKDFLDNEENEDILEDIVLTLTLFEDREMIEERLKTYAHLFDDKVMKQLKRRRYTGWGRLSRKLINGIRDKQSGKTILDFLKSDGFANRNFMQLIHDDSLTFKEDIQKAQVSGQGDSLHEHIANLAGSPAIKKGILQTVKVVDELVKVMGRHKPENIVIEMARENQTTQKGQKNSRERMKRIEEGIKELGSQILKEHPVENTQLQNEKLYLYYLQNGRDMYVDQELDINRLSDYDVDHIVPQSFLKDDSIDNKVLTRSDKARGKSDNVPSEEVVKKMKNYWRQLLNAKLITQRKFDNLTKAERGGLSELDKAGFIKRQLVETRQITKHVAQILDSRMNTKYDENDKLIREVKVITLKSKLVSDFRKDFQFYKVREINNYHHAHDAYLNAVVGTALIKKYPKLESEFVYGDYKVYDVRKMIAKSEQEIGKATAKYFFYSNIMNFFKTEITLANGEIRKRPLIETNGETGEIVWDKGRDFATVRKVLSMPQVNIVKKTEVQTGGFSKESILPKRNSDKLIARKKDWDPKKYGGFDSPTVAYSVLVVAKVEKGKSKKLKSVKELLGITIMERSSFEKNPIDFLEAKGYKEVKKDLIIKLPKYSLFELENGRKRMLASAGELQKGNELALPSKYVNFLYLASHYEKLKGSPEDNEQKQLFVEQHKHYLDEIIEQISEFSKRVILADANLDKVLSAYNKHRDKPIREQAENIIHLFTLTNLGAPAAFKYFDTTIDRKRYTSTKEVLDATLIHQSITGLYETRIDLSQLGGDGGEAAAKEAAAKGGLDDEYRLYSPLVKPDQNIQFWLEQFPQAWAETAGMGLAKQVPPQVIQLKASATPVSVRQYPLSKEAQEGIRPHVQRLIQQGILVPVQSPWNTPLLPVRKPGTNDYRPVQDLREVNKRVQDIHPTVPNPYNLLCALPPQRSWYTVLDLKDAFFCLRLHPTSQPLFAFEWRDPGTGRTGQLTWTRLPQGFKNSPTIFNEALHRDLANFRIQHPQVTLLQYVDDLLLAGATKQDCLEGTKALLLELSDLGYRASAKKAQICRREVTYLGYSLRDGQRWLTEARKKTVVQIPAPTTAKQVREFLGKAGFCRLFIPGFATLAAPLYPLTKPKGEFSWAPEHQKAFDAIKKALLSAPALALPDVTKPFTLYVDERKGVARGVLTQTLGPWRRPVAYLSKKLDPVASGWPVCLKAIAAVAILVKDADKLTLGQNITVIAPHALENIVRQPPDRWMTNARMTHYQSLLLTERVTFAPPAALNPATLLPEETDEPVTHDCHQLLIEETGVRKDLTDIPLTGEVLTWFTDGSSYVVEGKRMAGAAVVDGTRTIWASSLPEGTSAQKAELMALTQALRLAEGKSINIYTDSRYAFATAHVHGAIYKQRGWLTSAGREIKNKEEILSLLEALHLPKRLAIIHCPGHQKAKDPISRGNQMADRVAKQAAQGVNLLPAGKRTADGSEFEKRTADGSEFESPKKKAKVE

SEQ ID NO: 6380 - protein, 2089 aa, synthetic construct
MPAAKRVKLDGGDKKYSIGLDIGTNSVGWAVITDEYKVPSKKFKVLGNTDRHSIKKNLIGALLFDSGETAEATRLKRTARRRYTRRKNRICYLQEIFSNEMAKVDDSFFHRLEESFLVEEDKKHERHPIFGNIVDEVAYHEKYPTIYHLRKKLVDSTDKADLRLIYLALAHMIKFRGHFLIEGDLNPDNSDVDKLFIQLVQTYNQLFEENPINASGVDAKAILSARLSKSRRLENLIAQLPGEKKNGLFGNLIALSLGLTPNFKSNFDLAEDAKLQLSKDTYDDDLDNLLAQIGDQYADLFLAAKNLSDAILLSDILRVNTEITKAPLSASMIKRYDEHHQDLTLLKALVRQQLPEKYKEIFFDQSKNGYAGYIDGGASQEEFYKFIKPILEKMDGTEELLVKLNREDLLRKQRTFDNGSIPHQIHLGELHAILRRQEDFYPFLKDNREKIEKILTFRIPYYVGPLARGNSRFAWMTRKSEETITPWNFEEVVDKGASAQSFIERMTNFDKNLPNEKVLPKHSLLYEYFTVYNELTKVKYVTEGMRKPAFLSGEQKKAIVDLLFKTNRKVTVKQLKEDYFKKIECFDSVEISGVEDRFNASLGTYHDLLKIIKDKDFLDNEENEDILEDIVLTLTLFEDREMIEERLKTYAHLFDDKVMKQLKRRRYTGWGRLSRKLINGIRDKQSGKTILDFLKSDGFANRNFMQLIHDDSLTFKEDIQKAQVSGQGDSLHEHIANLAGSPAIKKGILQTVKVVDELVKVMGRHKPENIVIEMARENQTTQKGQKNSRERMKRIEEGIKELGSQILKEHPVENTQLQNEKLYLYYLQNGRDMYVDQELDINRLSDYDVDHIVPQSFLKDDSIDNKVLTRSDKARGKSDNVPSEEVVKKMKNYWRQLLNAKLITQRKFDNLTKAERGGLSELDKAGFIKRQLVETRQITKHVAQILDSRMNTKYDENDKLIREVKVITLKSKLVSDFRKDFQFYKVREINNYHHAHDAYLNAVVGTALIKKYPKLESEFVYGDYKVYDVRKMIAKSEQEIGKATAKYFFYSNIMNFFKTEITLANGEIRKRPLIETNGETGEIVWDKGRDFATVRKVLSMPQVNIVKKTEVQTGGFSKESILPKRNSDKLIARKKDWDPKKYGGFDSPTVAYSVLVVAKVEKGKSKKLKSVKELLGITIMERSSFEKNPIDFLEAKGYKEVKKDLIIKLPKYSLFELENGRKRMLASAGELQKGNELALPSKYVNFLYLASHYEKLKGSPEDNEQKQLFVEQHKHYLDEIIEQISEFSKRVILADANLDKVLSAYNKHRDKPIREQAENIIHLFTLTNLGAPAAFKYFDTTIDRKRYTSTKEVLDATLIHQSITGLYETRIDLSQLGGDGGEAAAKEAAAKGGTLQLDDEYRLYSPLVKPDQNIQFWLEQFPQAWAETAGMGLAKQVPPQVIQLKASATPVSVRQYPLSKEAQEGIRPHVQRLIQQGILVPVQSPWNTPLLPVRKPGTNDYRPVQDLREVNKRVQDIHPTVPNPYNLLCALPPQRSWYTVLDLKDAFFCLRLHPTSQPLFAFEWRDPGTGRTGQLTWTRLPQGFKNSPTIFDEALHRDLANFRIQHPQVTLLQYVDDLLLAGATKQDCLEGTKALLLELSDLGYRASAKKAQICRREVTYLGYSLRDGQRWLTEARKKTVVQIPAPTTAKQVREFLGTAGFCRLWIPGFATLAAPLYPLTKEKGEFSWAPEHQKAFDAIKKALLSAPALALPDVTKPFTLYVDERKGVARGVLTQTLGPWRRPVAYLSKKLDPVASGWPVCLKAIAAVAILVKDADKLTLGQNITVIAPHALENIVRQPPDRWMTNARMTHYQSLLLTERVTFAPPAALNPATLLPEETDEPVTHDCHQLLIEETGVRKDLTDIPLTGEVLTWFTDGSSYVVEGKRMAGAAVVDGTRTIWASSLPEGTSAQKAELMALTQALRLAEGKSINIYTDSRYAFATAHVHGAIYKQRGLLTSAGREIKNKEEILSLLEALHLPKRLAIIHCPGHQKAKDPISRGNQMADRVAKQAAQGVNLLAGKRTADGSEFEKRTADGSEFESPKKKAKVE

SEQ ID NO: 6381 - protein, 2087 aa, synthetic construct; identical to SEQ ID NO: 6379

SEQ ID NO: 6382 - protein, 2175 aa, synthetic construct
MPAAKRVKLDGGDKKYSIGLDIGTNSVGWAVITDEYKVPSKKFKVLGNTDRHSIKKNLIGALLFDSGETAEATRLKRTARRRYTRRKNRICYLQEIFSNEMAKVDDSFFHRLEESFLVEEDKKHERHPIFGNIVDEVAYHEKYPTIYHLRKKLVDSTDKADLRLIYLALAHMIKFRGHFLIEGDLNPDNSDVDKLFIQLVQTYNQLFEENPINASGVDAKAILSARLSKSRRLENLIAQLPGEKKNGLFGNLIALSLGLTPNFKSNFDLAEDAKLQLSKDTYDDDLDNLLAQIGDQYADLFLAAKNLSDAILLSDILRVNTEITKAPLSASMIKRYDEHHQDLTLLKALVRQQLPEKYKEIFFDQSKNGYAGYIDGGASQEEFYKFIKPILEKMDGTEELLVKLNREDLLRKQRTFDNGSIPHQIHLGELHAILRRQEDFYPFLKDNREKIEKILTFRIPYYVGPLARGNSRFAWMTRKSEETITPWNFEEVVDKGASAQSFIERMTNFDKNLPNEKVLPKHSLLYEYFTVYNELTKVKYVTEGMRKPAFLSGEQKKAIVDLLFKTNRKVTVKQLKEDYFKKIECFDSVEISGVEDRFNASLGTYHDLLKIIKDKDFLDNEENEDILEDIVLTLTLFEDREMIEERLKTYAHLFDDKVMKQLKRRRYTGWGRLSRKLINGIRDKQSGKTILDFLKSDGFANRNFMQLIHDDSLTFKEDIQKAQVSGQGDSLHEHIANLAGSPAIKKGILQTVKVVDELVKVMGRHKPENIVIEMARENQTTQKGQKNSRERMKRIEEGIKELGSQILKEHPVENTQLQNEKLYLYYLQNGRDMYVDQELDINRLSDYDVDHIVPQSFLKDDSIDNKVLTRSDKARGKSDNVPSEEVVKKMKNYWRQLLNAKLITQRKFDNLTKAERGGLSELDKAGFIKRQLVETRQITKHVAQILDSRMNTKYDENDKLIREVKVITLKSKLVSDFRKDFQFYKVREINNYHHAHDAYLNAVVGTALIKKYPKLESEFVYGDYKVYDVRKMIAKSEQEIGKATAKYFFYSNIMNFFKTEITLANGEIRKRPLIETNGETGEIVWDKGRDFATVRKVLSMPQVNIVKKTEVQTGGFSKESILPKRNSDKLIARKKDWDPKKYGGFDSPTVAYSVLVVAKVEKGKSKKLKSVKELLGITIMERSSFEKNPIDFLEAKGYKEVKKDLIIKLPKYSLFELENGRKRMLASAGELQKGNELALPSKYVNFLYLASHYEKLKGSPEDNEQKQLFVEQHKHYLDEIIEQISEFSKRVILADANLDKVLSAYNKHRDKPIREQAENIIHLFTLTNLGAPAAFKYFDTTIDRKRYTSTKEVLDATLIHQSITGLYETRIDLSQLGGDGGEAAAKEAAAKGGMDPLQLLQPLEAEIKGTKLKAHWNSGATITCVPQAFLEEEVPIKNIWIKTIHGEKEQPVYYLTFKIQGRKVEAEVISSPYDYILVSPSDIPWLMKKPLQLTTLVPLQEYEERLLKQTMLTGSYKEKLQSLFLKYDALWQHWENQVGHRRIKPHHIATGTVNPRPQKQYPINPKAKASIQTVINDLLKQGVLIQQNSIMNTPVYPVPKPDGKWRMVLDYREVNKTIPLIAAQNQHSAGILSSIFRGKYKTTLDLSNGFWAHSITPESYWLTAFTWLGQQYCWTRLPQGFLNSPALFNADVVDLLKEVPNVQVYVDDIYISHDDPREHLEQLEKVFSLLLNAGYVVSLKKSEIAQHEVEFLGFNITKEGRGLTETFKQKLLNITPPRDLKQLQSILGKLNFARNFIPNFSELVKPLYNIIATAPGKYITWTTDNSQQLQNIISMLNSAENLEERNPEVRLIMKVNTSPSAGYIRFYNEFAKRPIMYLNYVYTKAEVKFTNTEKLLTTIHKGLIKALDLGMGQEILVYSPIVSMTKIQKTPLPERKALPIRWITWMSYLEDPRIQFHYDKTLPELQQVPTVTDDIIAKIKHPSEFSMVFYTDGSAIKHPNVNKSHNAGMGIAQVQFKPEFTVINTWSIPLGDHTAQLAEVAAVEFACKKALKIDGPVLIVTDSFYVAESVNKELPYWQSNGFFNNKKKPLKHVSKWKSIADCIQLKPDIIIIHEKGHQPTASTFHTEGNNLADKLATQGSYVVNAGKRTADGSEFEKRTADGSEFESPKKKAKVE

SEQ ID NO: 6383 - protein, 2095 aa, synthetic construct
MPAAKRVKLDGGDKKYSIGLDIGTNSVGWAVITDEYKVPSKKFKVLGNTDRHSIKKNLIGALLFDSGETAEATRLKRTARRRYTRRKNRICYLQEIFSNEMAKVDDSFFHRLEESFLVEEDKKHERHPIFGNIVDEVAYHEKYPTIYHLRKKLVDSTDKADLRLIYLALAHMIKFRGHFLIEGDLNPDNSDVDKLFIQLVQTYNQLFEENPINASGVDAKAILSARLSKSRRLENLIAQLPGEKKNGLFGNLIALSLGLTPNFKSNFDLAEDAKLQLSKDTYDDDLDNLLAQIGDQYADLFLAAKNLSDAILLSDILRVNTEITKAPLSASMIKRYDEHHQDLTLLKALVRQQLPEKYKEIFFDQSKNGYAGYIDGGASQEEFYKFIKPILEKMDGTEELLVKLNREDLLRKQRTFDNGSIPHQIHLGELHAILRRQEDFYPFLKDNREKIEKILTFRIPYYVGPLARGNSRFAWMTRKSEETITPWNFEEVVDKGASAQSFIERMTNFDKNLPNEKVLPKHSLLYEYFTVYNELTKVKYVTEGMRKPAFLSGEQKKAIVDLLFKTNRKVTVKQLKEDYFKKIECFDSVEISGVEDRFNASLGTYHDLLKIIKDKDFLDNEENEDILEDIVLTLTLFEDREMIEERLKTYAHLFDDKVMKQLKRRRYTGWGRLSRKLINGIRDKQSGKTILDFLKSDGFANRNFMQLIHDDSLTFKEDIQKAQVSGQGDSLHEHIANLAGSPAIKKGILQTVKVVDELVKVMGRHKPENIVIEMARENQTTQKGQKNSRERMKRIEEGIKELGSQILKEHPVENTQLQNEKLYLYYLQNGRDMYVDQELDINRLSDYDVDHIVPQSFLKDDSIDNKVLTRSDKARGKSDNVPSEEVVKKMKNYWRQLLNAKLITQRKFDNLTKAERGGLSELDKAGFIKRQLVETRQITKHVAQILDSRMNTKYDENDKLIREVKVITLKSKLVSDFRKDFQFYKVREINNYHHAHDAYLNAVVGTALIKKYPKLESEFVYGDYKVYDVRKMIAKSEQEIGKATAKYFFYSNIMNFFKTEITLANGEIRKRPLIETNGETGEIVWDKGRDFATVRKVLSMPQVNIVKKTEVQTGGFSKESILPKRNSDKLIARKKDWDPKKYGGFDSPTVAYSVLVVAKVEKGKSKKLKSVKELLGITIMERSSFEKNPIDFLEAKGYKEVKKDLIIKLPKYSLFELENGRKRMLASAGELQKGNELALPSKYVNFLYLASHYEKLKGSPEDNEQKQLFVEQHKHYLDEIIEQISEFSKRVILADANLDKVLSAYNKHRDKPIREQAENIIHLFTLTNLGAPAAFKYFDTTIDRKRYTSTKEVLDATLIHQSITGLYETRIDLSQLGGDGGEAAAKEAAAKGGTLNIEDEYRLHETSKEPDVPLGSTWLSDFPQAWAETGGMGLAVRQAPLIIPLKATSTPVSIKQYPMSQEARLGIKPHIQRLLDQGILVPCQSPWNTPLLPVKKPGTNDYRPVQDLREVNKRVEDIHPTVPNPYNLLSGLPPSHQWYTVLDLKDAFFCLRLHPTSQPLFAFEWRDPEMGISGQLTWTRLPQGFKNSPTLFNEALHRDLADFRIQHPDLILLQYVDDLLLAATSEQDCQRGTRALLQTLGNLGYRASAKKAQICQKQVKYLGYLLKEGQRWLTEARKETVMGQPTPKTPRQLREFLGKAGFCRLFIPGFAEMAAPLYPLTKPGTLFNWGPDQQKAYQEIKQALLTAPALGLPDLTKPFELFVDEKQGYAKGVLTQKLGPWRRPVAYLSKKLDPVAAGWPPCLRMVAAIAVLTKDAGKLTMGQPLVILAPHAVEALVKQPPDRWLSNARMTHYQAMLLDTDRVQFGPVVALNPATLLPLPEKEAPHDCLEILAETHGTRPDLTDQPIPDADYTWYTDGSSFLQEGQRRAGAAVTTETEVIWARALPAGTSAQRAELIALTQALKMAEGKKLNVYTDSRYAFATAHVHGEIYRRRGWLTSEGREIKNKNEILALLKALFLPKRLSIIHCPGHQKGNSAEARGNRMADQAAREAAMKAVLETSTLLAGKRTADGSEFEKRTADGSEFESPKKKAKVE

SEQ ID NO: 6384 - protein, 2102 aa, synthetic construct
MPAAKRVKLDGGDKKYSIGLDIGTNSVGWAVITDEYKVPSKKFKVLGNTDRHSIKKNLIGALLFDSGETAEATRLKRTARRRYTRRKNRICYLQEIFSNEMAKVDDSFFHRLEESFLVEEDKKHERHPIFGNIVDEVAYHEKYPTIYHLRKKLVDSTDKADLRLIYLALAHMIKFRGHFLIEGDLNPDNSDVDKLFIQLVQTYNQLFEENPINASGVDAKAILSARLSKSRRLENLIAQLPGEKKNGLFGNLIALSLGLTPNFKSNFDLAEDAKLQLSKDTYDDDLDNLLAQIGDQYADLFLAAKNLSDAILLSDILRVNTEITKAPLSASMIKRYDEHHQDLTLLKALVRQQLPEKYKEIFFDQSKNGYAGYIDGGASQEEFYKFIKPILEKMDGTEELLVKLNREDLLRKQRTFDNGSIPHQIHLGELHAILRRQEDFYPFLKDNREKIEKILTFRIPYYVGPLARGNSRFAWMTRKSEETITPWNFEEVVDKGASAQSFIERMTNFDKNLPNEKVLPKHSLLYEYFTVYNELTKVKYVTEGMRKPAFLSGEQKKAIVDLLFKTNRKVTVKQLKEDYFKKIECFDSVEISGVEDRFNASLGTYHDLLKIIKDKDFLDNEENEDILEDIVLTLTLFEDREMIEERLKTYAHLFDDKVMKQLKRRRYTGWGRLSRKLINGIRDKQSGKTILDFLKSDGFANRNFMQLIHDDSLTFKEDIQKAQVSGQGDSLHEHIANLAGSPAIKKGILQTVKVVDELVKVMGRHKPENIVIEMARENQTTQKGQKNSRERMKRIEEGIKELGSQILKEHPVENTQLQNEKLYLYYLQNGRDMYVDQELDINRLSDYDVDHIVPQSFLKDDSIDNKVLTRSDKARGKSDNVPSEEVVKKMKNYWRQLLNAKLITQRKFDNLTKAERGGLSELDKAGFIKRQLVETRQITKHVAQILDSRMNTKYDENDKLIREVKVITLKSKLVSDFRKDFQFYKVREINNYHHAHDAYLNAVVGTALIKKYPKLESEFVYGDYKVYDVRKMIAKSEQEIGKATAKYFFYSNIMNFFKTEITLANGEIRKRPLIETNGETGEIVWDKGRDFATVRKVLSMPQVNIVKKTEVQTGGFSKESILPKRNSDKLIARKKDWDPKKYGGFDSPTVAYSVLVVAKVEKGKSKKLKSVKELLGITIMERSSFEKNPIDFLEAKGYKEVKKDLIIKLPKYSLFELENGRKRMLASAGELQKGNELALPSKYVNFLYLASHYEKLKGSPEDNEQKQLFVEQHKHYLDEIIEQISEFSKRVILADANLDKVLSAYNKHRDKPIREQAENIIHLFTLTNLGAPAAFKYFDTTIDRKRYTSTKEVLDATLIHQSITGLYETRIDLSQLGGDGGEAAAKEAAAKEAAAKGGTAPLEEEYRLFLEAPIQNVTLLEQWKREIPKVWAEINPPGLASTQAPIHVQLLSTALPVRVRQYPITLEAKRSLRETIRKFRAAGILRPVHSPWNTPLLPVRKSGTSEYRMVQDLREVNKRVETIHPTVPNPYTLLSLLPPDRIWYSVLDLKDAFFCIPLAPESQLIFAFEWADAEEGESGQLTWTRLPQGFKNSPTLFNEALNRDLQGFRLDHPSVSLLQYVDDLLIAADTQAACLSATRDLLMTLAELGYRVSGKKAQLCQEEVTYLGFKIHKGSRSLSNSRTQAILQIPVPKTKRQVREFLGTIGYCRLWIPGFAELAQPLYAATRPGNDPLVWGEKEEEAFQSLKLALTQPPALALPSLDKPFQLFVEETSGAAKGVLTQALGPWKRPVAYLSKRLDPVAAGWPRCLRAIAAAALLTREASKLTFGQDIEITSSHNLESLLRSPPDKWLTNARITQYQVLLLDPPRVRFKQTAALNPATLLPETDDTLPIHHCLDTLDSLTSTRPDLTDQPLAQAEATLFTDGSSYIRDGKRYAGAAVVTLDSVIWAEPLPIGTSAQKAELIALTKALEWSKDKSVNIYTDSRYAFATLHVHGMIYRERGWLTAGGKAIKNAPEILALLTAVWLPKRVAVMHCKGHQKDDAPTSTGNRRADEVAREVAIRPLSTQATISAGKRTADGSEFEKRTADGSEFESPKKKAKVE

SEQ ID NO: 6385 - protein, 2102 aa, synthetic construct
MPAAKRVKLDGGDKKYSIGLDIGTNSVGWAVITDEYKVPSKKFKVLGNTDRHSIKKNLIGALLFDSGETAEATRLKRTARRRYTRRKNRICYLQEIFSNEMAKVDDSFFHRLEESFLVEEDKKHERHPIFGNIVDEVAYHEKYPTIYHLRKKLVDSTDKADLRLIYLALAHMIKFRGHFLIEGDLNPDNSDVDKLFIQLVQTYNQLFEENPINASGVDAKAILSARLSKSRRLENLIAQLPGEKKNGLFGNLIALSLGLTPNFKSNFDLAEDAKLQLSKDTYDDDLDNLLAQIGDQYADLFLAAKNLSDAILLSDILRVNTEITKAPLSASMIKRYDEHHQDLTLLKALVRQQLPEKYKEIFFDQSKNGYAGYIDGGASQEEFYKFIKPILEKMDGTEELLVKLNREDLLRKQRTFDNGSIPHQIHLGELHAILRRQEDFYPFLKDNREKIEKILTFRIPYYVGPLARGNSRFAWMTRKSEETITPWNFEEVVDKGASAQSFIERMTNFDKNLPNEKVLPKHSLLYEYFTVYNELTKVKYVTEGMRKPAFLSGEQKKAIVDLLFKTNRKVTVKQLKEDYFKKIECFDSVEISGVEDRFNASLGTYHDLLKIIKDKDFLDNEENEDILEDIVLTLTLFEDREMIEERLKTYAHLFDDKVMKQLKRRRYTGWGRLSRKLINGIRDKQSGKTILDFLKSDGFANRNFMQLIHDDSLTFKEDIQKAQVSGQGDSLHEHIANLAGSPAIKKGILQTVKVVDELVKVMGRHKPENIVIEMARENQTTQKGQKNSRERMKRIEEGIKELGSQILKEHPVENTQLQNEKLYLYYLQNGRDMYVDQELDINRLSDYDVDHIVPQSFLKDDSIDNKVLTRSDKARGKSDNVPSEEVVKKMKNYWRQLLNAKLITQRKFDNLTKAERGGLSELDKAGFIKRQLVETRQITKHVAQILDSRMNTKYDENDKLIREVKVITLKSKLVSDFRKDFQFYKVREINNYHHAHDAYLNAVVGTALIKKYPKLESEFVYGDYKVYDVRKMIAKSEQEIGKATAKYFFYSNIMNFFKTEITLANGEIRKRPLIETNGETGEIVWDKGRDFATVRKVLSMPQVNIVKKTEVQTGGFSKESILPKRNSDKLIARKKDWDPKKYGGFDSPTVAYSVLVVAKVEKGKSKKLKSVKELLGITIMERSSFEKNPIDFLEAKGYKEVKKDLIIKLPKYSLFELENGRKRMLASAGELQKGNELALPSKYVNFLYLASHYEKLKGSPEDNEQKQLFVEQHKHYLDEIIEQISEFSKRVILADANLDKVLSAYNKHRDKPIREQAENIIHLFTLTNLGAPAAFKYFDTTIDRKRYTSTKEVLDATLIHQSITGLYETRIDLSQLGGDGGEAAAKEAAAKEAAAKGGTAPLEEEYRLFLEAPIQNVTLLEQWKREIPKVWAEINPPGLASTQAPIHVQLLSTALPVRVRQYPITLEAKRSLRETIRKFRAAGILRPVHSPWNTPLLPVRKSGTSEYRMVQDLREVNKRVETIHPTVPNPYTLLSLLPPDRIWYSVLDLKDAFFCIPLAPESQLIFAFEWADAEEGESGQLTWTRLPQGFKNSPTLFNEALNRDLQGFRLDHPSVSLLQYVDDLLIAADTQAACLSATRDLLMTLAELGYRVSGKKAQLCQEEVTYLGFKIHKGSRSLSNSRTQAILQIPVPKTKRQVREFLGKIGYCRLFIPGFAELAQPLYAATRPGNDPLVWGEKEEEAFQSLKLALTQPPALALPSLDKPFQLFVEETSGAAKGVLTQALGPWKRPVAYLSKRLDPVAAGWPRCLRAIAAAALLTREASKLTFGQDIEITSSHNLESLLRSPPDKWLTNARITQYQVLLLDPPRVRFKQTAALNPATLLPETDDTLPIHHCLDTLDSLTSTRPDLTDQPLAQAEATLFTDGSSYIRDGKRYAGAAVVTLDSVIWAEPLPIGTSAQKAELIALTKALEWSKDKSVNIYTDSRYAFATLHVHGMIYRERGWLTAGGKAIKNAPEILALLTAVWLPKRVAVMHCKGHQKDDAPTSTGNRRADEVAREVAIRPLSTQATISAGKRTADGSEFEKRTADGSEFESPKKKAKVE

SEQ ID NO: 6386 - protein, 2106 aa, synthetic construct
MPAAKRVKLDGGDKKYSIGLDIGTNSVGWAVITDEYKVPSKKFKVLGNTDRHSIKKNLIGALLFDSGETAEATRLKRTARRRYTRRKNRICYLQEIFSNEMAKVDDSFFHRLEESFLVEEDKKHERHPIFGNIVDEVAYHEKYPTIYHLRKKLVDSTDKADLRLIYLALAHMIKFRGHFLIEGDLNPDNSDVDKLFIQLVQTYNQLFEENPINASGVDAKAILSARLSKSRRLENLIAQLPGEKKNGLFGNLIALSLGLTPNFKSNFDLAEDAKLQLSKDTYDDDLDNLLAQIGDQYADLFLAAKNLSDAILLSDILRVNTEITKAPLSASMIKRYDEHHQDLTLLKALVRQQLPEKYKEIFFDQSKNGYAGYIDGGASQEEFYKFIKPILEKMDGTEELLVKLNREDLLRKQRTFDNGSIPHQIHLGELHAILRRQEDFYPFLKDNREKIEKILTFRIPYYVGPLARGNSRFAWMTRKSEETITPWNFEEVVDKGASAQSFIERMTNFDKNLPNEKVLPKHSLLYEYFTVYNELTKVKYVTEGMRKPAFLSGEQKKAIVDLLFKTNRKVTVKQLKEDYFKKIECFDSVEISGVEDRFNASLGTYHDLLKIIKDKDFLDNEENEDILEDIVLTLTLFEDREMIEERLKTYAHLFDDKVMKQLKRRRYTGWGRLSRKLINGIRDKQSGKTILDFLKSDGFANRNFMQLIHDDSLTFKEDIQKAQVSGQGDSLHEHIANLAGSPAIKKGILQTVKVVDELVKVMGRHKPENIVIEMARENQTTQKGQKNSRERMKRIEEGIKELGSQILKEHPVENTQLQNEKLYLYYLQNGRDMYVDQELDINRLSDYDVDHIVPQSFLKDDSIDNKVLTRSDKARGKSDNVPSEEVVKKMKNYWRQLLNAKLITQRKFDNLTKAERGGLSELDKAGFIKRQLVETRQITKHVAQILDSRMNTKYDENDKLIREVKVITLKSKLVSDFRKDFQFYKVREINNYHHAHDAYLNAVVGTALIKKYPKLESEFVYGDYKVYDVRKMIAKSEQEIGKATAKYFFYSNIMNFFKTEITLANGEIRKRPLIETNGETGEIVWDKGRDFATVRKVLSMPQVNIVKKTEVQTGGFSKESILPKRNSDKLIARKKDWDPKKYGGFDSPTVAYSVLVVAKVEKGKSKKLKSVKELLGITIMERSSFEKNPIDFLEAKGYKEVKKDLIIKLPKYSLFELENGRKRMLASAGELQKGNELALPSKYVNFLYLASHYEKLKGSPEDNEQKQLFVEQHKHYLDEIIEQISEFSKRVILADANLDKVLSAYNKHRDKPIREQAENIIHLFTLTNLGAPAAFKYFDTTIDRKRYTSTKEVLDATLIHQSITGLYETRIDLSQLGGDGGEAAAKEAAAKEAAAKGGTVSLQDEHRLFDIPVTTSLPDVWLQDFPQAWAETGGLGRAKCQAPIIIDLKPTAVPVSIKQYPMSLEAHMGIRQHIIKFLELGVLRPCRSPWNTPLLPVKKPGTQDYRPVQDLREINKRTVDIHPTVPNPYNLLSTLKPDYSWYTVLDLKDAFFCLPLAPQSQELFAFEWKDPERGISGQLTWTRLPQGFKNSPTLFNEALHRDLTDFRTQHPEVTLLQYVDDLLLAAPTKKACTQGTRHLLQELGEKGYRASAKKAQICQTKVTYLGYILSEGKRWLTPGRIETVARIPPPRNPREVREFLGTAGFCRLWIPGFAELAAPLYALTKPSTPFTWQTEHQLAFEALKKALLSAPALGLPDTSKPFTLFLDERQGIAKGVLTQKLGPWKRPVAYLSKKLDPVAAGWPPCLRIMAATAMLVKDSAKLTLGQPLTVITPHTLEAIVRQPPDRWITNARLTHYQALLLDTDRVQFGPPVTLNPATLLPVPENQPSPHDCRQVLAETHGTREDLKDQELPDADHTWYTDGSSYLDSGTRRAGAAVVDGHNTIWAQSLPPGTSAQKAELIALTKALELSKGKKANIYTDSRYAFATAHTHGSIYERRGWLTSEGKEIKNKAEIIALLKALFLPQEVAIIHCPGHQKGQDPVAVGNRQADRVARQAAMAEVLTLATEPDNTSHITAGKRTADGSEFEKRTADGSEFESPKKKAKVE

SEQ ID NO: 6387 - protein, 2091 aa, synthetic construct
MPAAKRVKLDGGDKKYSIGLDIGTNSVGWAVITDEYKVPSKKFKVLGNTDRHSIKKNLIGALLFDSGETAEATRLKRTARRRYTRRKNRICYLQEIFSNEMAKVDDSFFHRLEESFLVEEDKKHERHPIFGNIVDEVAYHEKYPTIYHLRKKLVDSTDKADLRLIYLALAHMIKFRGHFLIEGDLNPDNSDVDKLFIQLVQTYNQLFEENPINASGVDAKAILSARLSKSRRLENLIAQLPGEKKNGLFGNLIALSLGLTPNFKSNFDLAEDAKLQLSKDTYDDDLDNLLAQIGDQYADLFLAAKNLSDAILLSDILRVNTEITKAPLSASMIKRYDEHHQDLTLLKALVRQQLPEKYKEIFFDQSKNGYAGYIDGGASQEEFYKFIKPILEKMDGTEELLVKLNREDLLRKQRTFDNGSIPHQIHLGELHAILRRQEDFYPFLKDNREKIEKILTFRIPYYVGPLARGNSRFAWMTRKSEETITPWNFEEVVDKGASAQSFIERMTNFDKNLPNEKVLPKHSLLYEYFTVYNELTKVKYVTEGMRKPAFLSGEQKKAIVDLLFKTNRKVTVKQLKEDYFKKIECFDSVEISGVEDRFNASLGTYHDLLKIIKDKDFLDNEENEDILEDIVLTLTLFEDREMIEERLKTYAHLFDDKVMKQLKRRRYTGWGRLSRKLINGIRDKQSGKTILDFLKSDGFANRNFMQLIHDDSLTFKEDIQKAQVSGQGDSLHEHIANLAGSPAIKKGILQTVKVVDELVKVMGRHKPENIVIEMARENQTTQKGQKNSRERMKRIEEGIKELGSQILKEHPVENTQLQNEKLYLYYLQNGRDMYVDQELDINRLSDYDVDHIVPQSFLKDDSIDNKVLTRSDKARGKSDNVPSEEVVKKMKNYWRQLLNAKLITQRKFDNLTKAERGGLSELDKAGFIKRQLVETRQITKHVAQILDSRMNTKYDENDKLIREVKVITLKSKLVSDFRKDFQFYKVREINNYHHAHDAYLNAVVGTALIKKYPKLESEFVYGDYKVYDVRKMIAKSEQEIGKATAKYFFYSNIMNFFKTEITLANGEIRKRPLIETNGETGEIVWDKGRDFATVRKVLSMPQVNIVKKTEVQTGGFSKESILPKRNSDKLIARKKDWDPKKYGGFDSPTVAYSVLVVAKVEKGKSKKLKSVKELLGITIMERSSFEKNPIDFLEAKGYKEVKKDLIIKLPKYSLFELENGRKRMLASAGELQKGNELALPSKYVNFLYLASHYEKLKGSPEDNEQKQLFVEQHKHYLDEIIEQISEFSKRVILADANLDKVLSAYNKHRDKPIREQAENIIHLFTLTNLGAPAAFKYFDTTIDRKRYTSTKEVLDATLIHQSITGLYETRIDLSQLGGDGGEAAAKEAAAKEAAAKGGVPWILKKPLELTIKLDLEEQQGTLLNNSILSKKGKEELKQLFEKYSALWQSWENQVGHRRIRPHKIATGTVKPTPQKQYHINPKAKPDIQIVINDLLKQGVLIQKESTMNTPVYPVPKPNGRWRMVLDYRAVNKVTPLIAVQNQHSYGILGSLFKGRYKTTIDLSNGFWAHPIVPEDYWITAFTWQGKQYCWTVLPQGFLNSPGLFTGDVVDLLQGIPNVEVYVDDVYISHDSEKEHLEYLDILFNRLKEAGYIISLKKSNIANSIVDFLGFQITNEGRGLTDTFKEKLENITAPTTLKQLQSILGLLNFARNFIPDFTELIAPLYALIPKSTKNYVPWQIEHSTTLETLITKLNGAEYLQGRKGDKTLIMKVNASYTTGYIRYYNEGEKKPISYVSIVFSKTELKFTELEKLLTTVHKGLLKALDLSMGQNIHVYSPIVSMQNIQKTPQTAKKALASRWLSWLSYLEDPRIRFFYDPQMPALKDLPAVDTGKDNKKHPSNFQHIFYTDGSAITSPTKEGHLNAGMGIVYFINKDGNLQKQQEWSISLGNHTAQFAEIAAFEFALKKCLPLGGNILVVTDSNYVAKAYNEELDVWASNGFVNNRKKPLKHISKWKSVADLKRLRPDVVVTHEPGHQKLDSSPHAYGNNLADQLATQASFKVHAGKRTADGSEFEKRTADGSEFESPKKKAKVE

SEQ ID NO: 6388 - protein, 2091 aa, synthetic construct
MPAAKRVKLDGGDKKYSIGLDIGTNSVGWAVITDEYKVPSKKFKVLGNTDRHSIKKNLIGALLFDSGETAEATRLKRTARRRYTRRKNRICYLQEIFSNEMAKVDDSFFHRLEESFLVEEDKKHERHPIFGNIVDEVAYHEKYPTIYHLRKKLVDSTDKADLRLIYLALAHMIKFRGHFLIEGDLNPDNSDVDKLFIQLVQTYNQLFEENPINASGVDAKAILSARLSKSRRLENLIAQLPGEKKNGLFGNLIALSLGLTPNFKSNFDLAEDAKLQLSKDTYDDDLDNLLAQIGDQYADLFLAAKNLSDAILLSDILRVNTEITKAPLSASMIKRYDEHHQDLTLLKALVRQQLPEKYKEIFFDQSKNGYAGYIDGGASQEEFYKFIKPILEKMDGTEELLVKLNREDLLRKQRTFDNGSIPHQIHLGELHAILRRQEDFYPFLKDNREKIEKILTFRIPYYVGPLARGNSRFAWMTRKSEETITPWNFEEVVDKGASAQSFIERMTNFDKNLPNEKVLPKHSLLYEYFTVYNELTKVKYVTEGMRKPAFLSGEQKKAIVDLLFKTNRKVTVKQLKEDYFKKIECFDSVEISGVEDRFNASLGTYHDLLKIIKDKDFLDNEENEDILEDIVLTLTLFEDREMIEERLKTYAHLFDDKVMKQLKRRRYTGWGRLSRKLINGIRDKQSGKTILDFLKSDGFANRNFMQLIHDDSLTFKEDIQKAQVSGQGDSLHEHIANLAGSPAIKKGILQTVKVVDELVKVMGRHKPENIVIEMARENQTTQKGQKNSRERMKRIEEGIKELGSQILKEHPVENTQLQNEKLYLYYLQNGRDMYVDQELDINRLSDYDVDHIVPQSFLKDDSIDNKVLTRSDKARGKSDNVPSEEVVKKMKNYWRQLLNAKLITQRKFDNLTKAERGGLSELDKAGFIKRQLVETRQITKHVAQILDSRMNTKYDENDKLIREVKVITLKSKLVSDFRKDFQFYKVREINNYHHAHDAYLNAVVGTALIKKYPKLESEFVYGDYKVYDVRKMIAKSEQEIGKATAKYFFYSNIMNFFKTEITLANGEIRKRPLIETNGETGEIVWDKGRDFATVRKVLSMPQVNIVKKTEVQTGGFSKESILPKRNSDKLIARKKDWDPKKYGGFDSPTVAYSVLVVAKVEKGKSKKLKSVKELLGITIMERSSFEKNPIDFLEAKGYKEVKKDLIIKLPKYSLFELENGRKRMLASAGELQKGNELALPSKYVNFLYLASHYEKLKGSPEDNEQKQLFVEQHKHYLDEIIEQISEFSKRVILADANLDKVLSAYNKHRDKPIREQAENIIHLFTLTNLGAPAAFKYFDTTIDRKRYTSTKEVLDATLIHQSITGLYETRIDLSQLGGDGGEAAAKEAAAKEAAAKGGVPWLTQQPLQLTILVPLQEYQEKILSKTALPEDQKQQLKTLFVKYDNLWQHWENQVGHRKIRPHNIATGDYPPRPQKQYPINPKAKPSIQIVIDDLLKQGVLTPQNSTMNTPVYPVPKPDGRWRMVLDYREVNKTIPLTAAQNQHSAGILATIVRQKYKTTLDLANGFWAHPITPESYWLTAFTWQGKQYCWTRLPQGFLNSPALFNADVVDLLKEIPNVQVYVDDIYLSHDDPKEHVQQLEKVFQILLQAGYVVSLKKSEIGQKTVEFLGFNITKEGRGLTDTFKTKLLNITPPKDLKQLQSILGLLNFARNFIPNFAELVQPLYNLIAPAKGKYIEWSEENTKQLNMVIEALNTASNLEERLPEQRLVIKVNTSPSAGYVRYYNETGKKPIMYLNYVFSKAELKFSMLEKLLTTMHKALIKAMDLAMGQEILVYSPIVSMTKIQKTPLPERKALPIRWITWMTYLEDPRIQFHYDKTLPELKHIPDVYTSSQSPVKHPSQYEGVFYTDGSAIKSPDPTKSNNAGMGIVHATYKPEYQVLNQWSIPLGNHTAQMAEIAAVEFACKKALKIPGPVLVITDSFYVAESANKELPYWKSNGFVNNKKKPLKHISKWKSIAECLSMKPDITIQHEKGISLQIPVFILKGNALADKLATQGSYVVNAGKRTADGSEFEKRTADGSEFESPKKKAKVE

SEQ ID NO: 6389 - protein, 2091 aa, synthetic construct
MPAAKRVKLDGGDKKYSIGLDIGTNSVGWAVITDEYKVPSKKFKVLGNTDRHSIKKNLIGALLFDSGETAEATRLKRTARRRYTRRKNRICYLQEIFSNEMAKVDDSFFHRLEESFLVEEDKKHERHPIFGNIVDEVAYHEKYPTIYHLRKKLVDSTDKADLRLIYLALAHMIKFRGHFLIEGDLNPDNSDVDKLFIQLVQTYNQLFEENPINASGVDAKAILSARLSKSRRLENLIAQLPGEKKNGLFGNLIALSLGLTPNFKSNFDLAEDAKLQLSKDTYDDDLDNLLAQIGDQYADLFLAAKNLSDAILLSDILRVNTEITKAPLSASMIKRYDEHHQDLTLLKALVRQQLPEKYKEIFFDQSKNGYAGYIDGGASQEEFYKFIKPILEKMDGTEELLVKLNREDLLRKQRTFDNGSIPHQIHLGELHAILRRQEDFYPFLKDNREKIEKILTFRIPYYVGPLARGNSRFAWMTRKSEETITPWNFEEVVDKGASAQSFIERMTNFDKNLPNEKVLPKHSLLYEYFTVYNELTKVKYVTEGMRKPAFLSGEQKKAIVDLLFKTNRKVTVKQLKEDYFKKIECFDSVEISGVEDRFNASLGTYHDLLKIIKDKDFLDNEENEDILEDIVLTLTLFEDREMIEERLKTYAHLFDDKVMKQLKRRRYTGWGRLSRKLINGIRDKQSGKTILDFLKSDGFANRNFMQLIHDDSLTFKEDIQKAQVSGQGDSLHEHIANLAGSPAIKKGILQTVKVVDELVKVMGRHKPENIVIEMARENQTTQKGQKNSRERMKRIEEGIKELGSQILKEHPVENTQLQNEKLYLYYLQNGRDMYVDQELDINRLSDYDVDHIVPQSFLKDDSIDNKVLTRSDKARGKSDNVPSEEVVKKMKNYWRQLLNAKLITQRKFDNLTKAERGGLSELDKAGFIKRQLVETRQITKHVAQILDSRMNTKYDENDKLIREVKVITLKSKLVSDFRKDFQFYKVREINNYHHAHDAYLNAVVGTALIKKYPKLESEFVYGDYKVYDVRKMIAKSEQEIGKATAKYFFYSNIMNFFKTEITLANGEIRKRPLIETNGETGEIVWDKGRDFATVRKVLSMPQVNIVKKTEVQTGGFSKESILPKRNSDKLIARKKDWDPKKYGGFDSPTVAYSVLVVAKVEKGKSKKLKSVKELLGITIMERSSFEKNPIDFLEAKGYKEVKKDLIIKLPKYSLFELENGRKRMLASAGELQKGNELALPSKYVNFLYLASHYEKLKGSPEDNEQKQLFVEQHKHYLDEIIEQISEFSKRVILADANLDKVLSAYNKHRDKPIREQAENIIHLFTLTNLGAPAAFKYFDTTIDRKRYTSTKEVLDATLIHQSITGLYETRIDLSQLGGDGGEAAAKEAAAKEAAAKGGVPWLTQQPLQLTILVPLQEYQEKILSKTALPEDQKQQLKTLFVKYDNLWQHWENQVGHRKIRPHNIATGDYPPRPQKQYPINPKAKPSIQIVIDDLLKQGVLTPQNSTMNTPVYPVPKPDGRWRMVLDYREVNKTIPLTAAQNQHSAGILATIVRQKYKTTLDLANGFWAHPITPESYWLTAFTWQGKQYCWTRLPQGFLNSPALFNADVVDLLKEIPNVQVYVDDIYLSHDDPKEHVQQLEKVFQILLQAGYVVSLKKSEIGQKTVEFLGFNITKEGRGLTDTFKTKLLNITPPKDLKQLQSILGKLNFARNFIPNFAELVQPLYNLIAPAKGKYIEWSEENTKQLNMVIEALNTASNLEERLPEQRLVIKVNTSPSAGYVRYYNETGKKPIMYLNYVFSKAELKFSMLEKLLTTMHKALIKAMDLAMGQEILVYSPIVSMTKIQKTPLPERKALPIRWITWMTYLEDPRIQFHYDKTLPELKHIPDVYTSSQSPVKHPSQYEGVFYTDGSAIKSPDPTKSNNAGMGIVHATYKPEYQVLNQWSIPLGNHTAQMAEIAAVEFACKKALKIPGPVLVITDSFYVAESANKELPYWKSNGFVNNKKKPLKHISKWKSIAECLSMKPDITIQHEKGISLQIPVFILKGNALADKLATQGSYVVNAGKRTADGSEFEKRTADGSEFESPKKKAKVE

SEQ ID NO: 6390 - protein, 2222 aa, synthetic construct
MPAAKRVKLDGGDKKYSIGLDIGTNSVGWAVITDEYKVPSKKFKVLGNTDRHSIKKNLIGALLFDSGETAEATRLKRTARRRYTRRKNRICYLQEIFSNEMAKVDDSFFHRLEESFLVEEDKKHERHPIFGNIVDEVAYHEKYPTIYHLRKKLVDSTDKADLRLIYLALAHMIKFRGHFLIEGDLNPDNSDVDKLFIQLVQTYNQLFEENPINASGVDAKAILSARLSKSRRLENLIAQLPGEKKNGLFGNLIALSLGLTPNFKSNFDLAEDAKLQLSKDTYDDDLDNLLAQIGDQYADLFLAAKNLSDAILLSDILRVNTEITKAPLSASMIKRYDEHHQDLTLLKALVRQQLPEKYKEIFFDQSKNGYAGYIDGGASQEEFYKFIKPILEKMDGTEELLVKLNREDLLRKQRTFDNGSIPHQIHLGELHAILRRQEDFYPFLKDNREKIEKILTFRIPYYVGPLARGNSRFAWMTRKSEETITPWNFEEVVDKGASAQSFIERMTNFDKNLPNEKVLPKHSLLYEYFTVYNELTKVKYVTEGMRKPAFLSGEQKKAIVDLLFKTNRKVTVKQLKEDYFKKIECFDSVEISGVEDRFNASLGTYHDLLKIIKDKDFLDNEENEDILEDIVLTLTLFEDREMIEERLKTYAHLFDDKVMKQLKRRRYTGWGRLSRKLINGIRDKQSGKTILDFLKSDGFANRNFMQLIHDDSLTFKEDIQKAQVSGQGDSLHEHIANLAGSPAIKKGILQTVKVVDELVKVMGRHKPENIVIEMARENQTTQKGQKNSRERMKRIEEGIKELGSQILKEHPVENTQLQNEKLYLYYLQNGRDMYVDQELDINRLSDYDVDHIVPQSFLKDDSIDNKVLTRSDKARGKSDNVPSEEVVKKMKNYWRQLLNAKLITQRKFDNLTKAERGGLSELDKAGFIKRQLVETRQITKHVAQILDSRMNTKYDENDKLIREVKVITLKSKLVSDFRKDFQFYKVREINNYHHAHDAYLNAVVGTALIKKYPKLESEFVYGDYKVYDVRKMIAKSEQEIGKATAKYFFYSNIMNFFKTEITLANGEIRKRPLIETNGETGEIVWDKGRDFATVRKVLSMPQVNIVKKTEVQTGGFSKESILPKRNSDKLIARKKDWDPKKYGGFDSPTVAYSVLVVAKVEKGKSKKLKSVKELLGITIMERSSFEKNPIDFLEAKGYKEVKKDLIIKLPKYSLFELENGRKRMLASAGELQKGNELALPSKYVNFLYLASHYEKLKGSPEDNEQKQLFVEQHKHYLDEIIEQISEFSKRVILADANLDKVLSAYNKHRDKPIREQAENIIHLFTLTNLGAPAAFKYFDTTIDRKRYTSTKEVLDATLIHQSITGLYETRIDLSQLGGDGGEAAAKEAAAKEAAAKGGTLGDQGSRGSDPLPEPRVTLTVEGIPTEFLVNTGAEHSVLTKPMGKMGSKRTVVAGATGSKVYPWTTKRLLKIGQKQVTHSFLVIPECPAPLLGRDLLTKLKAQIQFSTEGPQVTWEDRPAMCLVLNLEEEYRLHEKPVPPSIDPSWLQLFPMVWAEKAGMGLANQVPPVVVELKSDASPVAVRQYPMSKEAREGIRPHIQRFLDLGILVPCQSPWNTPLLPVKKPGTNDYRPVQDLREVNKRVQDIHPTVPNPYNLLSSLPPSHTWYSVLDLKDAFFCLKLHPNSQPLFAFEWRDPEKGNTGQLTWTRLPQGFKNSPTLFDEALHRDLASFRALNPQVVMLQYVDDLLVAAPTYRDCKEGTRRLLQELSKLGYRVSAKKAQLCREEVTYLGYLLKGGKRWLTPARKATVMKIPTPTTPRQVREFLGTAGFCRLWIPGFASLAAPLYPLTREKVPFTWTEAHQEAFGRIKEALLSAPALALPDLTKPFALYVDEKEGVARGVLTQTLGPWRRPVAYLSKKLDPVASGWPTCLKAIAAVALLLKDADKLTLGQNVLVIAPHNLESIVRQPPDRWMTNARMTHYQSLLLNERVSFAPPAILNPATLLPVESDDTPIHICSEILAEETGTRPDLRDQPLPGVPAWYTDGSSFIMDGRRQAGAAIVDNKRTVWASNLPEGTSAQKAELIALTQALRLAEGKSINIYTDSRYAFATAHVHGAIYKQRGLLTSAGKDIKNKEEILALLEAIHLPKRVAIIHCPGHQRGTDPVATGNRKADEAAKQAAQSTRILTETTKNAGKRTADGSEFEKRTADGSEFESPKKKAKVE

SEQ ID NO: 6391 - protein, 2131 aa, synthetic construct
MPAAKRVKLDGGDKKYSIGLDIGTNSVGWAVITDEYKVPSKKFKVLGNTDRHSIKKNLIGALLFDSGETAEATRLKRTARRRYTRRKNRICYLQEIFSNEMAKVDDSFFHRLEESFLVEEDKKHERHPIFGNIVDEVAYHEKYPTIYHLRKKLVDSTDKADLRLIYLALAHMIKFRGHFLIEGDLNPDNSDVDKLFIQLVQTYNQLFEENPINASGVDAKAILSARLSKSRRLENLIAQLPGEKKNGLFGNLIALSLGLTPNFKSNFDLAEDAKLQLSKDTYDDDLDNLLAQIGDQYADLFLAAKNLSDAILLSDILRVNTEITKAPLSASMIKRYDEHHQDLTLLKALVRQQLPEKYKEIFFDQSKNGYAGYIDGGASQEEFYKFIKPILEKMDGTEELLVKLNREDLLRKQRTFDNGSIPHQIHLGELHAILRRQEDFYPFLKDNREKIEKILTFRIPYYVGPLARGNSRFAWMTRKSEETITPWNFEEVVDKGASAQSFIERMTNFDKNLPNEKVLPKHSLLYEYFTVYNELTKVKYVTEGMRKPAFLSGEQKKAIVDLLFKTNRKVTVKQLKEDYFKKIECFDSVEISGVEDRFNASLGTYHDLLKIIKDKDFLDNEENEDILEDIVLTLTLFEDREMIEERLKTYAHLFDDKVMKQLKRRRYTGWGRLSRKLINGIRDKQSGKTILDFLKSDGFANRNFMQLIHDDSLTFKEDIQKAQVSGQGDSLHEHIANLAGSPAIKKGILQTVKVVDELVKVMGRHKPENIVIEMARENQTTQKGQKNSRERMKRIEEGIKELGSQILKEHPVENTQLQNEKLYLYYLQNGRDMYVDQELDINRLSDYDVDHIVPQSFLKDDSIDNKVLTRSDKARGKSDNVPSEEVVKKMKNYWRQLLNAKLITQRKFDNLTKAERGGLSELDKAGFIKRQLVETRQITKHVAQILDSRMNTKYDENDKLIREVKVITLKSKLVSDFRKDFQFYKVREINNYHHAHDAYLNAVVGTALIKKYPKLESEFVYGDYKVYDVRKMIAKSEQEIGKATAKYFFYSNIMNFFKTEITLANGEIRKRPLIETNGETGEIVWDKGRDFATVRKVLSMPQVNIVKKTEVQTGGFSKESILPKRNSDKLIARKKDWDPKKYGGFDSPTVAYSVLVVAKVEKGKSKKLKSVKELLGITIMERSSFEKNPIDFLEAKGYKEVKKDLIIKLPKYSLFELENGRKRMLASAGELQKGNELALPSKYVNFLYLASHYEKLKGSPEDNEQKQLFVEQHKHYLDEIIEQISEFSKRVILADANLDKVLSAYNKHRDKPIREQAENIIHLFTLTNLGAPAAFKYFDTTIDRKRYTSTKEVLDATLIHQSITGLYETRIDLSQLGGDGGEAAAKEAAAKEAAAKGGLLGRDLLTKLKAQIQFSTEGPQVTWEDRPAMCLVLNLEEEYRLHEKPVPPSIDPSWLQLFPMVWAEKAGMGLANQVPPVVVELKSDASPVAVRQYPMSKEAREGIRPHIQRFLDLGILVPCQSPWNTPLLPVKKPGTNDYRPVQDLREVNKRVQDIHPTVPNPYNLLSSLPPSHTWYSVLDLKDAFFCLKLHPNSQPLFAFEWRDPEKGNTGQLTWTRLPQGFKNSPTLFNEALHRDLASFRALNPQVVMLQYVDDLLVAAPTYRDCKEGTRRLLQELSKLGYRVSAKKAQLCREEVTYLGYLLKGGKRWLTPARKATVMKIPTPTTPRQVREFLGKAGFCRLFIPGFASLAAPLYPLTRPKVPFTWTEAHQEAFGRIKEALLSAPALALPDLTKPFALYVDEKEGVARGVLTQTLGPWRRPVAYLSKKLDPVASGWPTCLKAIAAVALLLKDADKLTLGQNVLVIAPHNLESIVRQPPDRWMTNARMTHYQSLLLNERVSFAPPAILNPATLLPVESDDTPIHICSEILAEETGTRPDLRDQPLPGVPAWYTDGSSFIMDGRRQAGAAIVDNKRTVWASNLPEGTSAQKAELIALTQALRLAEGKSINIYTDSRYAFATAHVHGAIYKQRGWLTSAGKDIKNKEEILALLEAIHLPKRVAIIHCPGHQRGTDPVATGNRKADEAAKQAAQSTRILTETTKNAGKRTADGSEFEKRTADGSEFESPKKKAKVE

SEQ ID NO: 6392 - protein, 2222 aa, synthetic construct
MPAAKRVKLDGGDKKYSIGLDIGTNSVGWAVITDEYKVPSKKFKVLGNTDRHSIKKNLIGALLFDSGETAEATRLKRTARRRYTRRKNRICYLQEIFSNEMAKVDDSFFHRLEESFLVEEDKKHERHPIFGNIVDEVAYHEKYPTIYHLRKKLVDSTDKADLRLIYLALAHMIKFRGHFLIEGDLNPDNSDVDKLFIQLVQTYNQLFEENPINASGVDAKAILSARLSKSRRLENLIAQLPGEKKNGLFGNLIALSLGLTPNFKSNFDLAEDAKLQLSKDTYDDDLDNLLAQIGDQYADLFLAAKNLSDAILLSDILRVNTEITKAPLSASMIKRYDEHHQDLTLLKALVRQQLPEKYKEIFFDQSKNGYAGYIDGGASQEEFYKFIKPILEKMDGTEELLVKLNREDLLRKQRTFDNGSIPHQIHLGELHAILRRQEDFYPFLKDNREKIEKILTFRIPYYVGPLARGNSRFAWMTRKSEETITPWNFEEVVDKGASAQSFIERMTNFDKNLPNEKVLPKHSLLYEYFTVYNELTKVKYVTEGMRKPAFLSGEQKKAIVDLLFKTNRKVTVKQLKEDYFKKIECFDSVEISGVEDRFNASLGTYHDLLKIIKDKDFLDNEENEDILEDIVLTLTLFEDREMIEERLKTYAHLFDDKVMKQLKRRRYTGWGRLSRKLINGIRDKQSGKTILDFLKSDGFANRNFMQLIHDDSLTFKEDIQKAQVSGQGDSLHEHIANLAGSPAIKKGILQTVKVVDELVKVMGRHKPENIVIEMARENQTTQKGQKNSRERMKRIEEGIKELGSQILKEHPVENTQLQNEKLYLYYLQNGRDMYVDQELDINRLSDYDVDHIVPQSFLKDDSIDNKVLTRSDKARGKSDNVPSEEVVKKMKNYWRQLLNAKLITQRKFDNLTKAERGGLSELDKAGFIKRQLVETRQITKHVAQILDSRMNTKYDENDKLIREVKVITLKSKLVSDFRKDFQFYKVREINNYHHAHDAYLNAVVGTALIKKYPKLESEFVYGDYKVYDVRKMIAKSEQEIGKATAKYFFYSNIMNFFKTEITLANGEIRKRPLIETNGETGEIVWDKGRDFATVRKVLSMPQVNIVKKTEVQTGGFSKESILPKRNSDKLIARKKDWDPKKYGGFDSPTVAYSVLVVAKVEKGKSKKLKSVKELLGITIMERSSFEKNPIDFLEAKGYKEVKKDLIIKLPKYSLFELENGRKRMLASAGELQKGNELALPSKYVNFLYLASHYEKLKGSPEDNEQKQLFVEQHKHYLDEIIEQISEFSKRVILADANLDKVLSAYNKHRDKPIREQAENIIHLFTLTNLGAPAAFKYFDTTIDRKRYTSTKEVLDATLIHQSITGLYETRIDLSQLGGDGGEAAAKEAAAKEAAAKGGTLGDQGSRGSDPLPEPRVTLTVEGIPTEFLVNTGAEHSVLTKPMGKMGSKRTVVAGATGSKVYPWTTKRLLKIGQKQVTHSFLVIPECPAPLLGRDLLTKLKAQIQFSTEGPQVTWEDRPAMCLVLNLEEEYRLHEKPVPPSIDPSWLQLFPMVWAEKAGMGLANQVPPVVVELKSDASPVAVRQYPMSKEAREGIRPHIQRFLDLGILVPCQSPWNTPLLPVKKPGTNDYRPVQDLREVNKRVQDIHPTVPNPYNLLSSLPPSHTWYSVLDLKDAFFCLKLHPNSQPLFAFEWRDPEKGNTGQLTWTRLPQGFKNSPTLFNEALHRDLASFRALNPQVVMLQYVDDLLVAAPTYRDCKEGTRRLLQELSKLGYRVSAKKAQLCREEVTYLGYLLKGGKRWLTPARKATVMKIPTPTTPRQVREFLGKAGFCRLFIPGFASLAAPLYPLTRPKVPFTWTEAHQEAFGRIKEALLSAPALALPDLTKPFALYVDEKEGVARGVLTQTLGPWRRPVAYLSKKLDPVASGWPTCLKAIAAVALLLKDADKLTLGQNVLVIAPHNLESIVRQPPDRWMTNARMTHYQSLLLNERVSFAPPAILNPATLLPVESDDTPIHICSEILAEETGTRPDLRDQPLPGVPAWYTDGSSFIMDGRRQAGAAIVDNKRTVWASNLPEGTSAQKAELIALTQALRLAEGKSINIYTDSRYAFATAHVHGAIYKQRGWLTSAGKDIKNKEEILALLEAIHLPKRVAIIHCPGHQRGTDPVATGNRKADEAAKQAAQSTRILTETTKNAGKRTADGSEFEKRTADGSEFESPKKKAKVE

SEQ ID NO: 6393 - protein, 2100 aa, synthetic construct
MPAAKRVKLDGGDKKYSIGLDIGTNSVGWAVITDEYKVPSKKFKVLGNTDRHSIKKNLIGALLFDSGETAEATRLKRTARRRYTRRKNRICYLQEIFSNEMAKVDDSFFHRLEESFLVEEDKKHERHPIFGNIVDEVAYHEKYPTIYHLRKKLVDSTDKADLRLIYLALAHMIKFRGHFLIEGDLNPDNSDVDKLFIQLVQTYNQLFEENPINASGVDAKAILSARLSKSRRLENLIAQLPGEKKNGLFGNLIALSLGLTPNFKSNFDLAEDAKLQLSKDTYDDDLDNLLAQIGDQYADLFLAAKNLSDAILLSDILRVNTEITKAPLSASMIKRYDEHHQDLTLLKALVRQQLPEKYKEIFFDQSKNGYAGYIDGGASQEEFYKFIKPILEKMDGTEELLVKLNREDLLRKQRTFDNGSIPHQIHLGELHAILRRQEDFYPFLKDNREKIEKILTFRIPYYVGPLARGNSRFAWMTRKSEETITPWNFEEVVDKGASAQSFIERMTNFDKNLPNEKVLPKHSLLYEYFTVYNELTKVKYVTEGMRKPAFLSGEQKKAIVDLLFKTNRKVTVKQLKEDYFKKIECFDSVEISGVEDRFNASLGTYHDLLKIIKDKDFLDNEENEDILEDIVLTLTLFEDREMIEERLKTYAHLFDDKVMKQLKRRRYTGWGRLSRKLINGIRDKQSGKTILDFLKSDGFANRNFMQLIHDDSLTFKEDIQKAQVSGQGDSLHEHIANLAGSPAIKKGILQTVKVVDELVKVMGRHKPENIVIEMARENQTTQKGQKNSRERMKRIEEGIKELGSQILKEHPVENTQLQNEKLYLYYLQNGRDMYVDQELDINRLSDYDVDHIVPQSFLKDDSIDNKVLTRSDKARGKSDNVPSEEVVKKMKNYWRQLLNAKLITQRKFDNLTKAERGGLSELDKAGFIKRQLVETRQITKHVAQILDSRMNTKYDENDKLIREVKVITLKSKLVSDFRKDFQFYKVREINNYHHAHDAYLNAVVGTALIKKYPKLESEFVYGDYKVYDVRKMIAKSEQEIGKATAKYFFYSNIMNFFKTEITLANGEIRKRPLIETNGETGEIVWDKGRDFATVRKVLSMPQVNIVKKTEVQTGGFSKESILPKRNSDKLIARKKDWDPKKYGGFDSPTVAYSVLVVAKVEKGKSKKLKSVKELLGITIMERSSFEKNPIDFLEAKGYKEVKKDLIIKLPKYSLFELENGRKRMLASAGELQKGNELALPSKYVNFLYLASHYEKLKGSPEDNEQKQLFVEQHKHYLDEIIEQISEFSKRVILADANLDKVLSAYNKHRDKPIREQAENIIHLFTLTNLGAPAAFKYFDTTIDRKRYTSTKEVLDATLIHQSITGLYETRIDLSQLGGDGGEAAAKEAAAKEAAAKGGLGIEDEYRLHETSTEPDVSLGSTWLSDFPQAWAETGGMGLAVRQAPLIIPLKATSTPVSIQQYPMSHEARLGIKPHIQRLLDQGILVPCQSPWNTPLLPVKKPGTNDYRPVQDLREVNKRVEDIHPTVPNPYNLLSGLPPSHQWYTVLDLKDAFFCLRLHPTSQPLFAFEWRDPGMGISGQLTWTRLPQGFKNSPTLFNEALHRDLADFRIQHPDLILLQYVDDILLAATSELDCQQGTRALLQTLGDLGYRASAKKAQICQKQVKYLGYLLREGQRWLTEARKETVMGQPVPKTPRQLREFLGKAGFCRLFIPGFAEMAAPLYPLTKPGTLFSWGPDQQKAYQEIKQALLTAPALGLPDLTKPFELFVDEKQGYAKGVLTQKLGPWRRPVAYLSKKLDPVAAGWPPCLRMVAAIAVLTKDAGKLTMGQPLVILAPHAVEALVKQPPDRWLSNARMTHYQAMLLDTDRVQFGPVVALNPATLLPLPEEGAPHDCLEILAETHGTRPDLTDQPIPDADHTWYTDGSSFLQEGQRKAGAAVTTETEVIWAGALPAGTSAQRAELIALTQALKMAEGKRLNVYTDSRYAFATAHIHGEIYRRRGWLTSEGREIKNKSEILALLKALFLPKRLSIIHCLGHQKGDSAEARGNRLADQAAREAAIKTPPDTSTLLIAGKRTADGSEFEKRTADGSEFESPKKKAKVE

SEQ ID NO: 6394 - protein, 2100 aa, synthetic construct; identical to SEQ ID NO: 6393

SEQ ID NO: 6395 - protein, 2100 aa, synthetic construct
MPAAKRVKLDGGDKKYSIGLDIGTNSVGWAVITDEYKVPSKKFKVLGNTDRHSIKKNLIGALLFDSGETAEATRLKRTARRRYTRRKNRICYLQEIFSNEMAKVDDSFFHRLEESFLVEEDKKHERHPIFGNIVDEVAYHEKYPTIYHLRKKLVDSTDKADLRLIYLALAHMIKFRGHFLIEGDLNPDNSDVDKLFIQLVQTYNQLFEENPINASGVDAKAILSARLSKSRRLENLIAQLPGEKKNGLFGNLIALSLGLTPNFKSNFDLAEDAKLQLSKDTYDDDLDNLLAQIGDQYADLFLAAKNLSDAILLSDILRVNTEITKAPLSASMIKRYDEHHQDLTLLKALVRQQLPEKYKEIFFDQSKNGYAGYIDGGASQEEFYKFIKPILEKMDGTEELLVKLNREDLLRKQRTFDNGSIPHQIHLGELHAILRRQEDFYPFLKDNREKIEKILTFRIPYYVGPLARGNSRFAWMTRKSEETITPWNFEEVVDKGASAQSFIERMTNFDKNLPNEKVLPKHSLLYEYFTVYNELTKVKYVTEGMRKPAFLSGEQKKAIVDLLFKTNRKVTVKQLKEDYFKKIECFDSVEISGVEDRFNASLGTYHDLLKIIKDKDFLDNEENEDILEDIVLTLTLFEDREMIEERLKTYAHLFDDKVMKQLKRRRYTGWGRLSRKLINGIRDKQSGKTILDFLKSDGFANRNFMQLIHDDSLTFKEDIQKAQVSGQGDSLHEHIANLAGSPAIKKGILQTVKVVDELVKVMGRHKPENIVIEMARENQTTQKGQKNSRERMKRIEEGIKELGSQILKEHPVENTQLQNEKLYLYYLQNGRDMYVDQELDINRLSDYDVDHIVPQSFLKDDSIDNKVLTRSDKARGKSDNVPSEEVVKKMKNYWRQLLNAKLITQRKFDNLTKAERGGLSELDKAGFIKRQLVETRQITKHVAQILDSRMNTKYDENDKLIREVKVITLKSKLVSDFRKDFQFYKVREINNYHHAHDAYLNAVVGTALIKKYPKLESEFVYGDYKVYDVRKMIAKSEQEIGKATAKYFFYSNIMNFFKTEITLANGEIRKRPLIETNGETGEIVWDKGRDFATVRKVLSMPQVNIVKKTEVQTGGFSKESILPKRNSDKLIARKKDWDPKKYGGFDSPTVAYSVLVVAKVEKGKSKKLKSVKELLGITIMERSSFEKNPIDFLEAKGYKEVKKDLIIKLPKYSLFELENGRKRMLASAGELQKGNELALPSKYVNFLYLASHYEKLKGSPEDNEQKQLFVEQHKHYLDEIIEQISEFSKRVILADANLDKVLSAYNKHRDKPIREQAENIIHLFTLTNLGAPAAFKYFDTTIDRKRYTSTKEVLDATLIHQSITGLYETRIDLSQLGGDGGEAAAKEAAAKEAAAKGGTLNIEDEYRLHETSKGPDVPLGSTWLSDFPQAWAETGGMGLAVRQAPLIIPLKATSTPVSIKQYPMSQEARLGIKPHIQRLLDQGILVPCQSPWNTPLLPVKKPGTNDYRPVQDLREVNKRVEDIHPTVPNPYNLLSGLPPSHQWYTVLDLKDAFFCLRLHPTSQSLFAFEWRDPEMGISGQLTWTRLPQGFKNSPTLFNEALHRDLADFRIQHPDLILLQYVDDLLLAATSELDCQQGTRALLQTLGDLGYRASAKKAQICQKQVKYLGYLLKEGQRWLTEARKETVMGQPTPKTPRQLREFLGTAGFCRLWIPGFAEMAAPLYPLTKPGTLFEWGPDQQKAYQEIKQALLTAPALGLPDLTKPFELFVDEKQGYAKGVLTQKLGPWRRPVAYLSKKLDPVAAGWPPCLRMVAAIAVLTKDAGKLTMGQPLVILAPHAVEALVKQPPDRWLSNARMTHYQALLLDTDRVQFGPIVALNPATLLPLPEEGLQHDCLDILAEAHGTRPDLTDQPLPDADHTWYTDGSSFLQEGQRKAGAAVTTETEVVWAKALPAGTSAQRAELIALTQALKMAEGKKLNVYTDSRYAFATAHIHGEIYRRRGWLTSEGKEIKNKDEILALLKALFLPKRLSIIHCPGHQKGNRAEARGNRMADQAAREVATRETPETSTLLAGKRTADGSEFEKRTADGSEFESPKKKAKVE

SEQ ID NO: 6396 - protein, 2100 aa, synthetic construct
MPAAKRVKLDGGDKKYSIGLDIGTNSVGWAVITDEYKVPSKKFKVLGNTDRHSIKKNLIGALLFDSGETAEATRLKRTARRRYTRRKNRICYLQEIFSNEMAKVDDSFFHRLEESFLVEEDKKHERHPIFGNIVDEVAYHEKYPTIYHLRKKLVDSTDKADLRLIYLALAHMIKFRGHFLIEGDLNPDNSDVDKLFIQLVQTYNQLFEENPINASGVDAKAILSARLSKSRRLENLIAQLPGEKKNGLFGNLIALSLGLTPNFKSNFDLAEDAKLQLSKDTYDDDLDNLLAQIGDQYADLFLAAKNLSDAILLSDILRVNTEITKAPLSASMIKRYDEHHQDLTLLKALVRQQLPEKYKEIFFDQSKNGYAGYIDGGASQEEFYKFIKPILEKMDGTEELLVKLNREDLLRKQRTFDNGSIPHQIHLGELHAILRRQEDFYPFLKDNREKIEKILTFRIPYYVGPLARGNSRFAWMTRKSEETITPWNFEEVVDKGASAQSFIERMTNFDKNLPNEKVLPKHSLLYEYFTVYNELTKVKYVTEGMRKPAFLSGEQKKAIVDLLFKTNRKVTVKQLKEDYFKKIECFDSVEISGVEDRFNASLGTYHDLLKIIKDKDFLDNEENEDILEDIVLTLTLFEDREMIEERLKTYAHLFDDKVMKQLKRRRYTGWGRLSRKLINGIRDKQSGKTILDFLKSDGFANRNFMQLIHDDSLTFKEDIQKAQVSGQGDSLHEHIANLAGSPAIKKGILQTVKVVDELVKVMGRHKPENIVIEMARENQTTQKGQKNSRERMKRIEEGIKELGSQILKEHPVENTQLQNEKLYLYYLQNGRDMYVDQELDINRLSDYDVDHIVPQSFLKDDSIDNKVLTRSDKARGKSDNVPSEEVVKKMKNYWRQLLNAKLITQRKFDNLTKAERGGLSELDKAGFIKRQLVETRQITKHVAQILDSRMNTKYDENDKLIREVKVITLKSKLVSDFRKDFQFYKVREINNYHHAHDAYLNAVVGTALIKKYPKLESEFVYGDYKVYDVRKMIAKSEQEIGKATAKYFFYSNIMNFFKTEITLANGEIRKRPLIETNGETGEIVWDKGRDFATVRKVLSMPQVNIVKKTEVQTGGFSKESILPKRNSDKLIARKKDWDPKKYGGFDSPTVAYSVLVVAKVEKGKSKKLKSVKELLGITIMERSSFEKNPIDFLEAKGYKEVKKDLIIKLPKYSLFELENGRKRMLASAGELQKGNELALPSKYVNFLYLASHYEKLKGSPEDNEQKQLFVEQHKHYLDEIIEQISEFSKRVILADANLDKVLSAYNKHRDKPIREQAENIIHLFTLTNLGAPAAFKYFDTTIDRKRYTSTKEVLDATLIHQSITGLYETRIDLSQLGGDGGEAAAKEAAAKEAAAKGGTLNIEDEYRLHEISTEPDVSPGSTWLSDFPQAWAETGGMGLAVRQAPLIIPLKATSTPVSIKQYPMSQEAKLGIKPHIQRLLDQGILVPCQSPWNTPLLPVKKPGTNDYRPVQGLREVNKRVEDIHPTVPNPYNLLSGLPTSHRWYTVLDLKDAFFCLRLHPTSQPLFASEWRDPGMGISGQLTWTRLPQGFKNSPTLFDEALHRGLADFRIQHPDLILLQYVDDLLLAATSELDCQQGTRALLKTLGNLGYRASAKKAQICQKQVKYLGYLLREGQRWLTEARKETVMGQPTPKTPRQLREFLGTAGFCRLWIPRFAEMAAPLYPLTKTGTLFNWGPDQQKAYHEIKQALLTAPALGLPDLTKPFELFVDEKQGYAKGVLTQKLGPWRRPVAYLSKKLDPVAAGWPPCLRMVAAIAVLTKDAGKLTMGQPLVILAPHAVEALVKQPPDRWLSNARMTHYQAMLLDTDRVQFGPVVALNPATLLPLPEEGAPHDCLEILAETHGTEPDLTDQPIPDADHTWYTDGSSFLQEGQRKAGAAVTTETEVIWARALPAGTSAQRAELIALTQALKMAEGKRLNVYTDSRYAFATAHIHGEIYKRRGLLTSEGREIKNKSEILALLKALFLPKRLSIIHCLGHQKGDSAEARGNRLADQAAREAAIKTPPDTSTLLAGKRTADGSEFEKRTADGSEFESPKKKAKVE

SEQ ID NO: 6397 - protein, 2120 aa, synthetic construct
MPAAKRVKLDGGDKKYSIGLDIGTNSVGWAVITDEYKVPSKKFKVLGNTDRHSIKKNLIGALLFDSGETAEATRLKRTARRRYTRRKNRICYLQEIFSNEMAKVDDSFFHRLEESFLVEEDKKHERHPIFGNIVDEVAYHEKYPTIYHLRKKLVDSTDKADLRLIYLALAHMIKFRGHFLIEGDLNPDNSDVDKLFIQLVQTYNQLFEENPINASGVDAKAILSARLSKSRRLENLIAQLPGEKKNGLFGNLIALSLGLTPNFKSNFDLAEDAKLQLSKDTYDDDLDNLLAQIGDQYADLFLAAKNLSDAILLSDILRVNTEITKAPLSASMIKRYDEHHQDLTLLKALVRQQLPEKYKEIFFDQSKNGYAGYIDGGASQEEFYKFIKPILEKMDGTEELLVKLNREDLLRKQRTFDNGSIPHQIHLGELHAILRRQEDFYPFLKDNREKIEKILTFRIPYYVGPLARGNSRFAWMTRKSEETITPWNFEEVVDKGASAQSFIERMTNFDKNLPNEKVLPKHSLLYEYFTVYNELTKVKYVTEGMRKPAFLSGEQKKAIVDLLFKTNRKVTVKQLKEDYFKKIECFDSVEISGVEDRFNASLGTYHDLLKIIKDKDFLDNEENEDILEDIVLTLTLFEDREMIEERLKTYAHLFDDKVMKQLKRRRYTGWGRLSRKLINGIRDKQSGKTILDFLKSDGFANRNFMQLIHDDSLTFKEDIQKAQVSGQGDSLHEHIANLAGSPAIKKGILQTVKVVDELVKVMGRHKPENIVIEMARENQTTQKGQKNSRERMKRIEEGIKELGSQILKEHPVENTQLQNEKLYLYYLQNGRDMYVDQELDINRLSDYDVDHIVPQSFLKDDSIDNKVLTRSDKARGKSDNVPSEEVVKKMKNYWRQLLNAKLITQRKFDNLTKAERGGLSELDKAGFIKRQLVETRQITKHVAQILDSRMNTKYDENDKLIREVKVITLKSKLVSDFRKDFQFYKVREINNYHHAHDAYLNAVVGTALIKKYPKLESEFVYGDYKVYDVRKMIAKSEQEIGKATAKYFFYSNIMNFFKTEITLANGEIRKRPLIETNGETGEIVWDKGRDFATVRKVLSMPQVNIVKKTEVQTGGFSKESILPKRNSDKLIARKKDWDPKKYGGFDSPTVAYSVLVVAKVEKGKSKKLKSVKELLGITIMERSSFEKNPIDFLEAKGYKEVKKDLIIKLPKYSLFELENGRKRMLASAGELQKGNELALPSKYVNFLYLASHYEKLKGSPEDNEQKQLFVEQHKHYLDEIIEQISEFSKRVILADANLDKVLSAYNKHRDKPIREQAENIIHLFTLTNLGAPAAFKYFDTTIDRKRYTSTKEVLDATLIHQSITGLYETRIDLSQLGGDGGEAAAKEAAAKEAAAKGGVQEISDSRPMLHIYLNGRRFLGLLDTGADKTCIAGRDWPANWPIHQTESSLQGLGMACGVARSSQPLRWQHEDKSGIIHPFVIPTLPFTLWGRDIMKDIKVRLMTDSPDDSQDLMIGAIESNLFADQISWKSDQPVWLNQWPLKQEKLQALQQLVTEQLQLGHLEESNSPWNTPVFVIKKKSGKWRLLQDLRAVNATMHDMGALQPGLPSPVAVPKGWEIIIIDLQDCFFNIKLHPEDCKRFAFSVPSPNFKRPYQRFQWKVLPQGMKNSPTLCQKFVDKAILTVRDKYQDSYIVHYMDDILLAHPSRSIVDEILTSMIQALNKHGLVVSTEKIQKYDNLKYLGTHIQGDSVSYQKLQIRTDKLRTLNDFQKLLGNINWIRPFLKLTTGELKPLFEILNGDSNPISTRKLTPEACKALQLMNERLSTARVKRLDLSQPWSLCILKTEYTPTACLWQDGVVEWIHLPHISPKVITPYDIFCTQLIIKGRHRSKELFSKDPDYIVVPYTKVQFDLLLQEKEDWPISLLGFLGEVHFHLPKDPLLTFTLQTAIIFPHMTSTTPLEKGIVIFTDGSANGRSVTYIQGREPIIKENTQNTAQQAEIVAVITAFEEVSQPFNLYTDSKYVTGLFPEIETATLSPRTKIYTELKHLQRLIHKRQEKFYIGHIRGHTGLPGPLAQGNAYADSLTRILTAAGKRTADGSEFEKRTADGSEFESPKKKAKVE

SEQ ID NO: 6398 - protein, 2091 aa, synthetic construct
MPAAKRVKLDGGDKKYSIGLDIGTNSVGWAVITDEYKVPSKKFKVLGNTDRHSIKKNLIGALLFDSGETAEATRLKRTARRRYTRRKNRICYLQEIFSNEMAKVDDSFFHRLEESFLVEEDKKHERHPIFGNIVDEVAYHEKYPTIYHLRKKLVDSTDKADLRLIYLALAHMIKFRGHFLIEGDLNPDNSDVDKLFIQLVQTYNQLFEENPINASGVDAKAILSARLSKSRRLENLIAQLPGEKKNGLFGNLIALSLGLTPNFKSNFDLAEDAKLQLSKDTYDDDLDNLLAQIGDQYADLFLAAKNLSDAILLSDILRVNTEITKAPLSASMIKRYDEHHQDLTLLKALVRQQLPEKYKEIFFDQSKNGYAGYIDGGASQEEFYKFIKPILEKMDGTEELLVKLNREDLLRKQRTFDNGSIPHQIHLGELHAILRRQEDFYPFLKDNREKIEKILTFRIPYYVGPLARGNSRFAWMTRKSEETITPWNFEEVVDKGASAQSFIERMTNFDKNLPNEKVLPKHSLLYEYFTVYNELTKVKYVTEGMRKPAFLSGEQKKAIVDLLFKTNRKVTVKQLKEDYFKKIECFDSVEISGVEDRFNASLGTYHDLLKIIKDKDFLDNEENEDILEDIVLTLTLFEDREMIEERLKTYAHLFDDKVMKQLKRRRYTGWGRLSRKLINGIRDKQSGKTILDFLKSDGFANRNFMQLIHDDSLTFKEDIQKAQVSGQGDSLHEHIANLAGSPAIKKGILQTVKVVDELVKVMGRHKPENIVIEMARENQTTQKGQKNSRERMKRIEEGIKELGSQILKEHPVENTQLQNEKLYLYYLQNGRDMYVDQELDINRLSDYDVDHIVPQSFLKDDSIDNKVLTRSDKARGKSDNVPSEEVVKKMKNYWRQLLNAKLITQRKFDNLTKAERGGLSELDKAGFIKRQLVETRQITKHVAQILDSRMNTKYDENDKLIREVKVITLKSKLVSDFRKDFQFYKVREINNYHHAHDAYLNAVVGTALIKKYPKLESEFVYGDYKVYDVRKMIAKSEQEIGKATAKYFFYSNIMNFFKTEITLANGEIRKRPLIETNGETGEIVWDKGRDFATVRKVLSMPQVNIVKKTEVQTGGFSKESILPKRNSDKLIARKKDWDPKKYGGFDSPTVAYSVLVVAKVEKGKSKKLKSVKELLGITIMERSSFEKNPIDFLEAKGYKEVKKDLIIKLPKYSLFELENGRKRMLASAGELQKGNELALPSKYVNFLYLASHYEKLKGSPEDNEQKQLFVEQHKHYLDEIIEQISEFSKRVILADANLDKVLSAYNKHRDKPIREQAENIIHLFTLTNLGAPAAFKYFDTTIDRKRYTSTKEVLDATLIHQSITGLYETRIDLSQLGGDGGEAAAKEAAAKEAAAKGGIPWLMKKPLQLTTLVPLQEYEERLLKQTMLTGSYKEKLQSLFLKYDALWQHWENQVGHRRIKPHHIATGTVNPRPQKQYPINPKAKASIQTVINDLLKQGVLIQQNSIMNTPVYPVPKPDGKWRMVLDYREVNKTIPLIAAQNQHSAGILSSIFRGKYKTTLDLSNGFWAHSITPESYWLTAFTWLGQQYCWTRLPQGFLNSPALFNADVVDLLKEVPNVQVYVDDIYISHDDPREHLEQLEKVFSLLLNAGYVVSLKKSEIAQHEVEFLGFNITKEGRGLTETFKQKLLNITPPRDLKQLQSILGKLNFARNFIPNFSELVKPLYNIIATAPGKYITWTTDNSQQLQNIISMLNSAENLEERNPEVRLIMKVNTSPSAGYIRFYNEFAKRPIMYLNYVYTKAEVKFTNTEKLLTTIHKGLIKALDLGMGQEILVYSPIVSMTKIQKTPLPERKALPIRWITWMSYLEDPRIQFHYDKTLPELQQVPTVTDDIIAKIKHPSEFSMVFYTDGSAIKHPNVNKSHNAGMGIAQVQFKPEFTVINTWSIPLGDHTAQLAEVAAVEFACKKALKIDGPVLIVTDSFYVAESVNKELPYWQSNGFFNNKKKPLKHVSKWKSIADCIQLKPDIIIIHEKGHQPTASTFHTEGNNLADKLATQGSYVVNAGKRTADGSEFEKRTADGSEFESPKKKAKVE

SEQ ID NO: 6399 - protein, 2180 aa, synthetic construct
MPAAKRVKLDGGDKKYSIGLDIGTNSVGWAVITDEYKVPSKKFKVLGNTDRHSIKKNLIGALLFDSGETAEATRLKRTARRRYTRRKNRICYLQEIFSNEMAKVDDSFFHRLEESFLVEEDKKHERHPIFGNIVDEVAYHEKYPTIYHLRKKLVDSTDKADLRLIYLALAHMIKFRGHFLIEGDLNPDNSDVDKLFIQLVQTYNQLFEENPINASGVDAKAILSARLSKSRRLENLIAQLPGEKKNGLFGNLIALSLGLTPNFKSNFDLAEDAKLQLSKDTYDDDLDNLLAQIGDQYADLFLAAKNLSDAILLSDILRVNTEITKAPLSASMIKRYDEHHQDLTLLKALVRQQLPEKYKEIFFDQSKNGYAGYIDGGASQEEFYKFIKPILEKMDGTEELLVKLNREDLLRKQRTFDNGSIPHQIHLGELHAILRRQEDFYPFLKDNREKIEKILTFRIPYYVGPLARGNSRFAWMTRKSEETITPWNFEEVVDKGASAQSFIERMTNFDKNLPNEKVLPKHSLLYEYFTVYNELTKVKYVTEGMRKPAFLSGEQKKAIVDLLFKTNRKVTVKQLKEDYFKKIECFDSVEISGVEDRFNASLGTYHDLLKIIKDKDFLDNEENEDILEDIVLTLTLFEDREMIEERLKTYAHLFDDKVMKQLKRRRYTGWGRLSRKLINGIRDKQSGKTILDFLKSDGFANRNFMQLIHDDSLTFKEDIQKAQVSGQGDSLHEHIANLAGSPAIKKGILQTVKVVDELVKVMGRHKPENIVIEMARENQTTQKGQKNSRERMKRIEEGIKELGSQILKEHPVENTQLQNEKLYLYYLQNGRDMYVDQELDINRLSDYDVDHIVPQSFLKDDSIDNKVLTRSDKARGKSDNVPSEEVVKKMKNYWRQLLNAKLITQRKFDNLTKAERGGLSELDKAGFIKRQLVETRQITKHVAQILDSRMNTKYDENDKLIREVKVITLKSKLVSDFRKDFQFYKVREINNYHHAHDAYLNAVVGTALIKKYPKLESEFVYGDYKVYDVRKMIAKSEQEIGKATAKYFFYSNIMNFFKTEITLANGEIRKRPLIETNGETGEIVWDKGRDFATVRKVLSMPQVNIVKKTEVQTGGFSKESILPKRNSDKLIARKKDWDPKKYGGFDSPTVAYSVLVVAKVEKGKSKKLKSVKELLGITIMERSSFEKNPIDFLEAKGYKEVKKDLIIKLPKYSLFELENGRKRMLASAGELQKGNELALPSKYVNFLYLASHYEKLKGSPEDNEQKQLFVEQHKHYLDEIIEQISEFSKRVILADANLDKVLSAYNKHRDKPIREQAENIIHLFTLTNLGAPAAFKYFDTTIDRKRYTSTKEVLDATLIHQSITGLYETRIDLSQLGGDGGEAAAKEAAAKEAAAKGGMDPLQLLQPLEAEIKGTKLKAHWNSGATITCVPQAFLEEEVPIKNIWIKTIHGEKEQPVYYLTFKIQGRKVEAEVISSPYDYILVSPSDIPWLMKKPLQLTTLVPLQEYEERLLKQTMLTGSYKEKLQSLFLKYDALWQHWENQVGHRRIKPHHIATGTVNPRPQKQYPINPKAKASIQTVINDLLKQGVLIQQNSIMNTPVYPVPKPDGKWRMVLDYREVNKTIPLIAAQNQHSAGILSSIFRGKYKTTLDLSNGFWAHSITPESYWLTAFTWLGQQYCWTRLPQGFLNSPALFNADVVDLLKEVPNVQVYVDDIYISHDDPREHLEQLEKVFSLLLNAGYVVSLKKSEIAQHEVEFLGFNITKEGRGLTETFKQKLLNITPPRDLKQLQSILGKLNFARNFIPNFSELVKPLYNIIATAPGKYITWTTDNSQQLQNIISMLNSAENLEERNPEVRLIMKVNTSPSAGYIRFYNEFAKRPIMYLNYVYTKAEVKFTNTEKLLTTIHKGLIKALDLGMGQEILVYSPIVSMTKIQKTPLPERKALPIRWITWMSYLEDPRIQFHYDKTLPELQQVPTVTDDIIAKIKHPSEFSMVFYTDGSAIKHPNVNKSHNAGMGIAQVQFKPEFTVINTWSIPLGDHTAQLAEVAAVEFACKKALKIDGPVLIVTDSFYVAESVNKELPYWQSNGFFNNKKKPLKHVSKWKSIADCIQLKPDIIIIHEKGHQPTASTFHTEGNNLADKLATQGSYVVNAGKRTADGSEFEKRTADGSEFESPKKKAKVE

SEQ ID NO: 6400 - protein, 2180 aa, synthetic construct
MPAAKRVKLDGGDKKYSIGLDIGTNSVGWAVITDEYKVPSKKFKVLGNTDRHSIKKNLIGALLFDSGETAEATRLKRTARRRYTRRKNRICYLQEIFSNEMAKVDDSFFHRLEESFLVEEDKKHERHPIFGNIVDEVAYHEKYPTIYHLRKKLVDSTDKADLRLIYLALAHMIKFRGHFLIEGDLNPDNSDVDKLFIQLVQTYNQLFEENPINASGVDAKAILSARLSKSRRLENLIAQLPGEKKNGLFGNLIALSLGLTPNFKSNFDLAEDAKLQLSKDTYDDDLDNLLAQIGDQYADLFLAAKNLSDAILLSDILRVNTEITKAPLSASMIKRYDEHHQDLTLLKALVRQQLPEKYKEIFFDQSKNGYAGYIDGGASQEEFYKFIKPILEKMDGTEELLVKLNREDLLRKQRTFDNGSIPHQIHLGELHAILRRQEDFYPFLKDNREKIEKILTFRIPYYVGPLARGNSRFAWMTRKSEETITPWNFEEVVDKGASAQSFIERMTNFDKNLPNEKVLPKHSLLYEYFTVYNELTKVKYVTEGMRKPAFLSGEQKKAIVDLLFKTNRKVTVKQLKEDYFKKIECFDSVEISGVEDRFNASLGTYHDLLKIIKDKDFLDNEENEDILEDIVLTLTLFEDREMIEERLKTYAHLFDDKVMKQLKRRRYTGWGRLSRKLINGIRDKQSGKTILDFLKSDGFANRNFMQLIHDDSLTFKEDIQKAQVSGQGDSLHEHIANLAGSPAIKKGILQTVKVVDELVKVMGRHKPENIVIEMARENQTTQKGQKNSRERMKRIEEGIKELGSQILKEHPVENTQLQNEKLYLYYLQNGRDMYVDQELDINRLSDYDVDHIVPQSFLKDDSIDNKVLTRSDKARGKSDNVPSEEVVKKMKNYWRQLLNAKLITQRKFDNLTKAERGGLSELDKAGFIKRQLVETRQITKHVAQILDSRMNTKYDENDKLIREVKVITLKSKLVSDFRKDFQFYKVREINNYHHAHDAYLNAVVGTALIKKYPKLESEFVYGDYKVYDVRKMIAKSEQEIGKATAKYFFYSNIMNFFKTEITLANGEIRKRPLIETNGETGEIVWDKGRDFATVRKVLSMPQVNIVKKTEVQTGGFSKESILPKRNSDKLIARKKDWDPKKYGGFDSPTVAYSVLVVAKVEKGKSKKLKSVKELLGITIMERSSFEKNPIDFLEAKGYKEVKKDLIIKLPKYSLFELENGRKRMLASAGELQKGNELALPSKYVNFLYLASHYEKLKGSPEDNEQKQLFVEQHKHYLDEIIEQISEFSKRVILADANLDKVLSAYNKHRDKPIREQAENIIHLFTLTNLGAPAAFKYFDTTIDRKRYTSTKEVLDATLIHQSITGLYETRIDLSQLGGDGGEAAAKEAAAKEAAAKGGMNPLQLLQPLPAEVKGTKLLAHWNSGATITCIPESFLEDEQPIKQTLIKTIHGEKQQNVYYLTFKVKGRKVEAEVIASPYEYILLSPTDVPWLTQQPLQLTILVPLQEYQDRILNKTALPEEQKQQLKALFTKYDNLWQHWENQVGHRKIRPHNIATGDYPPRPQKQYPINPKAKPSIQIVIDDLLKQGVLTPQNSTMNTPVYPVPKPDGRWRMVLDYREVNKTIPLTAAQNQHSAGILATIVRQKYKTTLDLANGFWAHPITPDSYWLTAFTWQGKQYCWTRLPQGFLNSPALFTADAVDLLKEVPNVQVYVDDIYLSHDNPHEHIQQLEKVFQILLQAGYVVSLKKSEIGQRTVEFLGFNITKEGRGLTDTFKTKLLNVTPPKDLKQLQSILGLLNFARNFIPNFAELVQTLYNLIASSKGKYIEWTEDNTKQLNKVIEALNTASNLEERLPDQRLVIKVNTSPSAGYVRYYNESGKKPIMYLNYVFSKAELKFSMLEKLLTTMHKALIKAMDLAMGQEILVYSPIVSMTKIQKTPLPERKALPIRWITWMTYLEDPRIQFHYDKTLPELKHIPDVYTSSIPPLKHPSQYEGVFCTDGSAIKSPDPTKSNNAGMGIVHAIYNPEYKILNQWSIPLGHHTAQMAEIAAVEFACKKALKVPGPVLVITDSFYVAESANKELPYWKSNGFVNNKKEPLKHISKWKSIAECLSIKPDITIQHEKGHQPINTSIHTEGNALADKLATQGSYVVNAGKRTADGSEFEKRTADGSEFESPKKKAKVE

SEQ ID NO: 6401 - protein, 2098 aa, synthetic construct
MPAAKRVKLDGGDKKYSIGLDIGTNSVGWAVITDEYKVPSKKFKVLGNTDRHSIKKNLIGALLFDSGETAEATRLKRTARRRYTRRKNRICYLQEIFSNEMAKVDDSFFHRLEESFLVEEDKKHERHPIFGNIVDEVAYHEKYPTIYHLRKKLVDSTDKADLRLIYLALAHMIKFRGHFLIEGDLNPDNSDVDKLFIQLVQTYNQLFEENPINASGVDAKAILSARLSKSRRLENLIAQLPGEKKNGLFGNLIALSLGLTPNFKSNFDLAEDAKLQLSKDTYDDDLDNLLAQIGDQYADLFLAAKNLSDAILLSDILRVNTEITKAPLSASMIKRYDEHHQDLTLLKALVRQQLPEKYKEIFFDQSKNGYAGYIDGGASQEEFYKFIKPILEKMDGTEELLVKLNREDLLRKQRTFDNGSIPHQIHLGELHAILRRQEDFYPFLKDNREKIEKILTFRIPYYVGPLARGNSRFAWMTRKSEETITPWNFEEVVDKGASAQSFIERMTNFDKNLPNEKVLPKHSLLYEYFTVYNELTKVKYVTEGMRKPAFLSGEQKKAIVDLLFKTNRKVTVKQLKEDYFKKIECFDSVEISGVEDRFNASLGTYHDLLKIIKDKDFLDNEENEDILEDIVLTLTLFEDREMIEERLKTYAHLFDDKVMKQLKRRRYTGWGRLSRKLINGIRDKQSGKTILDFLKSDGFANRNFMQLIHDDSLTFKEDIQKAQVSGQGDSLHEHIANLAGSPAIKKGILQTVKVVDELVKVMGRHKPENIVIEMARENQTTQKGQKNSRERMKRIEEGIKELGSQILKEHPVENTQLQNEKLYLYYLQNGRDMYVDQELDINRLSDYDVDHIVPQSFLKDDSIDNKVLTRSDKARGKSDNVPSEEVVKKMKNYWRQLLNAKLITQRKFDNLTKAERGGLSELDKAGFIKRQLVETRQITKHVAQILDSRMNTKYDENDKLIREVKVITLKSKLVSDFRKDFQFYKVREINNYHHAHDAYLNAVVGTALIKKYPKLESEFVYGDYKVYDVRKMIAKSEQEIGKATAKYFFYSNIMNFFKTEITLANGEIRKRPLIETNGETGEIVWDKGRDFATVRKVLSMPQVNIVKKTEVQTGGFSKESILPKRNSDKLIARKKDWDPKKYGGFDSPTVAYSVLVVAKVEKGKSKKLKSVKELLGITIMERSSFEKNPIDFLEAKGYKEVKKDLIIKLPKYSLFELENGRKRMLASAGELQKGNELALPSKYVNFLYLASHYEKLKGSPEDNEQKQLFVEQHKHYLDEIIEQISEFSKRVILADANLDKVLSAYNKHRDKPIREQAENIIHLFTLTNLGAPAAFKYFDTTIDRKRYTSTKEVLDATLIHQSITGLYETRIDLSQLGGDGGEAAAKEAAAKEAAAKGGVLNLEEEYRLHEKPVPSSIDPSWLQLFPTVWAERAGMGLANQVPPVVVELRSGASPVAVRQYPMSKEAREGIRPHIQRFLDLGVLVPCQSPWNTPLLPVKKPGTNDYRPVQDLREINKRVQDIHPTVPNPYNLLSSLPPSHTWYSVLDLKDAFFCLKLHPNSQPLFAFEWRDPEKGNTGQLTWTRLPQGFKNSPTLFNEALHRDLAPFRALNPQVVLLQYVDDLLVAAPTYRDCKEGTQKLLQELSKLGYRVSAKKAQLCQKEVTYLGYLLKEGKRWLTPARKATVMKIPPPTTPRQVREFLGTAGFCRLWIPGFASLAAPLYPLTKPSIPFIWTEEHQKAFDRIKEALLSAPALALPDLTKPFTLYVDERAGVARGVLTQTLGPWRRPVAYLSKKLDPVASGWPTCLKAVAAVALLLKDADKLTLGQNVTVIASHSLESIVRQPPDRWMTNARMTHYQSLLLNERVSFAPPAVLNPATLLPVESEATPVHRCSEILAEETGTRRDLKDQPLPGVPAWYTDGSSFIAEGKRRAGAAIVDGKRTVWASSLPEGTSAQKAELVALTQALRLAEGKDINIYTDSRYAFATAHIHGAIYKQRGWLTSAGKDIKNKEEILALLEAIHLPKRVAIIHCPGHQKGNDPVATGNRRADEAAKQAALSTRVLAETTKPAGKRTADGSEFEKRTADGSEFESPKKKAKVE

SEQ ID NO: 6402 - protein, 2100 aa, synthetic construct; identical to SEQ ID NO: 4506

SEQ ID NO: 6403 - protein, 2107 aa, synthetic construct
MPAAKRVKLDGGDKKYSIGLDIGTNSVGWAVITDEYKVPSKKFKVLGNTDRHSIKKNLIGALLFDSGETAEATRLKRTARRRYTRRKNRICYLQEIFSNEMAKVDDSFFHRLEESFLVEEDKKHERHPIFGNIVDEVAYHEKYPTIYHLRKKLVDSTDKADLRLIYLALAHMIKFRGHFLIEGDLNPDNSDVDKLFIQLVQTYNQLFEENPINASGVDAKAILSARLSKSRRLENLIAQLPGEKKNGLFGNLIALSLGLTPNFKSNFDLAEDAKLQLSKDTYDDDLDNLLAQIGDQYADLFLAAKNLSDAILLSDILRVNTEITKAPLSASMIKRYDEHHQDLTLLKALVRQQLPEKYKEIFFDQSKNGYAGYIDGGASQEEFYKFIKPILEKMDGTEELLVKLNREDLLRKQRTFDNGSIPHQIHLGELHAILRRQEDFYPFLKDNREKIEKILTFRIPYYVGPLARGNSRFAWMTRKSEETITPWNFEEVVDKGASAQSFIERMTNFDKNLPNEKVLPKHSLLYEYFTVYNELTKVKYVTEGMRKPAFLSGEQKKAIVDLLFKTNRKVTVKQLKEDYFKKIECFDSVEISGVEDRFNASLGTYHDLLKIIKDKDFLDNEENEDILEDIVLTLTLFEDREMIEERLKTYAHLFDDKVMKQLKRRRYTGWGRLSRKLINGIRDKQSGKTILDFLKSDGFANRNFMQLIHDDSLTFKEDIQKAQVSGQGDSLHEHIANLAGSPAIKKGILQTVKVVDELVKVMGRHKPENIVIEMARENQTTQKGQKNSRERMKRIEEGIKELGSQILKEHPVENTQLQNEKLYLYYLQNGRDMYVDQELDINRLSDYDVDHIVPQSFLKDDSIDNKVLTRSDKARGKSDNVPSEEVVKKMKNYWRQLLNAKLITQRKFDNLTKAERGGLSELDKAGFIKRQLVETRQITKHVAQILDSRMNTKYDENDKLIREVKVITLKSKLVSDFRKDFQFYKVREINNYHHAHDAYLNAVVGTALIKKYPKLESEFVYGDYKVYDVRKMIAKSEQEIGKATAKYFFYSNIMNFFKTEITLANGEIRKRPLIETNGETGEIVWDKGRDFATVRKVLSMPQVNIVKKTEVQTGGFSKESILPKRNSDKLIARKKDWDPKKYGGFDSPTVAYSVLVVAKVEKGKSKKLKSVKELLGITIMERSSFEKNPIDFLEAKGYKEVKKDLIIKLPKYSLFELENGRKRMLASAGELQKGNELALPSKYVNFLYLASHYEKLKGSPEDNEQKQLFVEQHKHYLDEIIEQISEFSKRVILADANLDKVLSAYNKHRDKPIREQAENIIHLFTLTNLGAPAAFKYFDTTIDRKRYTSTKEVLDATLIHQSITGLYETRIDLSQLGGDGGEAAAKEAAAKEAAAKEAAAKGGTAPLEEEYRLFLEAPIQNVTLLEQWKREIPKVWAEINPPGLASTQAPIHVQLLSTALPVRVRQYPITLEAKRSLRETIRKFRAAGILRPVHSPWNTPLLPVRKSGTSEYRMVQDLREVNKRVETIHPTVPNPYTLLSLLPPDRIWYSVLDLKDAFFCIPLAPESQLIFAFEWADAEEGESGQLTWTRLPQGFKNSPTLFDEALNRDLQGFRLDHPSVSLLQYVDDLLIAADTQAACLSATRDLLMTLAELGYRVSGKKAQLCQEEVTYLGFKIHKGSRSLSNSRTQAILQIPVPKTKRQVREFLGTIGYCRLWIPGFAELAQPLYAATRGGNDPLVWGEKEEEAFQSLKLALTQPPALALPSLDKPFQLFVEETSGAAKGVLTQALGPWKRPVAYLSKRLDPVAAGWPRCLRAIAAAALLTREASKLTFGQDIEITSSHNLESLLRSPPDKWLTNARITQYQVLLLDPPRVRFKQTAALNPATLLPETDDTLPIHHCLDTLDSLTSTRPDLTDQPLAQAEATLFTDGSSYIRDGKRYAGAAVVTLDSVIWAEPLPIGTSAQKAELIALTKALEWSKDKSVNIYTDSRYAFATLHVHGMIYRERGLLTAGGKAIKNAPEILALLTAVWLPKRVAVMHCKGHQKDDAPTSTGNRRADEVAREVAIRPLSTQATISAGKRTADGSEFEKRTADGSEFESPKKKAKVE

SEQ ID NO: 6404 - protein, 2107 aa, synthetic construct
MPAAKRVKLDGGDKKYSIGLDIGTNSVGWAVITDEYKVPSKKFKVLGNTDRHSIKKNLIGALLFDSGETAEATRLKRTARRRYTRRKNRICYLQEIFSNEMAKVDDSFFHRLEESFLVEEDKKHERHPIFGNIVDEVAYHEKYPTIYHLRKKLVDSTDKADLRLIYLALAHMIKFRGHFLIEGDLNPDNSDVDKLFIQLVQTYNQLFEENPINASGVDAKAILSARLSKSRRLENLIAQLPGEKKNGLFGNLIALSLGLTPNFKSNFDLAEDAKLQLSKDTYDDDLDNLLAQIGDQYADLFLAAKNLSDAILLSDILRVNTEITKAPLSASMIKRYDEHHQDLTLLKALVRQQLPEKYKEIFFDQSKNGYAGYIDGGASQEEFYKFIKPILEKMDGTEELLVKLNREDLLRKQRTFDNGSIPHQIHLGELHAILRRQEDFYPFLKDNREKIEKILTFRIPYYVGPLARGNSRFAWMTRKSEETITPWNFEEVVDKGASAQSFIERMTNFDKNLPNEKVLPKHSLLYEYFTVYNELTKVKYVTEGMRKPAFLSGEQKKAIVDLLFKTNRKVTVKQLKEDYFKKIECFDSVEISGVEDRFNASLGTYHDLLKIIKDKDFLDNEENEDILEDIVLTLTLFEDREMIEERLKTYAHLFDDKVMKQLKRRRYTGWGRLSRKLINGIRDKQSGKTILDFLKSDGFANRNFMQLIHDDSLTFKEDIQKAQVSGQGDSLHEHIANLAGSPAIKKGILQTVKVVDELVKVMGRHKPENIVIEMARENQTTQKGQKNSRERMKRIEEGIKELGSQILKEHPVENTQLQNEKLYLYYLQNGRDMYVDQELDINRLSDYDVDHIVPQSFLKDDSIDNKVLTRSDKARGKSDNVPSEEVVKKMKNYWRQLLNAKLITQRKFDNLTKAERGGLSELDKAGFIKRQLVETRQITKHVAQILDSRMNTKYDENDKLIREVKVITLKSKLVSDFRKDFQFYKVREINNYHHAHDAYLNAVVGTALIKKYPKLESEFVYGDYKVYDVRKMIAKSEQEIGKATAKYFFYSNIMNFFKTEITLANGEIRKRPLIETNGETGEIVWDKGRDFATVRKVLSMPQVNIVKKTEVQTGGFSKESILPKRNSDKLIARKKDWDPKKYGGFDSPTVAYSVLVVAKVEKGKSKKLKSVKELLGITIMERSSFEKNPIDFLEAKGYKEVKKDLIIKLPKYSLFELENGRKRMLASAGELQKGNELALPSKYVNFLYLASHYEKLKGSPEDNEQKQLFVEQHKHYLDEIIEQISEFSKRVILADANLDKVLSAYNKHRDKPIREQAENIIHLFTLTNLGAPAAFKYFDTTIDRKRYTSTKEVLDATLIHQSITGLYETRIDLSQLGGDGGEAAAKEAAAKEAAAKEAAAKGGTAPLEEEYRLFLEAPIQNVTLLEQWKREIPKVWAEINPPGLASTQAPIHVQLLSTALPVRVRQYPITLEAKRSLRETIRKFRAAGILRPVHSPWNTPLLPVRKSGTSEYRMVQDLREVNKRVETIHPTVPNPYTLLSLLPPDRIWYSVLDLKDAFFCIPLAPESQLIFAFEWADAEEGESGQLTWTRLPQGFKNSPTLFNEALNRDLQGFRLDHPSVSLLQYVDDLLIAADTQAACLSATRDLLMTLAELGYRVSGKKAQLCQEEVTYLGFKIHKGSRSLSNSRTQAILQIPVPKTKRQVREFLGKIGYCRLFIPGFAELAQPLYAATRPGNDPLVWGEKEEEAFQSLKLALTQPPALALPSLDKPFQLFVEETSGAAKGVLTQALGPWKRPVAYLSKRLDPVAAGWPRCLRAIAAAALLTREASKLTFGQDIEITSSHNLESLLRSPPDKWLTNARITQYQVLLLDPPRVRFKQTAALNPATLLPETDDTLPIHHCLDTLDSLTSTRPDLTDQPLAQAEATLFTDGSSYIRDGKRYAGAAVVTLDSVIWAEPLPIGTSAQKAELIALTKALEWSKDKSVNIYTDSRYAFATLHVHGMIYRERGWLTAGGKAIKNAPEILALLTAVWLPKRVAVMHCKGHQKDDAPTSTGNRRADEVAREVAIRPLSTQATISAGKRTADGSEFEKRTADGSEFESPKKKAKVE

SEQ ID NO: 6405 - protein, 2096 aa, synthetic construct
MPAAKRVKLDGGDKKYSIGLDIGTNSVGWAVITDEYKVPSKKFKVLGNTDRHSIKKNLIGALLFDSGETAEATRLKRTARRRYTRRKNRICYLQEIFSNEMAKVDDSFFHRLEESFLVEEDKKHERHPIFGNIVDEVAYHEKYPTIYHLRKKLVDSTDKADLRLIYLALAHMIKFRGHFLIEGDLNPDNSDVDKLFIQLVQTYNQLFEENPINASGVDAKAILSARLSKSRRLENLIAQLPGEKKNGLFGNLIALSLGLTPNFKSNFDLAEDAKLQLSKDTYDDDLDNLLAQIGDQYADLFLAAKNLSDAILLSDILRVNTEITKAPLSASMIKRYDEHHQDLTLLKALVRQQLPEKYKEIFFDQSKNGYAGYIDGGASQEEFYKFIKPILEKMDGTEELLVKLNREDLLRKQRTFDNGSIPHQIHLGELHAILRRQEDFYPFLKDNREKIEKILTFRIPYYVGPLARGNSRFAWMTRKSEETITPWNFEEVVDKGASAQSFIERMTNFDKNLPNEKVLPKHSLLYEYFTVYNELTKVKYVTEGMRKPAFLSGEQKKAIVDLLFKTNRKVTVKQLKEDYFKKIECFDSVEISGVEDRFNASLGTYHDLLKIIKDKDFLDNEENEDILEDIVLTLTLFEDREMIEERLKTYAHLFDDKVMKQLKRRRYTGWGRLSRKLINGIRDKQSGKTILDFLKSDGFANRNFMQLIHDDSLTFKEDIQKAQVSGQGDSLHEHIANLAGSPAIKKGILQTVKVVDELVKVMGRHKPENIVIEMARENQTTQKGQKNSRERMKRIEEGIKELGSQILKEHPVENTQLQNEKLYLYYLQNGRDMYVDQELDINRLSDYDVDHIVPQSFLKDDSIDNKVLTRSDKARGKSDNVPSEEVVKKMKNYWRQLLNAKLITQRKFDNLTKAERGGLSELDKAGFIKRQLVETRQITKHVAQILDSRMNTKYDENDKLIREVKVITLKSKLVSDFRKDFQFYKVREINNYHHAHDAYLNAVVGTALIKKYPKLESEFVYGDYKVYDVRKMIAKSEQEIGKATAKYFFYSNIMNFFKTEITLANGEIRKRPLIETNGETGEIVWDKGRDFATVRKVLSMPQVNIVKKTEVQTGGFSKESILPKRNSDKLIARKKDWDPKKYGGFDSPTVAYSVLVVAKVEKGKSKKLKSVKELLGITIMERSSFEKNPIDFLEAKGYKEVKKDLIIKLPKYSLFELENGRKRMLASAGELQKGNELALPSKYVNFLYLASHYEKLKGSPEDNEQKQLFVEQHKHYLDEIIEQISEFSKRVILADANLDKVLSAYNKHRDKPIREQAENIIHLFTLTNLGAPAAFKYFDTTIDRKRYTSTKEVLDATLIHQSITGLYETRIDLSQLGGDGGEAAAKEAAAKEAAAKEAAAKGGVPWILKKPLELTIKLDLEEQQGTLLNNSILSKKGKEELKQLFEKYSALWQSWENQVGHRRIRPHKIATGTVKPTPQKQYHINPKAKPDIQIVINDLLKQGVLIQKESTMNTPVYPVPKPNGRWRMVLDYRAVNKVTPLIAVQNQHSYGILGSLFKGRYKTTIDLSNGFWAHPIVPEDYWITAFTWQGKQYCWTVLPQGFLNSPGLFNGDVVDLLQGIPNVEVYVDDVYISHDSEKEHLEYLDILFNRLKEAGYIISLKKSNIANSIVDFLGFQITNEGRGLTDTFKEKLENITAPTTLKQLQSILGLLNFARNFIPDFTELIAPLYALIPKSPKNYVPWQIEHSTTLETLITKLNGAEYLQGRKGDKTLIMKVNASYTTGYIRYYNEGEKKPISYVSIVFSKTELKFTELEKLLTTVHKGLLKALDLSMGQNIHVYSPIVSMQNIQKTPQTAKKALASRWLSWLSYLEDPRIRFFYDPQMPALKDLPAVDTGKDNKKHPSNFQHIFYTDGSAITSPTKEGHLNAGMGIVYFINKDGNLQKQQEWSISLGNHTAQFAEIAAFEFALKKCLPLGGNILVVTDSNYVAKAYNEELDVWASNGFVNNRKKPLKHISKWKSVADLKRLRPDVVVTHEPGHQKLDSSPHAYGNNLADQLATQASFKVHAGKRTADGSEFEKRTADGSEFESPKKKAKVE

SEQ ID NO: 6406 - protein, 2185 aa, synthetic construct
MPAAKRVKLDGGDKKYSIGLDIGTNSVGWAVITDEYKVPSKKFKVLGNTDRHSIKKNLIGALLFDSGETAEATRLKRTARRRYTRRKNRICYLQEIFSNEMAKVDDSFFHRLEESFLVEEDKKHERHPIFGNIVDEVAYHEKYPTIYHLRKKLVDSTDKADLRLIYLALAHMIKFRGHFLIEGDLNPDNSDVDKLFIQLVQTYNQLFEENPINASGVDAKAILSARLSKSRRLENLIAQLPGEKKNGLFGNLIALSLGLTPNFKSNFDLAEDAKLQLSKDTYDDDLDNLLAQIGDQYADLFLAAKNLSDAILLSDILRVNTEITKAPLSASMIKRYDEHHQDLTLLKALVRQQLPEKYKEIFFDQSKNGYAGYIDGGASQEEFYKFIKPILEKMDGTEELLVKLNREDLLRKQRTFDNGSIPHQIHLGELHAILRRQEDFYPFLKDNREKIEKILTFRIPYYVGPLARGNSRFAWMTRKSEETITPWNFEEVVDKGASAQSFIERMTNFDKNLPNEKVLPKHSLLYEYFTVYNELTKVKYVTEGMRKPAFLSGEQKKAIVDLLFKTNRKVTVKQLKEDYFKKIECFDSVEISGVEDRFNASLGTYHDLLKIIKDKDFLDNEENEDILEDIVLTLTLFEDREMIEERLKTYAHLFDDKVMKQLKRRRYTGWGRLSRKLINGIRDKQSGKTILDFLKSDGFANRNFMQLIHDDSLTFKEDIQKAQVSGQGDSLHEHIANLAGSPAIKKGILQTVKVVDELVKVMGRHKPENIVIEMARENQTTQKGQKNSRERMKRIEEGIKELGSQILKEHPVENTQLQNEKLYLYYLQNGRDMYVDQELDINRLSDYDVDHIVPQSFLKDDSIDNKVLTRSDKARGKSDNVPSEEVVKKMKNYWRQLLNAKLITQRKFDNLTKAERGGLSELDKAGFIKRQLVETRQITKHVAQILDSRMNTKYDENDKLIREVKVITLKSKLVSDFRKDFQFYKVREINNYHHAHDAYLNAVVGTALIKKYPKLESEFVYGDYKVYDVRKMIAKSEQEIGKATAKYFFYSNIMNFFKTEITLANGEIRKRPLIETNGETGEIVWDKGRDFATVRKVLSMPQVNIVKKTEVQTGGFSKESILPKRNSDKLIARKKDWDPKKYGGFDSPTVAYSVLVVAKVEKGKSKKLKSVKELLGITIMERSSFEKNPIDFLEAKGYKEVKKDLIIKLPKYSLFELENGRKRMLASAGELQKGNELALPSKYVNFLYLASHYEKLKGSPEDNEQKQLFVEQHKHYLDEIIEQISEFSKRVILADANLDKVLSAYNKHRDKPIREQAENIIHLFTLTNLGAPAAFKYFDTTIDRKRYTSTKEVLDATLIHQSITGLYETRIDLSQLGGDGGEAAAKEAAAKEAAAKEAAAKGGMNPLQLLQPLPAEIKGTKLLAHWNSGATITCIPESFLEDEQPIKKTLIKTIHGEKQQNVYYVTFKVKGRKVEAEVIASPYEYILLSPTDVPWLTQQPLQLTILVPLQEYQEKILSKTALPEDQKQQLKTLFVKYDNLWQHWENQVGHRKIRPHNIATGDYPPRPQKQYPINPKAKPSIQIVIDDLLKQGVLTPQNSTMNTPVYPVPKPDGRWRMVLDYREVNKTIPLTAAQNQHSAGILATIVRQKYKTTLDLANGFWAHPITPESYWLTAFTWQGKQYCWTRLPQGFLNSPALFTADVVDLLKEIPNVQVYVDDIYLSHDDPKEHVQQLEKVFQILLQAGYVVSLKKSEIGQKTVEFLGFNITKEGRGLTDTFKTKLLNITPPKDLKQLQSILGLLNFARNFIPNFAELVQPLYNLIASAKGKYIEWSEENTKQLNMVIEALNTASNLEERLPEQRLVIKVNTSPSAGYVRYYNETGKKPIMYLNYVFSKAELKFSMLEKLLTTMHKALIKAMDLAMGQEILVYSPIVSMTKIQKTPLPERKALPIRWITWMTYLEDPRIQFHYDKTLPELKHIPDVYTSSQSPVKHPSQYEGVFYTDGSAIKSPDPTKSNNAGMGIVHATYKPEYQVLNQWSIPLGNHTAQMAEIAAVEFACKKALKIPGPVLVITDSFYVAESANKELPYWKSNGFVNNKKKPLKHISKWKSIAECLSMKPDITIQHEKGISLQIPVFILKGNALADKLATQGSYVVNAGKRTADGSEFEKRTADGSEFESPKKKAKVE

SEQ ID NO: 6407 - protein, 2103 aa, synthetic construct
MPAAKRVKLDGGDKKYSIGLDIGTNSVGWAVITDEYKVPSKKFKVLGNTDRHSIKKNLIGALLFDSGETAEATRLKRTARRRYTRRKNRICYLQEIFSNEMAKVDDSFFHRLEESFLVEEDKKHERHPIFGNIVDEVAYHEKYPTIYHLRKKLVDSTDKADLRLIYLALAHMIKFRGHFLIEGDLNPDNSDVDKLFIQLVQTYNQLFEENPINASGVDAKAILSARLSKSRRLENLIAQLPGEKKNGLFGNLIALSLGLTPNFKSNFDLAEDAKLQLSKDTYDDDLDNLLAQIGDQYADLFLAAKNLSDAILLSDILRVNTEITKAPLSASMIKRYDEHHQDLTLLKALVRQQLPEKYKEIFFDQSKNGYAGYIDGGASQEEFYKFIKPILEKMDGTEELLVKLNREDLLRKQRTFDNGSIPHQIHLGELHAILRRQEDFYPFLKDNREKIEKILTFRIPYYVGPLARGNSRFAWMTRKSEETITPWNFEEVVDKGASAQSFIERMTNFDKNLPNEKVLPKHSLLYEYFTVYNELTKVKYVTEGMRKPAFLSGEQKKAIVDLLFKTNRKVTVKQLKEDYFKKIECFDSVEISGVEDRFNASLGTYHDLLKIIKDKDFLDNEENEDILEDIVLTLTLFEDREMIEERLKTYAHLFDDKVMKQLKRRRYTGWGRLSRKLINGIRDKQSGKTILDFLKSDGFANRNFMQLIHDDSLTFKEDIQKAQVSGQGDSLHEHIANLAGSPAIKKGILQTVKVVDELVKVMGRHKPENIVIEMARENQTTQKGQKNSRERMKRIEEGIKELGSQILKEHPVENTQLQNEKLYLYYLQNGRDMYVDQELDINRLSDYDVDHIVPQSFLKDDSIDNKVLTRSDKARGKSDNVPSEEVVKKMKNYWRQLLNAKLITQRKFDNLTKAERGGLSELDKAGFIKRQLVETRQITKHVAQILDSRMNTKYDENDKLIREVKVITLKSKLVSDFRKDFQFYKVREINNYHHAHDAYLNAVVGTALIKKYPKLESEFVYGDYKVYDVRKMIAKSEQEIGKATAKYFFYSNIMNFFKTEITLANGEIRKRPLIETNGETGEIVWDKGRDFATVRKVLSMPQVNIVKKTEVQTGGFSKESILPKRNSDKLIARKKDWDPKKYGGFDSPTVAYSVLVVAKVEKGKSKKLKSVKELLGITIMERSSFEKNPIDFLEAKGYKEVKKDLIIKLPKYSLFELENGRKRMLASAGELQKGNELALPSKYVNFLYLASHYEKLKGSPEDNEQKQLFVEQHKHYLDEIIEQISEFSKRVILADANLDKVLSAYNKHRDKPIREQAENIIHLFTLTNLGAPAAFKYFDTTIDRKRYTSTKEVLDATLIHQSITGLYETRIDLSQLGGDGGEAAAKEAAAKEAAAKEAAAKGGVLNLEEEYRLHEKPVPSSIDPSWLQLFPTVWAERAGMGLANQVPPVVVELRSGASPVAVRQYPMSKEAREGIRPHIQKFLDLGVLVPCRSPWNTPLLPVKKPGTNDYRPVQDLREINKRVQDIHPTVPNPYNLLSSLPPSYTWYSVLDLKDAFFCLRLHPNSQPLFAFEWKDPEKGNTGQLTWTRLPQGFKNSPTLFNEALHRDLAPFRALNPQVVLLQYVDDLLVAAPTYEDCKKGTQKLLQELSKLGYRVSAKKAQLCQREVTYLGYLLKEGKRWLTPARKATVMKIPVPTTPRQVREFLGKAGFCRLFIPGFASLAAPLYPLTKPSIPFIWTEEHQQAFDHIKKALLSAPALALPDLTKPFTLYIDERAGVARGVLTQTLGPWRRPVAYLSKKLDPVASGWPTCLKAVAAVALLLKDADKLTLGQNVTVIASHSLESIVRQPPDRWMTNARMTHYQSLLLNERVSFAPPAVLNPATLLPVESEATPVHRCSEILAEETGTRRDLEDQPLPGVPTWYTDGSSFITEGKRRAGAPIVDGKRTVWASSLPEGTSAQKAELVALTQALRLAEGKNINIYTDSRYAFATAHIHGAIYKQRGWLTSAGKDIKNKEEILALLEAIHLPRRVAIIHCPGHQRGSNPVATGNRRADEAAKQAALSTRVLAGTTKPAGKRTADGSEFEKRTADGSEFESPKKKAKVE

SEQ ID NO: 6408 - protein, 2136 aa, synthetic construct
MPAAKRVKLDGGDKKYSIGLDIGTNSVGWAVITDEYKVPSKKFKVLGNTDRHSIKKNLIGALLFDSGETAEATRLKRTARRRYTRRKNRICYLQEIFSNEMAKVDDSFFHRLEESFLVEEDKKHERHPIFGNIVDEVAYHEKYPTIYHLRKKLVDSTDKADLRLIYLALAHMIKFRGHFLIEGDLNPDNSDVDKLFIQLVQTYNQLFEENPINASGVDAKAILSARLSKSRRLENLIAQLPGEKKNGLFGNLIALSLGLTPNFKSNFDLAEDAKLQLSKDTYDDDLDNLLAQIGDQYADLFLAAKNLSDAILLSDILRVNTEITKAPLSASMIKRYDEHHQDLTLLKALVRQQLPEKYKEIFFDQSKNGYAGYIDGGASQEEFYKFIKPILEKMDGTEELLVKLNREDLLRKQRTFDNGSIPHQIHLGELHAILRRQEDFYPFLKDNREKIEKILTFRIPYYVGPLARGNSRFAWMTRKSEETITPWNFEEVVDKGASAQSFIERMTNFDKNLPNEKVLPKHSLLYEYFTVYNELTKVKYVTEGMRKPAFLSGEQKKAIVDLLFKTNRKVTVKQLKEDYFKKIECFDSVEISGVEDRFNASLGTYHDLLKIIKDKDFLDNEENEDILEDIVLTLTLFEDREMIEERLKTYAHLFDDKVMKQLKRRRYTGWGRLSRKLINGIRDKQSGKTILDFLKSDGFANRNFMQLIHDDSLTFKEDIQKAQVSGQGDSLHEHIANLAGSPAIKKGILQTVKVVDELVKVMGRHKPENIVIEMARENQTTQKGQKNSRERMKRIEEGIKELGSQILKEHPVENTQLQNEKLYLYYLQNGRDMYVDQELDINRLSDYDVDHIVPQSFLKDDSIDNKVLTRSDKARGKSDNVPSEEVVKKMKNYWRQLLNAKLITQRKFDNLTKAERGGLSELDKAGFIKRQLVETRQITKHVAQILDSRMNTKYDENDKLIREVKVITLKSKLVSDFRKDFQFYKVREINNYHHAHDAYLNAVVGTALIKKYPKLESEFVYGDYKVYDVRKMIAKSEQEIGKATAKYFFYSNIMNFFKTEITLANGEIRKRPLIETNGETGEIVWDKGRDFATVRKVLSMPQVNIVKKTEVQTGGFSKESILPKRNSDKLIARKKDWDPKKYGGFDSPTVAYSVLVVAKVEKGKSKKLKSVKELLGITIMERSSFEKNPIDFLEAKGYKEVKKDLIIKLPKYSLFELENGRKRMLASAGELQKGNELALPSKYVNFLYLASHYEKLKGSPEDNEQKQLFVEQHKHYLDEIIEQISEFSKRVILADANLDKVLSAYNKHRDKPIREQAENIIHLFTLTNLGAPAAFKYFDTTIDRKRYTSTKEVLDATLIHQSITGLYETRIDLSQLGGDGGEAAAKEAAAKEAAAKEAAAKGGLLGRDLLTKLKAQIQFSTEGPQVTWEDRPAMCLVLNLEEEYRLHEKPVPPSIDPSWLQLFPMVWAEKAGMGLANQVPPVVVELKSDASPVAVRQYPMSKEAREGIRPHIQRFLDLGILVPCQSPWNTPLLPVKKPGTNDYRPVQDLREVNKRVQDIHPTVPNPYNLLSSLPPSHTWYSVLDLKDAFFCLKLHPNSQPLFAFEWRDPEKGNTGQLTWTRLPQGFKNSPTLFDEALHRDLASFRALNPQVVMLQYVDDLLVAAPTYRDCKEGTRRLLQELSKLGYRVSAKKAQLCREEVTYLGYLLKGGKRWLTPARKATVMKIPTPTTPRQVREFLGTAGFCRLWIPGFASLAAPLYPLTREKVPFTWTEAHQEAFGRIKEALLSAPALALPDLTKPFALYVDEKEGVARGVLTQTLGPWRRPVAYLSKKLDPVASGWPTCLKAIAAVALLLKDADKLTLGQNVLVIAPHNLESIVRQPPDRWMTNARMTHYQSLLLNERVSFAPPAILNPATLLPVESDDTPIHICSEILAEETGTRPDLRDQPLPGVPAWYTDGSSFIMDGRRQAGAAIVDNKRTVWASNLPEGTSAQKAELIALTQALRLAEGKSINIYTDSRYAFATAHVHGAIYKQRGLLTSAGKDIKNKEEILALLEAIHLPKRVAIIHCPGHQRGTDPVATGNRKADEAAKQAAQSTRILTETTKNAGKRTADGSEFEKRTADGSEFESPKKKAKVE

SEQ ID NO: 6409 - protein, 2136 aa, synthetic construct
MPAAKRVKLDGGDKKYSIGLDIGTNSVGWAVITDEYKVPSKKFKVLGNTDRHSIKKNLIGALLFDSGETAEATRLKRTARRRYTRRKNRICYLQEIFSNEMAKVDDSFFHRLEESFLVEEDKKHERHPIFGNIVDEVAYHEKYPTIYHLRKKLVDSTDKADLRLIYLALAHMIKFRGHFLIEGDLNPDNSDVDKLFIQLVQTYNQLFEENPINASGVDAKAILSARLSKSRRLENLIAQLPGEKKNGLFGNLIALSLGLTPNFKSNFDLAEDAKLQLSKDTYDDDLDNLLAQIGDQYADLFLAAKNLSDAILLSDILRVNTEITKAPLSASMIKRYDEHHQDLTLLKALVRQQLPEKYKEIFFDQSKNGYAGYIDGGASQEEFYKFIKPILEKMDGTEELLVKLNREDLLRKQRTFDNGSIPHQIHLGELHAILRRQEDFYPFLKDNREKIEKILTFRIPYYVGPLARGNSRFAWMTRKSEETITPWNFEEVVDKGASAQSFIERMTNFDKNLPNEKVLPKHSLLYEYFTVYNELTKVKYVTEGMRKPAFLSGEQKKAIVDLLFKTNRKVTVKQLKEDYFKKIECFDSVEISGVEDRFNASLGTYHDLLKIIKDKDFLDNEENEDILEDIVLTLTLFEDREMIEERLKTYAHLFDDKVMKQLKRRRYTGWGRLSRKLINGIRDKQSGKTILDFLKSDGFANRNFMQLIHDDSLTFKEDIQKAQVSGQGDSLHEHIANLAGSPAIKKGILQTVKVVDELVKVMGRHKPENIVIEMARENQTTQKGQKNSRERMKRIEEGIKELGSQILKEHPVENTQLQNEKLYLYYLQNGRDMYVDQELDINRLSDYDVDHIVPQSFLKDDSIDNKVLTRSDKARGKSDNVPSEEVVKKMKNYWRQLLNAKLITQRKFDNLTKAERGGLSELDKAGFIKRQLVETRQITKHVAQILDSRMNTKYDENDKLIREVKVITLKSKLVSDFRKDFQFYKVREINNYHHAHDAYLNAVVGTALIKKYPKLESEFVYGDYKVYDVRKMIAKSEQEIGKATAKYFFYSNIMNFFKTEITLANGEIRKRPLIETNGETGEIVWDKGRDFATVRKVLSMPQVNIVKKTEVQTGGFSKESILPKRNSDKLIARKKDWDPKKYGGFDSPTVAYSVLVVAKVEKGKSKKLKSVKELLGITIMERSSFEKNPIDFLEAKGYKEVKKDLIIKLPKYSLFELENGRKRMLASAGELQKGNELALPSKYVNFLYLASHYEKLKGSPEDNEQKQLFVEQHKHYLDEIIEQISEFSKRVILADANLDKVLSAYNKHRDKPIREQAENIIHLFTLTNLGAPAAFKYFDTTIDRKRYTSTKEVLDATLIHQSITGLYETRIDLSQLGGDGGEAAAKEAAAKEAAAKEAAAKGGLLGRDLLTKLKAQIQFSTEGPQVTWEDRPAMCLVLNLEEEYRLHEKPVPPSIDPSWLQLFPMVWAEKAGMGLANQVPPVVVELKSDASPVAVRQYPMSKEAREGIRPHIQRFLDLGILVPCQSPWNTPLLPVKKPGTNDYRPVQDLREVNKRVQDIHPTVPNPYNLLSSLPPSHTWYSVLDLKDAFFCLKLHPNSQPLFAFEWRDPEKGNTGQLTWTRLPQGFKNSPTLFNEALHRDLASFRALNPQVVMLQYVDDLLVAAPTYRDCKEGTRRLLQELSKLGYRVSAKKAQLCREEVTYLGYLLKGGKRWLTPARKATVMKIPTPTTPRQVREFLGTAGFCRLWIPGFASLAAPLYPLTRPKVPFTWTEAHQEAFGRIKEALLSAPALALPDLTKPFALYVDEKEGVARGVLTQTLGPWRRPVAYLSKKLDPVASGWPTCLKAIAAVALLLKDADKLTLGQNVLVIAPHNLESIVRQPPDRWMTNARMTHYQSLLLNERVSFAPPAILNPATLLPVESDDTPIHICSEILAEETGTRPDLRDQPLPGVPAWYTDGSSFIMDGRRQAGAAIVDNKRTVWASNLPEGTSAQKAELIALTQALRLAEGKSINIYTDSRYAFATAHVHGAIYKQRGWLTSAGKDIKNKEEILALLEAIHLPKRVAIIHCPGHQRGTDPVATGNRKADEAAKQAAQSTRILTETTKNAGKRTADGSEFEKRTADGSEFESPKKKAKVE

SEQ ID NO: 6410 - protein, 2227 aa, synthetic construct
MPAAKRVKLDGGDKKYSIGLDIGTNSVGWAVITDEYKVPSKKFKVLGNTDRHSIKKNLIGALLFDSGETAEATRLKRTARRRYTRRKNRICYLQEIFSNEMAKVDDSFFHRLEESFLVEEDKKHERHPIFGNIVDEVAYHEKYPTIYHLRKKLVDSTDKADLRLIYLALAHMIKFRGHFLIEGDLNPDNSDVDKLFIQLVQTYNQLFEENPINASGVDAKAILSARLSKSRRLENLIAQLPGEKKNGLFGNLIALSLGLTPNFKSNFDLAEDAKLQLSKDTYDDDLDNLLAQIGDQYADLFLAAKNLSDAILLSDILRVNTEITKAPLSASMIKRYDEHHQDLTLLKALVRQQLPEKYKEIFFDQSKNGYAGYIDGGASQEEFYKFIKPILEKMDGTEELLVKLNREDLLRKQRTFDNGSIPHQIHLGELHAILRRQEDFYPFLKDNREKIEKILTFRIPYYVGPLARGNSRFAWMTRKSEETITPWNFEEVVDKGASAQSFIERMTNFDKNLPNEKVLPKHSLLYEYFTVYNELTKVKYVTEGMRKPAFLSGEQKKAIVDLLFKTNRKVTVKQLKEDYFKKIECFDSVEISGVEDRFNASLGTYHDLLKIIKDKDFLDNEENEDILEDIVLTLTLFEDREMIEERLKTYAHLFDDKVMKQLKRRRYTGWGRLSRKLINGIRDKQSGKTILDFLKSDGFANRNFMQLIHDDSLTFKEDIQKAQVSGQGDSLHEHIANLAGSPAIKKGILQTVKVVDELVKVMGRHKPENIVIEMARENQTTQKGQKNSRERMKRIEEGIKELGSQILKEHPVENTQLQNEKLYLYYLQNGRDMYVDQELDINRLSDYDVDHIVPQSFLKDDSIDNKVLTRSDKARGKSDNVPSEEVVKKMKNYWRQLLNAKLITQRKFDNLTKAERGGLSELDKAGFIKRQLVETRQITKHVAQILDSRMNTKYDENDKLIREVKVITLKSKLVSDFRKDFQFYKVREINNYHHAHDAYLNAVVGTALIKKYPKLESEFVYGDYKVYDVRKMIAKSEQEIGKATAKYFFYSNIMNFFKTEITLANGEIRKRPLIETNGETGEIVWDKGRDFATVRKVLSMPQVNIVKKTEVQTGGFSKESILPKRNSDKLIARKKDWDPKKYGGFDSPTVAYSVLVVAKVEKGKSKKLKSVKELLGITIMERSSFEKNPIDFLEAKGYKEVKKDLIIKLPKYSLFELENGRKRMLASAGELQKGNELALPSKYVNFLYLASHYEKLKGSPEDNEQKQLFVEQHKHYLDEIIEQISEFSKRVILADANLDKVLSAYNKHRDKPIREQAENIIHLFTLTNLGAPAAFKYFDTTIDRKRYTSTKEVLDATLIHQSITGLYETRIDLSQLGGDGGEAAAKEAAAKEAAAKEAAAKGGTLGDQGSRGSDPLPEPRVTLTVEGIPTEFLVNTGAEHSVLTKPMGKMGSKRTVVAGATGSKVYPWTTKRLLKIGQKQVTHSFLVIPECPAPLLGRDLLTKLKAQIQFSTEGPQVTWEDRPAMCLVLNLEEEYRLHEKPVPPSIDPSWLQLFPMVWAEKAGMGLANQVPPVVVELKSDASPVAVRQYPMSKEAREGIRPHIQRFLDLGILVPCQSPWNTPLLPVKKPGTNDYRPVQDLREVNKRVQDIHPTVPNPYNLLSSLPPSHTWYSVLDLKDAFFCLKLHPNSQPLFAFEWRDPEKGNTGQLTWTRLPQGFKNSPTLFNEALHRDLASFRALNPQVVMLQYVDDLLVAAPTYRDCKEGTRRLLQELSKLGYRVSAKKAQLCREEVTYLGYLLKGGKRWLTPARKATVMKIPTPTTPRQVREFLGTAGFCRLWIPGFASLAAPLYPLTRPKVPFTWTEAHQEAFGRIKEALLSAPALALPDLTKPFALYVDEKEGVARGVLTQTLGPWRRPVAYLSKKLDPVASGWPTCLKAIAAVALLLKDADKLTLGQNVLVIAPHNLESIVRQPPDRWMTNARMTHYQSLLLNERVSFAPPAILNPATLLPVESDDTPIHICSEILAEETGTRPDLRDQPLPGVPAWYTDGSSFIMDGRRQAGAAIVDNKRTVWASNLPEGTSAQKAELIALTQALRLAEGKSINIYTDSRYAFATAHVHGAIYKQRGWLTSAGKDIKNKEEILALLEAIHLPKRVAIIHCPGHQRGTDPVATGNRKADEAAKQAAQSTRILTETTKNAGKRTADGSEFEKRTADGSEFESPKKKAKVE

SEQ ID NO: 6411 - protein, 2105 aa, synthetic construct
MPAAKRVKLDGGDKKYSIGLDIGTNSVGWAVITDEYKVPSKKFKVLGNTDRHSIKKNLIGALLFDSGETAEATRLKRTARRRYTRRKNRICYLQEIFSNEMAKVDDSFFHRLEESFLVEEDKKHERHPIFGNIVDEVAYHEKYPTIYHLRKKLVDSTDKADLRLIYLALAHMIKFRGHFLIEGDLNPDNSDVDKLFIQLVQTYNQLFEENPINASGVDAKAILSARLSKSRRLENLIAQLPGEKKNGLFGNLIALSLGLTPNFKSNFDLAEDAKLQLSKDTYDDDLDNLLAQIGDQYADLFLAAKNLSDAILLSDILRVNTEITKAPLSASMIKRYDEHHQDLTLLKALVRQQLPEKYKEIFFDQSKNGYAGYIDGGASQEEFYKFIKPILEKMDGTEELLVKLNREDLLRKQRTFDNGSIPHQIHLGELHAILRRQEDFYPFLKDNREKIEKILTFRIPYYVGPLARGNSRFAWMTRKSEETITPWNFEEVVDKGASAQSFIERMTNFDKNLPNEKVLPKHSLLYEYFTVYNELTKVKYVTEGMRKPAFLSGEQKKAIVDLLFKTNRKVTVKQLKEDYFKKIECFDSVEISGVEDRFNASLGTYHDLLKIIKDKDFLDNEENEDILEDIVLTLTLFEDREMIEERLKTYAHLFDDKVMKQLKRRRYTGWGRLSRKLINGIRDKQSGKTILDFLKSDGFANRNFMQLIHDDSLTFKEDIQKAQVSGQGDSLHEHIANLAGSPAIKKGILQTVKVVDELVKVMGRHKPENIVIEMARENQTTQKGQKNSRERMKRIEEGIKELGSQILKEHPVENTQLQNEKLYLYYLQNGRDMYVDQELDINRLSDYDVDHIVPQSFLKDDSIDNKVLTRSDKARGKSDNVPSEEVVKKMKNYWRQLLNAKLITQRKFDNLTKAERGGLSELDKAGFIKRQLVETRQITKHVAQILDSRMNTKYDENDKLIREVKVITLKSKLVSDFRKDFQFYKVREINNYHHAHDAYLNAVVGTALIKKYPKLESEFVYGDYKVYDVRKMIAKSEQEIGKATAKYFFYSNIMNFFKTEITLANGEIRKRPLIETNGETGEIVWDKGRDFATVRKVLSMPQVNIVKKTEVQTGGFSKESILPKRNSDKLIARKKDWDPKKYGGFDSPTVAYSVLVVAKVEKGKSKKLKSVKELLGITIMERSSFEKNPIDFLEAKGYKEVKKDLIIKLPKYSLFELENGRKRMLASAGELQKGNELALPSKYVNFLYLASHYEKLKGSPEDNEQKQLFVEQHKHYLDEIIEQISEFSKRVILADANLDKVLSAYNKHRDKPIREQAENIIHLFTLTNLGAPAAFKYFDTTIDRKRYTSTKEVLDATLIHQSITGLYETRIDLSQLGGDGGEAAAKEAAAKEAAAKEAAAKGGTLNIEDEHRLHETSKEPDVSLGSTWLSDFPQAWAETGGMGLAVRQAPLIIPLKATSTPVSIKQYPMSQEARLGIKPHIQRLLDQGILVPCQSPWNTPLLPVKKPGTNDYRPVQDLREVNKRVEDIHPTVPNPYNLLSGLPPSHQWYTVLDLKDAFFCLRLHPTSQPLFAFEWRDPEMGISGQLTWTRLPQGFKNSPTLFDEALHRDLADFRIQHPDLILLQYVDDLLLAATSELDCQQGTRALLQTLGNLGYRASAKKAQICQKQVKYLGYLLKEGQRWLTEARKETVMGQPTPKTPRQLREFLGTAGFCRLWIPGFAEMAAPLYPLTKTGTLFNWGPDQQKAYQEIKQALLTAPALGLPDLTKPFELFVDEKQGYAKGVLTQKLGPWRRPVAYLSKKLDPVAAGWPPCLRMVAAIAVLTKDAGKLTMGQPLVILAPHAVEALVKQPPDRWLSNARMTHYQALLLDTDRVQFGPVVALNPATLLPLPEEGLQHNCLDILAEAHGTRPDLTDQPLPDADHTWYTDGSSLLQEGQRKAGAAVTTETEVIWAKALPAGTSAQRAELIALTQALKMAEGKKLNVYTDSRYAFATAHIHGEIYRRRGLLTSEGKEIKNKDEILALLKALFLPKRLSIIHCPGHQKGHSAEARGNRMADQAARKAAITETPDTSTLLAGKRTADGSEFEKRTADGSEFESPKKKAKVE

SEQ ID NO: 6412 - protein, 2099 aa, synthetic construct
MPAAKRVKLDGGDKKYSIGLDIGTNSVGWAVITDEYKVPSKKFKVLGNTDRHSIKKNLIGALLFDSGETAEATRLKRTARRRYTRRKNRICYLQEIFSNEMAKVDDSFFHRLEESFLVEEDKKHERHPIFGNIVDEVAYHEKYPTIYHLRKKLVDSTDKADLRLIYLALAHMIKFRGHFLIEGDLNPDNSDVDKLFIQLVQTYNQLFEENPINASGVDAKAILSARLSKSRRLENLIAQLPGEKKNGLFGNLIALSLGLTPNFKSNFDLAEDAKLQLSKDTYDDDLDNLLAQIGDQYADLFLAAKNLSDAILLSDILRVNTEITKAPLSASMIKRYDEHHQDLTLLKALVRQQLPEKYKEIFFDQSKNGYAGYIDGGASQEEFYKFIKPILEKMDGTEELLVKLNREDLLRKQRTFDNGSIPHQIHLGELHAILRRQEDFYPFLKDNREKIEKILTFRIPYYVGPLARGNSRFAWMTRKSEETITPWNFEEVVDKGASAQSFIERMTNFDKNLPNEKVLPKHSLLYEYFTVYNELTKVKYVTEGMRKPAFLSGEQKKAIVDLLFKTNRKVTVKQLKEDYFKKIECFDSVEISGVEDRFNASLGTYHDLLKIIKDKDFLDNEENEDILEDIVLTLTLFEDREMIEERLKTYAHLFDDKVMKQLKRRRYTGWGRLSRKLINGIRDKQSGKTILDFLKSDGFANRNFMQLIHDDSLTFKEDIQKAQVSGQGDSLHEHIANLAGSPAIKKGILQTVKVVDELVKVMGRHKPENIVIEMARENQTTQKGQKNSRERMKRIEEGIKELGSQILKEHPVENTQLQNEKLYLYYLQNGRDMYVDQELDINRLSDYDVDHIVPQSFLKDDSIDNKVLTRSDKARGKSDNVPSEEVVKKMKNYWRQLLNAKLITQRKFDNLTKAERGGLSELDKAGFIKRQLVETRQITKHVAQILDSRMNTKYDENDKLIREVKVITLKSKLVSDFRKDFQFYKVREINNYHHAHDAYLNAVVGTALIKKYPKLESEFVYGDYKVYDVRKMIAKSEQEIGKATAKYFFYSNIMNFFKTEITLANGEIRKRPLIETNGETGEIVWDKGRDFATVRKVLSMPQVNIVKKTEVQTGGFSKESILPKRNSDKLIARKKDWDPKKYGGFDSPTVAYSVLVVAKVEKGKSKKLKSVKELLGITIMERSSFEKNPIDFLEAKGYKEVKKDLIIKLPKYSLFELENGRKRMLASAGELQKGNELALPSKYVNFLYLASHYEKLKGSPEDNEQKQLFVEQHKHYLDEIIEQISEFSKRVILADANLDKVLSAYNKHRDKPIREQAENIIHLFTLTNLGAPAAFKYFDTTIDRKRYTSTKEVLDATLIHQSITGLYETRIDLSQLGGDGGEAAAKEAAAKEAAAKEAAAKGGTLQLDDEYRLYSPLVKPDQNIQFWLEQFPQAWAETAGMGLAKQVPPQVIQLKASATPVSVRQYPLSKEAQEGIRPHVQRLIQQGILVPVQSPWNTPLLPVRKPGTNDYRPVQDLREVNKRVQDIHPTVPNPYNLLCALPPQRSWYTVLDLKDAFFCLRLHPTSQPLFAFEWRDPGTGRTGQLTWTRLPQGFKNSPTIFDEALHRDLANFRIQHPQVTLLQYVDDLLLAGATKQDCLEGTKALLLELSDLGYRASAKKAQICRREVTYLGYSLRDGQRWLTEARKKTVVQIPAPTTAKQVREFLGTAGFCRLWIPGFATLAAPLYPLTKEKGEFSWAPEHQKAFDAIKKALLSAPALALPDVTKPFTLYVDERKGVARGVLTQTLGPWRRPVAYLSKKLDPVASGWPVCLKAIAAVAILVKDADKLTLGQNITVIAPHALENIVRQPPDRWMTNARMTHYQSLLLTERVTFAPPAALNPATLLPEETDEPVTHDCHQLLIEETGVRKDLTDIPLTGEVLTWFTDGSSYVVEGKRMAGAAVVDGTRTIWASSLPEGTSAQKAELMALTQALRLAEGKSINIYTDSRYAFATAHVHGAIYKQRGLLTSAGREIKNKEEILSLLEALHLPKRLAIIHCPGHQKAKDPISRGNQMADRVAKQAAQGVNLLAGKRTADGSEFEKRTADGSEFESPKKKAKVE

SEQ ID NO: 6413 - protein, 2099 aa, synthetic construct; identical to SEQ ID NO: 6412

SEQ ID NO: 6414 - protein, 2096 aa, synthetic construct
MPAAKRVKLDGGDKKYSIGLDIGTNSVGWAVITDEYKVPSKKFKVLGNTDRHSIKKNLIGALLFDSGETAEATRLKRTARRRYTRRKNRICYLQEIFSNEMAKVDDSFFHRLEESFLVEEDKKHERHPIFGNIVDEVAYHEKYPTIYHLRKKLVDSTDKADLRLIYLALAHMIKFRGHFLIEGDLNPDNSDVDKLFIQLVQTYNQLFEENPINASGVDAKAILSARLSKSRRLENLIAQLPGEKKNGLFGNLIALSLGLTPNFKSNFDLAEDAKLQLSKDTYDDDLDNLLAQIGDQYADLFLAAKNLSDAILLSDILRVNTEITKAPLSASMIKRYDEHHQDLTLLKALVRQQLPEKYKEIFFDQSKNGYAGYIDGGASQEEFYKFIKPILEKMDGTEELLVKLNREDLLRKQRTFDNGSIPHQIHLGELHAILRRQEDFYPFLKDNREKIEKILTFRIPYYVGPLARGNSRFAWMTRKSEETITPWNFEEVVDKGASAQSFIERMTNFDKNLPNEKVLPKHSLLYEYFTVYNELTKVKYVTEGMRKPAFLSGEQKKAIVDLLFKTNRKVTVKQLKEDYFKKIECFDSVEISGVEDRFNASLGTYHDLLKIIKDKDFLDNEENEDILEDIVLTLTLFEDREMIEERLKTYAHLFDDKVMKQLKRRRYTGWGRLSRKLINGIRDKQSGKTILDFLKSDGFANRNFMQLIHDDSLTFKEDIQKAQVSGQGDSLHEHIANLAGSPAIKKGILQTVKVVDELVKVMGRHKPENIVIEMARENQTTQKGQKNSRERMKRIEEGIKELGSQILKEHPVENTQLQNEKLYLYYLQNGRDMYVDQELDINRLSDYDVDHIVPQSFLKDDSIDNKVLTRSDKARGKSDNVPSEEVVKKMKNYWRQLLNAKLITQRKFDNLTKAERGGLSELDKAGFIKRQLVETRQITKHVAQILDSRMNTKYDENDKLIREVKVITLKSKLVSDFRKDFQFYKVREINNYHHAHDAYLNAVVGTALIKKYPKLESEFVYGDYKVYDVRKMIAKSEQEIGKATAKYFFYSNIMNFFKTEITLANGEIRKRPLIETNGETGEIVWDKGRDFATVRKVLSMPQVNIVKKTEVQTGGFSKESILPKRNSDKLIARKKDWDPKKYGGFDSPTVAYSVLVVAKVEKGKSKKLKSVKELLGITIMERSSFEKNPIDFLEAKGYKEVKKDLIIKLPKYSLFELENGRKRMLASAGELQKGNELALPSKYVNFLYLASHYEKLKGSPEDNEQKQLFVEQHKHYLDEIIEQISEFSKRVILADANLDKVLSAYNKHRDKPIREQAENIIHLFTLTNLGAPAAFKYFDTTIDRKRYTSTKEVLDATLIHQSITGLYETRIDLSQLGGDGGEAAAKEAAAKEAAAKEAAAKGGVPWLMKKPLQLTVLVPLHEYQERLLQQTALPKEQKELLQKLFLKYDALWQHWENQVGHRRIKPHNIATGTLAPRPQKQYPINPKAKPSIQIVIDDLLKQGVLIQQNSTMNTPVYPVPKPDGKWRMVLDYREVNKTIPLIAAQNQHSAGILSSIYRGKYKTTLDLTNGFWAHPITPESYWLTAFTWQGKQYCWTRLPQGFLNSPALFNADVVDLLKEIPNVQAYVDDIYISHDDPQEHLEQLEKIFSILLNAGYVVSLKKSEIAQREVEFLGFNITKEGRGLTDTFKQKLLNITPPKDLKQLQSILGKLNFARNFIPNYSELVKPLYTIVAPANGKFISWTEDNSNQLQHIISVLNQADNLEERNPETRLIIKVNSSPSAGYIRYYNEGSKRPIMYVNYIFSKAEAKFTQTEKLLTTMHKGLIKAMDLAMGQEILVYSPIVSMTKIQRTPLPERKALPVRWITWMTYLEDPRIQFHYDKSLPELQQIPNVTEDVIAKTKHPSEFAMVFYTDGSAIKHPDVNKSHSAGMGIAQVQFIPEYKIVHQWSIPLGDHTAQLAEIAAVEFACKKALKISGPVLIVTDSFYVAESANKELPYWKSNGFLNNKKKPLRHVSKWKSIAECLQLKPDIIIMHEKGHQQPMTTLHTEGNNLADKLATQGSYVVHAGKRTADGSEFEKRTADGSEFESPKKKAKVE

SEQ ID NO: 6415 - protein, 2185 aa, synthetic construct
MPAAKRVKLDGGDKKYSIGLDIGTNSVGWAVITDEYKVPSKKFKVLGNTDRHSIKKNLIGALLFDSGETAEATRLKRTARRRYTRRKNRICYLQEIFSNEMAKVDDSFFHRLEESFLVEEDKKHERHPIFGNIVDEVAYHEKYPTIYHLRKKLVDSTDKADLRLIYLALAHMIKFRGHFLIEGDLNPDNSDVDKLFIQLVQTYNQLFEENPINASGVDAKAILSARLSKSRRLENLIAQLPGEKKNGLFGNLIALSLGLTPNFKSNFDLAEDAKLQLSKDTYDDDLDNLLAQIGDQYADLFLAAKNLSDAILLSDILRVNTEITKAPLSASMIKRYDEHHQDLTLLKALVRQQLPEKYKEIFFDQSKNGYAGYIDGGASQEEFYKFIKPILEKMDGTEELLVKLNREDLLRKQRTFDNGSIPHQIHLGELHAILRRQEDFYPFLKDNREKIEKILTFRIPYYVGPLARGNSRFAWMTRKSEETITPWNFEEVVDKGASAQSFIERMTNFDKNLPNEKVLPKHSLLYEYFTVYNELTKVKYVTEGMRKPAFLSGEQKKAIVDLLFKTNRKVTVKQLKEDYFKKIECFDSVEISGVEDRFNASLGTYHDLLKIIKDKDFLDNEENEDILEDIVLTLTLFEDREMIEERLKTYAHLFDDKVMKQLKRRRYTGWGRLSRKLINGIRDKQSGKTILDFLKSDGFANRNFMQLIHDDSLTFKEDIQKAQVSGQGDSLHEHIANLAGSPAIKKGILQTVKVVDELVKVMGRHKPENIVIEMARENQTTQKGQKNSRERMKRIEEGIKELGSQILKEHPVENTQLQNEKLYLYYLQNGRDMYVDQELDINRLSDYDVDHIVPQSFLKDDSIDNKVLTRSDKARGKSDNVPSEEVVKKMKNYWRQLLNAKLITQRKFDNLTKAERGGLSELDKAGFIKRQLVETRQITKHVAQILDSRMNTKYDENDKLIREVKVITLKSKLVSDFRKDFQFYKVREINNYHHAHDAYLNAVVGTALIKKYPKLESEFVYGDYKVYDVRKMIAKSEQEIGKATAKYFFYSNIMNFFKTEITLANGEIRKRPLIETNGETGEIVWDKGRDFATVRKVLSMPQVNIVKKTEVQTGGFSKESILPKRNSDKLIARKKDWDPKKYGGFDSPTVAYSVLVVAKVEKGKSKKLKSVKELLGITIMERSSFEKNPIDFLEAKGYKEVKKDLIIKLPKYSLFELENGRKRMLASAGELQKGNELALPSKYVNFLYLASHYEKLKGSPEDNEQKQLFVEQHKHYLDEIIEQISEFSKRVILADANLDKVLSAYNKHRDKPIREQAENIIHLFTLTNLGAPAAFKYFDTTIDRKRYTSTKEVLDATLIHQSITGLYETRIDLSQLGGDGGEAAAKEAAAKEAAAKEAAAKGGMDPLQLLQPLEAEIKGTKLKAHWNSGATITCVPEAFLEDERPIQTMLIKTIHGEKQQDVYYLTFKVQGRKVEAEVLASPYDYILLNPSDVPWLMKKPLQLTVLVPLHEYQERLLQQTALPKEQKELLQKLFLKYDALWQHWENQVGHRRIKPHNIATGTLAPRPQKQYPINPKAKPSIQIVIDDLLKQGVLIQQNSTMNTPVYPVPKPDGKWRMVLDYREVNKTIPLIAAQNQHSAGILSSIYRGKYKTTLDLTNGFWAHPITPESYWLTAFTWQGKQYCWTRLPQGFLNSPALFNADVVDLLKEIPNVQAYVDDIYISHDDPQEHLEQLEKIFSILLNAGYVVSLKKSEIAQREVEFLGFNITKEGRGLTDTFKQKLLNITPPKDLKQLQSILGLLNFARNFIPNYSELVKPLYTIVAPANGKFISWTEDNSNQLQHIISVLNQADNLEERNPETRLIIKVNSSPSAGYIRYYNEGSKRPIMYVNYIFSKAEAKFTQTEKLLTTMHKGLIKAMDLAMGQEILVYSPIVSMTKIQRTPLPERKALPVRWITWMTYLEDPRIQFHYDKSLPELQQIPNVTEDVIAKTKHPSEFAMVFYTDGSAIKHPDVNKSHSAGMGIAQVQFIPEYKIVHQWSIPLGDHTAQLAEIAAVEFACKKALKISGPVLIVTDSFYVAESANKELPYWKSNGFLNNKKKPLRHVSKWKSIAECLQLKPDIIIMHEKGHQQPMTTLHTEGNNLADKLATQGSYVVHAGKRTADGSEFEKRTADGSEFESPKKKAKVE

SEQ ID NO: 6416 - protein, 2185 aa, synthetic construct
MPAAKRVKLDGGDKKYSIGLDIGTNSVGWAVITDEYKVPSKKFKVLGNTDRHSIKKNLIGALLFDSGETAEATRLKRTARRRYTRRKNRICYLQEIFSNEMAKVDDSFFHRLEESFLVEEDKKHERHPIFGNIVDEVAYHEKYPTIYHLRKKLVDSTDKADLRLIYLALAHMIKFRGHFLIEGDLNPDNSDVDKLFIQLVQTYNQLFEENPINASGVDAKAILSARLSKSRRLENLIAQLPGEKKNGLFGNLIALSLGLTPNFKSNFDLAEDAKLQLSKDTYDDDLDNLLAQIGDQYADLFLAAKNLSDAILLSDILRVNTEITKAPLSASMIKRYDEHHQDLTLLKALVRQQLPEKYKEIFFDQSKNGYAGYIDGGASQEEFYKFIKPILEKMDGTEELLVKLNREDLLRKQRTFDNGSIPHQIHLGELHAILRRQEDFYPFLKDNREKIEKILTFRIPYYVGPLARGNSRFAWMTRKSEETITPWNFEEVVDKGASAQSFIERMTNFDKNLPNEKVLPKHSLLYEYFTVYNELTKVKYVTEGMRKPAFLSGEQKKAIVDLLFKTNRKVTVKQLKEDYFKKIECFDSVEISGVEDRFNASLGTYHDLLKIIKDKDFLDNEENEDILEDIVLTLTLFEDREMIEERLKTYAHLFDDKVMKQLKRRRYTGWGRLSRKLINGIRDKQSGKTILDFLKSDGFANRNFMQLIHDDSLTFKEDIQKAQVSGQGDSLHEHIANLAGSPAIKKGILQTVKVVDELVKVMGRHKPENIVIEMARENQTTQKGQKNSRERMKRIEEGIKELGSQILKEHPVENTQLQNEKLYLYYLQNGRDMYVDQELDINRLSDYDVDHIVPQSFLKDDSIDNKVLTRSDKARGKSDNVPSEEVVKKMKNYWRQLLNAKLITQRKFDNLTKAERGGLSELDKAGFIKRQLVETRQITKHVAQILDSRMNTKYDENDKLIREVKVITLKSKLVSDFRKDFQFYKVREINNYHHAHDAYLNAVVGTALIKKYPKLESEFVYGDYKVYDVRKMIAKSEQEIGKATAKYFFYSNIMNFFKTEITLANGEIRKRPLIETNGETGEIVWDKGRDFATVRKVLSMPQVNIVKKTEVQTGGFSKESILPKRNSDKLIARKKDWDPKKYGGFDSPTVAYSVLVVAKVEKGKSKKLKSVKELLGITIMERSSFEKNPIDFLEAKGYKEVKKDLIIKLPKYSLFELENGRKRMLASAGELQKGNELALPSKYVNFLYLASHYEKLKGSPEDNEQKQLFVEQHKHYLDEIIEQISEFSKRVILADANLDKVLSAYNKHRDKPIREQAENIIHLFTLTNLGAPAAFKYFDTTIDRKRYTSTKEVLDATLIHQSITGLYETRIDLSQLGGDGGEAAAKEAAAKEAAAKEAAAKGGMDPLQLLQPLEAEIKGTKLKAHWNSGATITCVPEAFLEDERPIQTMLIKTIHGEKQQDVYYLTFKVQGRKVEAEVLASPYDYILLNPSDVPWLMKKPLQLTVLVPLHEYQERLLQQTALPKEQKELLQKLFLKYDALWQHWENQVGHRRIKPHNIATGTLAPRPQKQYPINPKAKPSIQIVIDDLLKQGVLIQQNSTMNTPVYPVPKPDGKWRMVLDYREVNKTIPLIAAQNQHSAGILSSIYRGKYKTTLDLTNGFWAHPITPESYWLTAFTWQGKQYCWTRLPQGFLNSPALFNADVVDLLKEIPNVQAYVDDIYISHDDPQEHLEQLEKIFSILLNAGYVVSLKKSEIAQREVEFLGFNITKEGRGLTDTFKQKLLNITPPKDLKQLQSILGKLNFARNFIPNYSELVKPLYTIVAPANGKFISWTEDNSNQLQHIISVLNQADNLEERNPETRLIIKVNSSPSAGYIRYYNEGSKRPIMYVNYIFSKAEAKFTQTEKLLTTMHKGLIKAMDLAMGQEILVYSPIVSMTKIQRTPLPERKALPVRWITWMTYLEDPRIQFHYDKSLPELQQIPNVTEDVIAKTKHPSEFAMVFYTDGSAIKHPDVNKSHSAGMGIAQVQFIPEYKIVHQWSIPLGDHTAQLAEIAAVEFACKKALKISGPVLIVTDSFYVAESANKELPYWKSNGFLNNKKKPLRHVSKWKSIAECLQLKPDIIIMHEKGHQQPMTTLHTEGNNLADKLATQGSYVVHAGKRTADGSEFEKRTADGSEFESPKKKAKVE

SEQ ID NO: 6417 - protein, 2185 aa, synthetic construct
MPAAKRVKLDGGDKKYSIGLDIGTNSVGWAVITDEYKVPSKKFKVLGNTDRHSIKKNLIGALLFDSGETAEATRLKRTARRRYTRRKNRICYLQEIFSNEMAKVDDSFFHRLEESFLVEEDKKHERHPIFGNIVDEVAYHEKYPTIYHLRKKLVDSTDKADLRLIYLALAHMIKFRGHFLIEGDLNPDNSDVDKLFIQLVQTYNQLFEENPINASGVDAKAILSARLSKSRRLENLIAQLPGEKKNGLFGNLIALSLGLTPNFKSNFDLAEDAKLQLSKDTYDDDLDNLLAQIGDQYADLFLAAKNLSDAILLSDILRVNTEITKAPLSASMIKRYDEHHQDLTLLKALVRQQLPEKYKEIFFDQSKNGYAGYIDGGASQEEFYKFIKPILEKMDGTEELLVKLNREDLLRKQRTFDNGSIPHQIHLGELHAILRRQEDFYPFLKDNREKIEKILTFRIPYYVGPLARGNSRFAWMTRKSEETITPWNFEEVVDKGASAQSFIERMTNFDKNLPNEKVLPKHSLLYEYFTVYNELTKVKYVTEGMRKPAFLSGEQKKAIVDLLFKTNRKVTVKQLKEDYFKKIECFDSVEISGVEDRFNASLGTYHDLLKIIKDKDFLDNEENEDILEDIVLTLTLFEDREMIEERLKTYAHLFDDKVMKQLKRRRYTGWGRLSRKLINGIRDKQSGKTILDFLKSDGFANRNFMQLIHDDSLTFKEDIQKAQVSGQGDSLHEHIANLAGSPAIKKGILQTVKVVDELVKVMGRHKPENIVIEMARENQTTQKGQKNSRERMKRIEEGIKELGSQILKEHPVENTQLQNEKLYLYYLQNGRDMYVDQELDINRLSDYDVDHIVPQSFLKDDSIDNKVLTRSDKARGKSDNVPSEEVVKKMKNYWRQLLNAKLITQRKFDNLTKAERGGLSELDKAGFIKRQLVETRQITKHVAQILDSRMNTKYDENDKLIREVKVITLKSKLVSDFRKDFQFYKVREINNYHHAHDAYLNAVVGTALIKKYPKLESEFVYGDYKVYDVRKMIAKSEQEIGKATAKYFFYSNIMNFFKTEITLANGEIRKRPLIETNGETGEIVWDKGRDFATVRKVLSMPQVNIVKKTEVQTGGFSKESILPKRNSDKLIARKKDWDPKKYGGFDSPTVAYSVLVVAKVEKGKSKKLKSVKELLGITIMERSSFEKNPIDFLEAKGYKEVKKDLIIKLPKYSLFELENGRKRMLASAGELQKGNELALPSKYVNFLYLASHYEKLKGSPEDNEQKQLFVEQHKHYLDEIIEQISEFSKRVILADANLDKVLSAYNKHRDKPIREQAENIIHLFTLTNLGAPAAFKYFDTTIDRKRYTSTKEVLDATLIHQSITGLYETRIDLSQLGGDGGEAAAKEAAAKEAAAKEAAAKGGMDPLQLLQPLEAEIKGTKLKAHWNSGATITCVPQAFLEEEVPIKNIWIKTIHGEKEQPVYYLTFKIQGRKVEAEVISSPYDYILVSPSDIPWLMKKPLQLTTLVPLQEYEERLLKQTMLTGSYKEKLQSLFLKYDALWQHWENQVGHRRIKPHHIATGTVNPRPQKQYPINPKAKASIQTVINDLLKQGVLIQQNSIMNTPVYPVPKPDGKWRMVLDYREVNKTIPLIAAQNQHSAGILSSIFRGKYKTTLDLSNGFWAHSITPESYWLTAFTWLGQQYCWTRLPQGFLNSPALFNADVVDLLKEVPNVQVYVDDIYISHDDPREHLEQLEKVFSLLLNAGYVVSLKKSEIAQHEVEFLGFNITKEGRGLTETFKQKLLNITPPRDLKQLQSILGLLNFARNFIPNFSELVKPLYNIIATAPGKYITWTTDNSQQLQNIISMLNSAENLEERNPEVRLIMKVNTSPSAGYIRFYNEFAKRPIMYLNYVYTKAEVKFTNTEKLLTTIHKGLIKALDLGMGQEILVYSPIVSMTKIQKTPLPERKALPIRWITWMSYLEDPRIQFHYDKTLPELQQVPTVTDDIIAKIKHPSEFSMVFYTDGSAIKHPNVNKSHNAGMGIAQVQFKPEFTVINTWSIPLGDHTAQLAEVAAVEFACKKALKIDGPVLIVTDSFYVAESVNKELPYWQSNGFFNNKKKPLKHVSKWKSIADCIQLKPDIIIIHEKGHQPTASTFHTEGNNLADKLATQGSYVVNAGKRTADGSEFEKRTADGSEFESPKKKAKVE

SEQ ID NO: 6418 - protein, 2185 aa, synthetic construct
MPAAKRVKLDGGDKKYSIGLDIGTNSVGWAVITDEYKVPSKKFKVLGNTDRHSIKKNLIGALLFDSGETAEATRLKRTARRRYTRRKNRICYLQEIFSNEMAKVDDSFFHRLEESFLVEEDKKHERHPIFGNIVDEVAYHEKYPTIYHLRKKLVDSTDKADLRLIYLALAHMIKFRGHFLIEGDLNPDNSDVDKLFIQLVQTYNQLFEENPINASGVDAKAILSARLSKSRRLENLIAQLPGEKKNGLFGNLIALSLGLTPNFKSNFDLAEDAKLQLSKDTYDDDLDNLLAQIGDQYADLFLAAKNLSDAILLSDILRVNTEITKAPLSASMIKRYDEHHQDLTLLKALVRQQLPEKYKEIFFDQSKNGYAGYIDGGASQEEFYKFIKPILEKMDGTEELLVKLNREDLLRKQRTFDNGSIPHQIHLGELHAILRRQEDFYPFLKDNREKIEKILTFRIPYYVGPLARGNSRFAWMTRKSEETITPWNFEEVVDKGASAQSFIERMTNFDKNLPNEKVLPKHSLLYEYFTVYNELTKVKYVTEGMRKPAFLSGEQKKAIVDLLFKTNRKVTVKQLKEDYFKKIECFDSVEISGVEDRFNASLGTYHDLLKIIKDKDFLDNEENEDILEDIVLTLTLFEDREMIEERLKTYAHLFDDKVMKQLKRRRYTGWGRLSRKLINGIRDKQSGKTILDFLKSDGFANRNFMQLIHDDSLTFKEDIQKAQVSGQGDSLHEHIANLAGSPAIKKGILQTVKVVDELVKVMGRHKPENIVIEMARENQTTQKGQKNSRERMKRIEEGIKELGSQILKEHPVENTQLQNEKLYLYYLQNGRDMYVDQELDINRLSDYDVDHIVPQSFLKDDSIDNKVLTRSDKARGKSDNVPSEEVVKKMKNYWRQLLNAKLITQRKFDNLTKAERGGLSELDKAGFIKRQLVETRQITKHVAQILDSRMNTKYDENDKLIREVKVITLKSKLVSDFRKDFQFYKVREINNYHHAHDAYLNAVVGTALIKKYPKLESEFVYGDYKVYDVRKMIAKSEQEIGKATAKYFFYSNIMNFFKTEITLANGEIRKRPLIETNGETGEIVWDKGRDFATVRKVLSMPQVNIVKKTEVQTGGFSKESILPKRNSDKLIARKKDWDPKKYGGFDSPTVAYSVLVVAKVEKGKSKKLKSVKELLGITIMERSSFEKNPIDFLEAKGYKEVKKDLIIKLPKYSLFELENGRKRMLASAGELQKGNELALPSKYVNFLYLASHYEKLKGSPEDNEQKQLFVEQHKHYLDEIIEQISEFSKRVILADANLDKVLSAYNKHRDKPIREQAENIIHLFTLTNLGAPAAFKYFDTTIDRKRYTSTKEVLDATLIHQSITGLYETRIDLSQLGGDGGEAAAKEAAAKEAAAKEAAAKGGMDPLQLLQPLEAEIKGTKLKAHWNSGATITCVPQAFLEEEVPIKNIWIKTIHGEKEQPVYYLTFKIQGRKVEAEVISSPYDYILVSPSDIPWLMKKPLQLTTLVPLQEYEERLLKQTMLTGSYKEKLQSLFLKYDALWQHWENQVGHRRIKPHHIATGTVNPRPQKQYPINPKAKASIQTVINDLLKQGVLIQQNSIMNTPVYPVPKPDGKWRMVLDYREVNKTIPLIAAQNQHSAGILSSIFRGKYKTTLDLSNGFWAHSITPESYWLTAFTWLGQQYCWTRLPQGFLNSPALFNADVVDLLKEVPNVQVYVDDIYISHDDPREHLEQLEKVFSLLLNAGYVVSLKKSEIAQHEVEFLGFNITKEGRGLTETFKQKLLNITPPRDLKQLQSILGKLNFARNFIPNFSELVKPLYNIIATAPGKYITWTTDNSQQLQNIISMLNSAENLEERNPEVRLIMKVNTSPSAGYIRFYNEFAKRPIMYLNYVYTKAEVKFTNTEKLLTTIHKGLIKALDLGMGQEILVYSPIVSMTKIQKTPLPERKALPIRWITWMSYLEDPRIQFHYDKTLPELQQVPTVTDDIIAKIKHPSEFSMVFYTDGSAIKHPNVNKSHNAGMGIAQVQFKPEFTVINTWSIPLGDHTAQLAEVAAVEFACKKALKIDGPVLIVTDSFYVAESVNKELPYWQSNGFFNNKKKPLKHVSKWKSIADCIQLKPDIIIIHEKGHQPTASTFHTEGNNLADKLATQGSYVVNAGKRTADGSEFEKRTADGSEFESPKKKAKVE

SEQ ID NO: 6419 - protein, 2105 aa, synthetic construct
MPAAKRVKLDGGDKKYSIGLDIGTNSVGWAVITDEYKVPSKKFKVLGNTDRHSIKKNLIGALLFDSGETAEATRLKRTARRRYTRRKNRICYLQEIFSNEMAKVDDSFFHRLEESFLVEEDKKHERHPIFGNIVDEVAYHEKYPTIYHLRKKLVDSTDKADLRLIYLALAHMIKFRGHFLIEGDLNPDNSDVDKLFIQLVQTYNQLFEENPINASGVDAKAILSARLSKSRRLENLIAQLPGEKKNGLFGNLIALSLGLTPNFKSNFDLAEDAKLQLSKDTYDDDLDNLLAQIGDQYADLFLAAKNLSDAILLSDILRVNTEITKAPLSASMIKRYDEHHQDLTLLKALVRQQLPEKYKEIFFDQSKNGYAGYIDGGASQEEFYKFIKPILEKMDGTEELLVKLNREDLLRKQRTFDNGSIPHQIHLGELHAILRRQEDFYPFLKDNREKIEKILTFRIPYYVGPLARGNSRFAWMTRKSEETITPWNFEEVVDKGASAQSFIERMTNFDKNLPNEKVLPKHSLLYEYFTVYNELTKVKYVTEGMRKPAFLSGEQKKAIVDLLFKTNRKVTVKQLKEDYFKKIECFDSVEISGVEDRFNASLGTYHDLLKIIKDKDFLDNEENEDILEDIVLTLTLFEDREMIEERLKTYAHLFDDKVMKQLKRRRYTGWGRLSRKLINGIRDKQSGKTILDFLKSDGFANRNFMQLIHDDSLTFKEDIQKAQVSGQGDSLHEHIANLAGSPAIKKGILQTVKVVDELVKVMGRHKPENIVIEMARENQTTQKGQKNSRERMKRIEEGIKELGSQILKEHPVENTQLQNEKLYLYYLQNGRDMYVDQELDINRLSDYDVDHIVPQSFLKDDSIDNKVLTRSDKARGKSDNVPSEEVVKKMKNYWRQLLNAKLITQRKFDNLTKAERGGLSELDKAGFIKRQLVETRQITKHVAQILDSRMNTKYDENDKLIREVKVITLKSKLVSDFRKDFQFYKVREINNYHHAHDAYLNAVVGTALIKKYPKLESEFVYGDYKVYDVRKMIAKSEQEIGKATAKYFFYSNIMNFFKTEITLANGEIRKRPLIETNGETGEIVWDKGRDFATVRKVLSMPQVNIVKKTEVQTGGFSKESILPKRNSDKLIARKKDWDPKKYGGFDSPTVAYSVLVVAKVEKGKSKKLKSVKELLGITIMERSSFEKNPIDFLEAKGYKEVKKDLIIKLPKYSLFELENGRKRMLASAGELQKGNELALPSKYVNFLYLASHYEKLKGSPEDNEQKQLFVEQHKHYLDEIIEQISEFSKRVILADANLDKVLSAYNKHRDKPIREQAENIIHLFTLTNLGAPAAFKYFDTTIDRKRYTSTKEVLDATLIHQSITGLYETRIDLSQLGGDGGEAAAKEAAAKEAAAKEAAAKGGTLNIEDEYRLHETSKEPDVPLGSTWLSDFPQAWAETGGMGLAVRQAPLIIPLKATSTPVSIKQYPMSQEARLGIKPHIQRLLDQGILVPCQSPWNTPLLPVKKPGTNDYRPVQDLREVNKRVEDIHPTVPNPYNLLSGLPPSHQWYTVLDLKDAFFCLRLHPTSQPLFAFEWRDPEMGISGQLTWTRLPQGFKNSPTLFDEALHRDLADFRIQHPDLILLQYVDDLLLAATSEQDCQRGTRALLQTLGNLGYRASAKKAQICQKQVKYLGYLLKEGQRWLTEARKETVMGQPTPKTPRQLREFLGTAGFCRLWIPGFAEMAAPLYPLTKTGTLFNWGPDQQKAYQEIKQALLTAPALGLPDLTKPFELFVDEKQGYAKGVLTQKLGPWRRPVAYLSKKLDPVAAGWPPCLRMVAAIAVLTKDAGKLTMGQPLVILAPHAVEALVKQPPDRWLSNARMTHYQAMLLDTDRVQFGPVVALNPATLLPLPEKEAPHDCLEILAETHGTRPDLTDQPIPDADYTWYTDGSSFLQEGQRRAGAAVTTETEVIWARALPAGTSAQRAELIALTQALKMAEGKKLNVYTDSRYAFATAHVHGEIYRRRGLLTSEGREIKNKNEILALLKALFLPKRLSIIHCPGHQKGNSAEARGNRMADQAAREAAMKAVLETSTLLAGKRTADGSEFEKRTADGSEFESPKKKAKVE

SEQ ID NO: 6420 - protein, 2112 aa, synthetic construct
MPAAKRVKLDGGDKKYSIGLDIGTNSVGWAVITDEYKVPSKKFKVLGNTDRHSIKKNLIGALLFDSGETAEATRLKRTARRRYTRRKNRICYLQEIFSNEMAKVDDSFFHRLEESFLVEEDKKHERHPIFGNIVDEVAYHEKYPTIYHLRKKLVDSTDKADLRLIYLALAHMIKFRGHFLIEGDLNPDNSDVDKLFIQLVQTYNQLFEENPINASGVDAKAILSARLSKSRRLENLIAQLPGEKKNGLFGNLIALSLGLTPNFKSNFDLAEDAKLQLSKDTYDDDLDNLLAQIGDQYADLFLAAKNLSDAILLSDILRVNTEITKAPLSASMIKRYDEHHQDLTLLKALVRQQLPEKYKEIFFDQSKNGYAGYIDGGASQEEFYKFIKPILEKMDGTEELLVKLNREDLLRKQRTFDNGSIPHQIHLGELHAILRRQEDFYPFLKDNREKIEKILTFRIPYYVGPLARGNSRFAWMTRKSEETITPWNFEEVVDKGASAQSFIERMTNFDKNLPNEKVLPKHSLLYEYFTVYNELTKVKYVTEGMRKPAFLSGEQKKAIVDLLFKTNRKVTVKQLKEDYFKKIECFDSVEISGVEDRFNASLGTYHDLLKIIKDKDFLDNEENEDILEDIVLTLTLFEDREMIEERLKTYAHLFDDKVMKQLKRRRYTGWGRLSRKLINGIRDKQSGKTILDFLKSDGFANRNFMQLIHDDSLTFKEDIQKAQVSGQGDSLHEHIANLAGSPAIKKGILQTVKVVDELVKVMGRHKPENIVIEMARENQTTQKGQKNSRERMKRIEEGIKELGSQILKEHPVENTQLQNEKLYLYYLQNGRDMYVDQELDINRLSDYDVDHIVPQSFLKDDSIDNKVLTRSDKARGKSDNVPSEEVVKKMKNYWRQLLNAKLITQRKFDNLTKAERGGLSELDKAGFIKRQLVETRQITKHVAQILDSRMNTKYDENDKLIREVKVITLKSKLVSDFRKDFQFYKVREINNYHHAHDAYLNAVVGTALIKKYPKLESEFVYGDYKVYDVRKMIAKSEQEIGKATAKYFFYSNIMNFFKTEITLANGEIRKRPLIETNGETGEIVWDKGRDFATVRKVLSMPQVNIVKKTEVQTGGFSKESILPKRNSDKLIARKKDWDPKKYGGFDSPTVAYSVLVVAKVEKGKSKKLKSVKELLGITIMERSSFEKNPIDFLEAKGYKEVKKDLIIKLPKYSLFELENGRKRMLASAGELQKGNELALPSKYVNFLYLASHYEKLKGSPEDNEQKQLFVEQHKHYLDEIIEQISEFSKRVILADANLDKVLSAYNKHRDKPIREQAENIIHLFTLTNLGAPAAFKYFDTTIDRKRYTSTKEVLDATLIHQSITGLYETRIDLSQLGGDGGEAAAKEAAAKEAAAKEAAAKEAAAKGGTAPLEEEYRLFLEAPIQNVTLLEQWKREIPKVWAEINPPGLASTQAPIHVQLLSTALPVRVRQYPITLEAKRSLRETIRKFRAAGILRPVHSPWNTPLLPVRKSGTSEYRMVQDLREVNKRVETIHPTVPNPYTLLSLLPPDRIWYSVLDLKDAFFCIPLAPESQLIFAFEWADAEEGESGQLTWTRLPQGFKNSPTLFDEALNRDLQGFRLDHPSVSLLQYVDDLLIAADTQAACLSATRDLLMTLAELGYRVSGKKAQLCQEEVTYLGFKIHKGSRSLSNSRTQAILQIPVPKTKRQVREFLGTIGYCRLWIPGFAELAQPLYAATRGGNDPLVWGEKEEEAFQSLKLALTQPPALALPSLDKPFQLFVEETSGAAKGVLTQALGPWKRPVAYLSKRLDPVAAGWPRCLRAIAAAALLTREASKLTFGQDIEITSSHNLESLLRSPPDKWLTNARITQYQVLLLDPPRVRFKQTAALNPATLLPETDDTLPIHHCLDTLDSLTSTRPDLTDQPLAQAEATLFTDGSSYIRDGKRYAGAAVVTLDSVIWAEPLPIGTSAQKAELIALTKALEWSKDKSVNIYTDSRYAFATLHVHGMIYRERGLLTAGGKAIKNAPEILALLTAVWLPKRVAVMHCKGHQKDDAPTSTGNRRADEVAREVAIRPLSTQATISAGKRTADGSEFEKRTADGSEFESPKKKAKVE

SEQ ID NO: 6421 - protein, 2112 aa, synthetic construct
MPAAKRVKLDGGDKKYSIGLDIGTNSVGWAVITDEYKVPSKKFKVLGNTDRHSIKKNLIGALLFDSGETAEATRLKRTARRRYTRRKNRICYLQEIFSNEMAKVDDSFFHRLEESFLVEEDKKHERHPIFGNIVDEVAYHEKYPTIYHLRKKLVDSTDKADLRLIYLALAHMIKFRGHFLIEGDLNPDNSDVDKLFIQLVQTYNQLFEENPINASGVDAKAILSARLSKSRRLENLIAQLPGEKKNGLFGNLIALSLGLTPNFKSNFDLAEDAKLQLSKDTYDDDLDNLLAQIGDQYADLFLAAKNLSDAILLSDILRVNTEITKAPLSASMIKRYDEHHQDLTLLKALVRQQLPEKYKEIFFDQSKNGYAGYIDGGASQEEFYKFIKPILEKMDGTEELLVKLNREDLLRKQRTFDNGSIPHQIHLGELHAILRRQEDFYPFLKDNREKIEKILTFRIPYYVGPLARGNSRFAWMTRKSEETITPWNFEEVVDKGASAQSFIERMTNFDKNLPNEKVLPKHSLLYEYFTVYNELTKVKYVTEGMRKPAFLSGEQKKAIVDLLFKTNRKVTVKQLKEDYFKKIECFDSVEISGVEDRFNASLGTYHDLLKIIKDKDFLDNEENEDILEDIVLTLTLFEDREMIEERLKTYAHLFDDKVMKQLKRRRYTGWGRLSRKLINGIRDKQSGKTILDFLKSDGFANRNFMQLIHDDSLTFKEDIQKAQVSGQGDSLHEHIANLAGSPAIKKGILQTVKVVDELVKVMGRHKPENIVIEMARENQTTQKGQKNSRERMKRIEEGIKELGSQILKEHPVENTQLQNEKLYLYYLQNGRDMYVDQELDINRLSDYDVDHIVPQSFLKDDSIDNKVLTRSDKARGKSDNVPSEEVVKKMKNYWRQLLNAKLITQRKFDNLTKAERGGLSELDKAGFIKRQLVETRQITKHVAQILDSRMNTKYDENDKLIREVKVITLKSKLVSDFRKDFQFYKVREINNYHHAHDAYLNAVVGTALIKKYPKLESEFVYGDYKVYDVRKMIAKSEQEIGKATAKYFFYSNIMNFFKTEITLANGEIRKRPLIETNGETGEIVWDKGRDFATVRKVLSMPQVNIVKKTEVQTGGFSKESILPKRNSDKLIARKKDWDPKKYGGFDSPTVAYSVLVVAKVEKGKSKKLKSVKELLGITIMERSSFEKNPIDFLEAKGYKEVKKDLIIKLPKYSLFELENGRKRMLASAGELQKGNELALPSKYVNFLYLASHYEKLKGSPEDNEQKQLFVEQHKHYLDEIIEQISEFSKRVILADANLDKVLSAYNKHRDKPIREQAENIIHLFTLTNLGAPAAFKYFDTTIDRKRYTSTKEVLDATLIHQSITGLYETRIDLSQLGGDGGEAAAKEAAAKEAAAKEAAAKEAAAKGGTAPLEEEYRLFLEAPIQNVTLLEQWKREIPKVWAEINPPGLASTQAPIHVQLLSTALPVRVRQYPITLEAKRSLRETIRKFRAAGILRPVHSPWNTPLLPVRKSGTSEYRMVQDLREVNKRVETIHPTVPNPYTLLSLLPPDRIWYSVLDLKDAFFCIPLAPESQLIFAFEWADAEEGESGQLTWTRLPQGFKNSPTLFNEALNRDLQGFRLDHPSVSLLQYVDDLLIAADTQAACLSATRDLLMTLAELGYRVSGKKAQLCQEEVTYLGFKIHKGSRSLSNSRTQAILQIPVPKTKRQVREFLGTIGYCRLWIPGFAELAQPLYAATRPGNDPLVWGEKEEEAFQSLKLALTQPPALALPSLDKPFQLFVEETSGAAKGVLTQALGPWKRPVAYLSKRLDPVAAGWPRCLRAIAAAALLTREASKLTFGQDIEITSSHNLESLLRSPPDKWLTNARITQYQVLLLDPPRVRFKQTAALNPATLLPETDDTLPIHHCLDTLDSLTSTRPDLTDQPLAQAEATLFTDGSSYIRDGKRYAGAAVVTLDSVIWAEPLPIGTSAQKAELIALTKALEWSKDKSVNIYTDSRYAFATLHVHGMIYRERGWLTAGGKAIKNAPEILALLTAVWLPKRVAVMHCKGHQKDDAPTSTGNRRADEVAREVAIRPLSTQATISAGKRTADGSEFEKRTADGSEFESPKKKAKVE

SEQ ID NO: 6422 - protein, 2187 aa, synthetic construct
MPAAKRVKLDGGDKKYSIGLDIGTNSVGWAVITDEYKVPSKKFKVLGNTDRHSIKKNLIGALLFDSGETAEATRLKRTARRRYTRRKNRICYLQEIFSNEMAKVDDSFFHRLEESFLVEEDKKHERHPIFGNIVDEVAYHEKYPTIYHLRKKLVDSTDKADLRLIYLALAHMIKFRGHFLIEGDLNPDNSDVDKLFIQLVQTYNQLFEENPINASGVDAKAILSARLSKSRRLENLIAQLPGEKKNGLFGNLIALSLGLTPNFKSNFDLAEDAKLQLSKDTYDDDLDNLLAQIGDQYADLFLAAKNLSDAILLSDILRVNTEITKAPLSASMIKRYDEHHQDLTLLKALVRQQLPEKYKEIFFDQSKNGYAGYIDGGASQEEFYKFIKPILEKMDGTEELLVKLNREDLLRKQRTFDNGSIPHQIHLGELHAILRRQEDFYPFLKDNREKIEKILTFRIPYYVGPLARGNSRFAWMTRKSEETITPWNFEEVVDKGASAQSFIERMTNFDKNLPNEKVLPKHSLLYEYFTVYNELTKVKYVTEGMRKPAFLSGEQKKAIVDLLFKTNRKVTVKQLKEDYFKKIECFDSVEISGVEDRFNASLGTYHDLLKIIKDKDFLDNEENEDILEDIVLTLTLFEDREMIEERLKTYAHLFDDKVMKQLKRRRYTGWGRLSRKLINGIRDKQSGKTILDFLKSDGFANRNFMQLIHDDSLTFKEDIQKAQVSGQGDSLHEHIANLAGSPAIKKGILQTVKVVDELVKVMGRHKPENIVIEMARENQTTQKGQKNSRERMKRIEEGIKELGSQILKEHPVENTQLQNEKLYLYYLQNGRDMYVDQELDINRLSDYDVDHIVPQSFLKDDSIDNKVLTRSDKARGKSDNVPSEEVVKKMKNYWRQLLNAKLITQRKFDNLTKAERGGLSELDKAGFIKRQLVETRQITKHVAQILDSRMNTKYDENDKLIREVKVITLKSKLVSDFRKDFQFYKVREINNYHHAHDAYLNAVVGTALIKKYPKLESEFVYGDYKVYDVRKMIAKSEQEIGKATAKYFFYSNIMNFFKTEITLANGEIRKRPLIETNGETGEIVWDKGRDFATVRKVLSMPQVNIVKKTEVQTGGFSKESILPKRNSDKLIARKKDWDPKKYGGFDSPTVAYSVLVVAKVEKGKSKKLKSVKELLGITIMERSSFEKNPIDFLEAKGYKEVKKDLIIKLPKYSLFELENGRKRMLASAGELQKGNELALPSKYVNFLYLASHYEKLKGSPEDNEQKQLFVEQHKHYLDEIIEQISEFSKRVILADANLDKVLSAYNKHRDKPIREQAENIIHLFTLTNLGAPAAFKYFDTTIDRKRYTSTKEVLDATLIHQSITGLYETRIDLSQLGGDGGEAAAKEAAAKEAAAKEAAAKEAAAKGGMDLLKPLTVERKGVKIKGYWNSQADITCVPKDLLQGEEPVRQQNVTTIHGTQEGDVYYVNLKIDGRRINTEVIGTTLDYAIITPGDVPWILKKPLELTIKLDLEEQQGTLLNNSILSKKGKEELKQLFEKYSALWQSWENQVGHRRIRPHKIATGTVKPTPQKQYHINPKAKPDIQIVINDLLKQGVLIQKESTMNTPVYPVPKPNGRWRMVLDYRAVNKVTPLIAVQNQHSYGILGSLFKGRYKTTIDLSNGFWAHPIVPEDYWITAFTWQGKQYCWTVLPQGFLNSPGLFTGDVVDLLQGIPNVEVYVDDVYISHDSEKEHLEYLDILFNRLKEAGYIISLKKSNIANSIVDFLGFQITNEGRGLTDTFKEKLENITAPTTLKQLQSILGLLNFARNFIPDFTELIAPLYALIPKSTKNYVPWQIEHSTTLETLITKLNGAEYLQGRKGDKTLIMKVNASYTTGYIRYYNEGEKKPISYVSIVFSKTELKFTELEKLLTTVHKGLLKALDLSMGQNIHVYSPIVSMQNIQKTPQTAKKALASRWLSWLSYLEDPRIRFFYDPQMPALKDLPAVDTGKDNKKHPSNFQHIFYTDGSAITSPTKEGHLNAGMGIVYFINKDGNLQKQQEWSISLGNHTAQFAEIAAFEFALKKCLPLGGNILVVTDSNYVAKAYNEELDVWASNGFVNNRKKPLKHISKWKSVADLKRLRPDVVVTHEPGHQKLDSSPHAYGNNLADQLATQASFKVHAGKRTADGSEFEKRTADGSEFESPKKKAKVE

SEQ ID NO: 6423 - protein, 2101 aa, synthetic construct
MPAAKRVKLDGGDKKYSIGLDIGTNSVGWAVITDEYKVPSKKFKVLGNTDRHSIKKNLIGALLFDSGETAEATRLKRTARRRYTRRKNRICYLQEIFSNEMAKVDDSFFHRLEESFLVEEDKKHERHPIFGNIVDEVAYHEKYPTIYHLRKKLVDSTDKADLRLIYLALAHMIKFRGHFLIEGDLNPDNSDVDKLFIQLVQTYNQLFEENPINASGVDAKAILSARLSKSRRLENLIAQLPGEKKNGLFGNLIALSLGLTPNFKSNFDLAEDAKLQLSKDTYDDDLDNLLAQIGDQYADLFLAAKNLSDAILLSDILRVNTEITKAPLSASMIKRYDEHHQDLTLLKALVRQQLPEKYKEIFFDQSKNGYAGYIDGGASQEEFYKFIKPILEKMDGTEELLVKLNREDLLRKQRTFDNGSIPHQIHLGELHAILRRQEDFYPFLKDNREKIEKILTFRIPYYVGPLARGNSRFAWMTRKSEETITPWNFEEVVDKGASAQSFIERMTNFDKNLPNEKVLPKHSLLYEYFTVYNELTKVKYVTEGMRKPAFLSGEQKKAIVDLLFKTNRKVTVKQLKEDYFKKIECFDSVEISGVEDRFNASLGTYHDLLKIIKDKDFLDNEENEDILEDIVLTLTLFEDREMIEERLKTYAHLFDDKVMKQLKRRRYTGWGRLSRKLINGIRDKQSGKTILDFLKSDGFANRNFMQLIHDDSLTFKEDIQKAQVSGQGDSLHEHIANLAGSPAIKKGILQTVKVVDELVKVMGRHKPENIVIEMARENQTTQKGQKNSRERMKRIEEGIKELGSQILKEHPVENTQLQNEKLYLYYLQNGRDMYVDQELDINRLSDYDVDHIVPQSFLKDDSIDNKVLTRSDKARGKSDNVPSEEVVKKMKNYWRQLLNAKLITQRKFDNLTKAERGGLSELDKAGFIKRQLVETRQITKHVAQILDSRMNTKYDENDKLIREVKVITLKSKLVSDFRKDFQFYKVREINNYHHAHDAYLNAVVGTALIKKYPKLESEFVYGDYKVYDVRKMIAKSEQEIGKATAKYFFYSNIMNFFKTEITLANGEIRKRPLIETNGETGEIVWDKGRDFATVRKVLSMPQVNIVKKTEVQTGGFSKESILPKRNSDKLIARKKDWDPKKYGGFDSPTVAYSVLVVAKVEKGKSKKLKSVKELLGITIMERSSFEKNPIDFLEAKGYKEVKKDLIIKLPKYSLFELENGRKRMLASAGELQKGNELALPSKYVNFLYLASHYEKLKGSPEDNEQKQLFVEQHKHYLDEIIEQISEFSKRVILADANLDKVLSAYNKHRDKPIREQAENIIHLFTLTNLGAPAAFKYFDTTIDRKRYTSTKEVLDATLIHQSITGLYETRIDLSQLGGDGGEAAAKEAAAKEAAAKEAAAKEAAAKGGVPWILKKPLELTIKLDLEEQQGTLLNNSILSKKGKEELKQLFEKYSALWQSWENQVGHRRIRPHKIATGTVKPTPQKQYHINPKAKPDIQIVINDLLKQGVLIQKESTMNTPVYPVPKPNGRWRMVLDYRAVNKVTPLIAVQNQHSYGILGSLFKGRYKTTIDLSNGFWAHPIVPEDYWITAFTWQGKQYCWTVLPQGFLNSPGLFTGDVVDLLQGIPNVEVYVDDVYISHDSEKEHLEYLDILFNRLKEAGYIISLKKSNIANSIVDFLGFQITNEGRGLTDTFKEKLENITAPTTLKQLQSILGLLNFARNFIPDFTELIAPLYALIPKSTKNYVPWQIEHSTTLETLITKLNGAEYLQGRKGDKTLIMKVNASYTTGYIRYYNEGEKKPISYVSIVFSKTELKFTELEKLLTTVHKGLLKALDLSMGQNIHVYSPIVSMQNIQKTPQTAKKALASRWLSWLSYLEDPRIRFFYDPQMPALKDLPAVDTGKDNKKHPSNFQHIFYTDGSAITSPTKEGHLNAGMGIVYFINKDGNLQKQQEWSISLGNHTAQFAEIAAFEFALKKCLPLGGNILVVTDSNYVAKAYNEELDVWASNGFVNNRKKPLKHISKWKSVADLKRLRPDVVVTHEPGHQKLDSSPHAYGNNLADQLATQASFKVHAGKRTADGSEFEKRTADGSEFESPKKKAKVE

SEQ ID NO: 6424 - protein, 2101 aa, synthetic construct
MPAAKRVKLDGGDKKYSIGLDIGTNSVGWAVITDEYKVPSKKFKVLGNTDRHSIKKNLIGALLFDSGETAEATRLKRTARRRYTRRKNRICYLQEIFSNEMAKVDDSFFHRLEESFLVEEDKKHERHPIFGNIVDEVAYHEKYPTIYHLRKKLVDSTDKADLRLIYLALAHMIKFRGHFLIEGDLNPDNSDVDKLFIQLVQTYNQLFEENPINASGVDAKAILSARLSKSRRLENLIAQLPGEKKNGLFGNLIALSLGLTPNFKSNFDLAEDAKLQLSKDTYDDDLDNLLAQIGDQYADLFLAAKNLSDAILLSDILRVNTEITKAPLSASMIKRYDEHHQDLTLLKALVRQQLPEKYKEIFFDQSKNGYAGYIDGGASQEEFYKFIKPILEKMDGTEELLVKLNREDLLRKQRTFDNGSIPHQIHLGELHAILRRQEDFYPFLKDNREKIEKILTFRIPYYVGPLARGNSRFAWMTRKSEETITPWNFEEVVDKGASAQSFIERMTNFDKNLPNEKVLPKHSLLYEYFTVYNELTKVKYVTEGMRKPAFLSGEQKKAIVDLLFKTNRKVTVKQLKEDYFKKIECFDSVEISGVEDRFNASLGTYHDLLKIIKDKDFLDNEENEDILEDIVLTLTLFEDREMIEERLKTYAHLFDDKVMKQLKRRRYTGWGRLSRKLINGIRDKQSGKTILDFLKSDGFANRNFMQLIHDDSLTFKEDIQKAQVSGQGDSLHEHIANLAGSPAIKKGILQTVKVVDELVKVMGRHKPENIVIEMARENQTTQKGQKNSRERMKRIEEGIKELGSQILKEHPVENTQLQNEKLYLYYLQNGRDMYVDQELDINRLSDYDVDHIVPQSFLKDDSIDNKVLTRSDKARGKSDNVPSEEVVKKMKNYWRQLLNAKLITQRKFDNLTKAERGGLSELDKAGFIKRQLVETRQITKHVAQILDSRMNTKYDENDKLIREVKVITLKSKLVSDFRKDFQFYKVREINNYHHAHDAYLNAVVGTALIKKYPKLESEFVYGDYKVYDVRKMIAKSEQEIGKATAKYFFYSNIMNFFKTEITLANGEIRKRPLIETNGETGEIVWDKGRDFATVRKVLSMPQVNIVKKTEVQTGGFSKESILPKRNSDKLIARKKDWDPKKYGGFDSPTVAYSVLVVAKVEKGKSKKLKSVKELLGITIMERSSFEKNPIDFLEAKGYKEVKKDLIIKLPKYSLFELENGRKRMLASAGELQKGNELALPSKYVNFLYLASHYEKLKGSPEDNEQKQLFVEQHKHYLDEIIEQISEFSKRVILADANLDKVLSAYNKHRDKPIREQAENIIHLFTLTNLGAPAAFKYFDTTIDRKRYTSTKEVLDATLIHQSITGLYETRIDLSQLGGDGGEAAAKEAAAKEAAAKEAAAKEAAAKGGVPWILKKPLELTIKLDLEEQQGTLLNNSILSKKGKEELKQLFEKYSALWQSWENQVGHRRIRPHKIATGTVKPTPQKQYHINPKAKPDIQIVINDLLKQGVLIQKESTMNTPVYPVPKPNGRWRMVLDYRAVNKVTPLIAVQNQHSYGILGSLFKGRYKTTIDLSNGFWAHPIVPEDYWITAFTWQGKQYCWTVLPQGFLNSPGLFNGDVVDLLQGIPNVEVYVDDVYISHDSEKEHLEYLDILFNRLKEAGYIISLKKSNIANSIVDFLGFQITNEGRGLTDTFKEKLENITAPTTLKQLQSILGLLNFARNFIPDFTELIAPLYALIPKSPKNYVPWQIEHSTTLETLITKLNGAEYLQGRKGDKTLIMKVNASYTTGYIRYYNEGEKKPISYVSIVFSKTELKFTELEKLLTTVHKGLLKALDLSMGQNIHVYSPIVSMQNIQKTPQTAKKALASRWLSWLSYLEDPRIRFFYDPQMPALKDLPAVDTGKDNKKHPSNFQHIFYTDGSAITSPTKEGHLNAGMGIVYFINKDGNLQKQQEWSISLGNHTAQFAEIAAFEFALKKCLPLGGNILVVTDSNYVAKAYNEELDVWASNGFVNNRKKPLKHISKWKSVADLKRLRPDVVVTHEPGHQKLDSSPHAYGNNLADQLATQASFKVHAGKRTADGSEFEKRTADGSEFESPKKKAKVE

SEQ ID NO: 6425 - protein, 2109 aa, synthetic construct
MPAAKRVKLDGGDKKYSIGLDIGTNSVGWAVITDEYKVPSKKFKVLGNTDRHSIKKNLIGALLFDSGETAEATRLKRTARRRYTRRKNRICYLQEIFSNEMAKVDDSFFHRLEESFLVEEDKKHERHPIFGNIVDEVAYHEKYPTIYHLRKKLVDSTDKADLRLIYLALAHMIKFRGHFLIEGDLNPDNSDVDKLFIQLVQTYNQLFEENPINASGVDAKAILSARLSKSRRLENLIAQLPGEKKNGLFGNLIALSLGLTPNFKSNFDLAEDAKLQLSKDTYDDDLDNLLAQIGDQYADLFLAAKNLSDAILLSDILRVNTEITKAPLSASMIKRYDEHHQDLTLLKALVRQQLPEKYKEIFFDQSKNGYAGYIDGGASQEEFYKFIKPILEKMDGTEELLVKLNREDLLRKQRTFDNGSIPHQIHLGELHAILRRQEDFYPFLKDNREKIEKILTFRIPYYVGPLARGNSRFAWMTRKSEETITPWNFEEVVDKGASAQSFIERMTNFDKNLPNEKVLPKHSLLYEYFTVYNELTKVKYVTEGMRKPAFLSGEQKKAIVDLLFKTNRKVTVKQLKEDYFKKIECFDSVEISGVEDRFNASLGTYHDLLKIIKDKDFLDNEENEDILEDIVLTLTLFEDREMIEERLKTYAHLFDDKVMKQLKRRRYTGWGRLSRKLINGIRDKQSGKTILDFLKSDGFANRNFMQLIHDDSLTFKEDIQKAQVSGQGDSLHEHIANLAGSPAIKKGILQTVKVVDELVKVMGRHKPENIVIEMARENQTTQKGQKNSRERMKRIEEGIKELGSQILKEHPVENTQLQNEKLYLYYLQNGRDMYVDQELDINRLSDYDVDHIVPQSFLKDDSIDNKVLTRSDKARGKSDNVPSEEVVKKMKNYWRQLLNAKLITQRKFDNLTKAERGGLSELDKAGFIKRQLVETRQITKHVAQILDSRMNTKYDENDKLIREVKVITLKSKLVSDFRKDFQFYKVREINNYHHAHDAYLNAVVGTALIKKYPKLESEFVYGDYKVYDVRKMIAKSEQEIGKATAKYFFYSNIMNFFKTEITLANGEIRKRPLIETNGETGEIVWDKGRDFATVRKVLSMPQVNIVKKTEVQTGGFSKESILPKRNSDKLIARKKDWDPKKYGGFDSPTVAYSVLVVAKVEKGKSKKLKSVKELLGITIMERSSFEKNPIDFLEAKGYKEVKKDLIIKLPKYSLFELENGRKRMLASAGELQKGNELALPSKYVNFLYLASHYEKLKGSPEDNEQKQLFVEQHKHYLDEIIEQISEFSKRVILADANLDKVLSAYNKHRDKPIREQAENIIHLFTLTNLGAPAAFKYFDTTIDRKRYTSTKEVLDATLIHQSITGLYETRIDLSQLGGDGGEAAAKEAAAKEAAAKEAAAKEAAAKGGTLQLEEEYRLFEPESTQKQEMDIWLKNFPQAWAETGGMGTAHCQAPVLIQLKATATPISIRQYPMPHEAYQGIKPHIRRMLDQGILKPCQSPWNTPLLPVKKPGTEDYRPVQDLREVNKRVEDIHPTVPNPYNLLSTLPPSHPWYTVLDLKDAFFCLRLHSESQLLFAFEWRDPEIGLSGQLTWTRLPQGFKNSPTLFNEALHSDLADFRVRYPALVLLQYVDDLLLAAATRTECLEGTKALLETLGNKGYRASAKKAQICLQEVTYLGYSLKDGQRWLTKARKEAILSIPVPKNSRQVREFLGKAGYCRLFIPGFAELAAPLYPLTRPGTLFQWGTEQQLAFEDIKKALLSSPALGLPDITKPFELFIDENSGFAKGVLVQKLGPWKRPVAYLSKKLDTVASGWPPCLRMVAAIAILVKDAGKLTLGQPLTILTSHPVEALVRQPPNKWLSNARMTHYQAMLLDAERVHFGPTVSLNPATLLPLPSGGNHHDCLQILAETHGTRPDLTDQPLPDADLTWYTDGSSFIRNGEREAGAAVTTESEVIWAAPLPPGTSAQRAELIALTQALKMAEGKKLTVYTDSRYAFATTHVHGEIYRRRGWLTSEGKEIKNKNEILALLEALFLPKRLSIIHCPGHQKGDSPQAKGNRLADDTAKKAATETHSSLTVLPAGKRTADGSEFEKRTADGSEFESPKKKAKVE

SEQ ID NO: 6426 - protein, 2101 aa, synthetic construct
MPAAKRVKLDGGDKKYSIGLDIGTNSVGWAVITDEYKVPSKKFKVLGNTDRHSIKKNLIGALLFDSGETAEATRLKRTARRRYTRRKNRICYLQEIFSNEMAKVDDSFFHRLEESFLVEEDKKHERHPIFGNIVDEVAYHEKYPTIYHLRKKLVDSTDKADLRLIYLALAHMIKFRGHFLIEGDLNPDNSDVDKLFIQLVQTYNQLFEENPINASGVDAKAILSARLSKSRRLENLIAQLPGEKKNGLFGNLIALSLGLTPNFKSNFDLAEDAKLQLSKDTYDDDLDNLLAQIGDQYADLFLAAKNLSDAILLSDILRVNTEITKAPLSASMIKRYDEHHQDLTLLKALVRQQLPEKYKEIFFDQSKNGYAGYIDGGASQEEFYKFIKPILEKMDGTEELLVKLNREDLLRKQRTFDNGSIPHQIHLGELHAILRRQEDFYPFLKDNREKIEKILTFRIPYYVGPLARGNSRFAWMTRKSEETITPWNFEEVVDKGASAQSFIERMTNFDKNLPNEKVLPKHSLLYEYFTVYNELTKVKYVTEGMRKPAFLSGEQKKAIVDLLFKTNRKVTVKQLKEDYFKKIECFDSVEISGVEDRFNASLGTYHDLLKIIKDKDFLDNEENEDILEDIVLTLTLFEDREMIEERLKTYAHLFDDKVMKQLKRRRYTGWGRLSRKLINGIRDKQSGKTILDFLKSDGFANRNFMQLIHDDSLTFKEDIQKAQVSGQGDSLHEHIANLAGSPAIKKGILQTVKVVDELVKVMGRHKPENIVIEMARENQTTQKGQKNSRERMKRIEEGIKELGSQILKEHPVENTQLQNEKLYLYYLQNGRDMYVDQELDINRLSDYDVDHIVPQSFLKDDSIDNKVLTRSDKARGKSDNVPSEEVVKKMKNYWRQLLNAKLITQRKFDNLTKAERGGLSELDKAGFIKRQLVETRQITKHVAQILDSRMNTKYDENDKLIREVKVITLKSKLVSDFRKDFQFYKVREINNYHHAHDAYLNAVVGTALIKKYPKLESEFVYGDYKVYDVRKMIAKSEQEIGKATAKYFFYSNIMNFFKTEITLANGEIRKRPLIETNGETGEIVWDKGRDFATVRKVLSMPQVNIVKKTEVQTGGFSKESILPKRNSDKLIARKKDWDPKKYGGFDSPTVAYSVLVVAKVEKGKSKKLKSVKELLGITIMERSSFEKNPIDFLEAKGYKEVKKDLIIKLPKYSLFELENGRKRMLASAGELQKGNELALPSKYVNFLYLASHYEKLKGSPEDNEQKQLFVEQHKHYLDEIIEQISEFSKRVILADANLDKVLSAYNKHRDKPIREQAENIIHLFTLTNLGAPAAFKYFDTTIDRKRYTSTKEVLDATLIHQSITGLYETRIDLSQLGGDGGEAAAKEAAAKEAAAKEAAAKEAAAKGGVPWLTQQPLQLTILVPLQEYQEKILSKTALPEDQKQQLKTLFVKYDNLWQHWENQVGHRKIRPHNIATGDYPPRPQKQYPINPKAKPSIQIVIDDLLKQGVLTPQNSTMNTPVYPVPKPDGRWRMVLDYREVNKTIPLTAAQNQHSAGILATIVRQKYKTTLDLANGFWAHPITPESYWLTAFTWQGKQYCWTRLPQGFLNSPALFNADVVDLLKEIPNVQVYVDDIYLSHDDPKEHVQQLEKVFQILLQAGYVVSLKKSEIGQKTVEFLGFNITKEGRGLTDTFKTKLLNITPPKDLKQLQSILGLLNFARNFIPNFAELVQPLYNLIAPAKGKYIEWSEENTKQLNMVIEALNTASNLEERLPEQRLVIKVNTSPSAGYVRYYNETGKKPIMYLNYVFSKAELKFSMLEKLLTTMHKALIKAMDLAMGQEILVYSPIVSMTKIQKTPLPERKALPIRWITWMTYLEDPRIQFHYDKTLPELKHIPDVYTSSQSPVKHPSQYEGVFYTDGSAIKSPDPTKSNNAGMGIVHATYKPEYQVLNQWSIPLGNHTAQMAEIAAVEFACKKALKIPGPVLVITDSFYVAESANKELPYWKSNGFVNNKKKPLKHISKWKSIAECLSMKPDITIQHEKGISLQIPVFILKGNALADKLATQGSYVVNAGKRTADGSEFEKRTADGSEFESPKKKAKVE

SEQ ID NO: 6427 - protein, 2101 aa, synthetic construct
MPAAKRVKLDGGDKKYSIGLDIGTNSVGWAVITDEYKVPSKKFKVLGNTDRHSIKKNLIGALLFDSGETAEATRLKRTARRRYTRRKNRICYLQEIFSNEMAKVDDSFFHRLEESFLVEEDKKHERHPIFGNIVDEVAYHEKYPTIYHLRKKLVDSTDKADLRLIYLALAHMIKFRGHFLIEGDLNPDNSDVDKLFIQLVQTYNQLFEENPINASGVDAKAILSARLSKSRRLENLIAQLPGEKKNGLFGNLIALSLGLTPNFKSNFDLAEDAKLQLSKDTYDDDLDNLLAQIGDQYADLFLAAKNLSDAILLSDILRVNTEITKAPLSASMIKRYDEHHQDLTLLKALVRQQLPEKYKEIFFDQSKNGYAGYIDGGASQEEFYKFIKPILEKMDGTEELLVKLNREDLLRKQRTFDNGSIPHQIHLGELHAILRRQEDFYPFLKDNREKIEKILTFRIPYYVGPLARGNSRFAWMTRKSEETITPWNFEEVVDKGASAQSFIERMTNFDKNLPNEKVLPKHSLLYEYFTVYNELTKVKYVTEGMRKPAFLSGEQKKAIVDLLFKTNRKVTVKQLKEDYFKKIECFDSVEISGVEDRFNASLGTYHDLLKIIKDKDFLDNEENEDILEDIVLTLTLFEDREMIEERLKTYAHLFDDKVMKQLKRRRYTGWGRLSRKLINGIRDKQSGKTILDFLKSDGFANRNFMQLIHDDSLTFKEDIQKAQVSGQGDSLHEHIANLAGSPAIKKGILQTVKVVDELVKVMGRHKPENIVIEMARENQTTQKGQKNSRERMKRIEEGIKELGSQILKEHPVENTQLQNEKLYLYYLQNGRDMYVDQELDINRLSDYDVDHIVPQSFLKDDSIDNKVLTRSDKARGKSDNVPSEEVVKKMKNYWRQLLNAKLITQRKFDNLTKAERGGLSELDKAGFIKRQLVETRQITKHVAQILDSRMNTKYDENDKLIREVKVITLKSKLVSDFRKDFQFYKVREINNYHHAHDAYLNAVVGTALIKKYPKLESEFVYGDYKVYDVRKMIAKSEQEIGKATAKYFFYSNIMNFFKTEITLANGEIRKRPLIETNGETGEIVWDKGRDFATVRKVLSMPQVNIVKKTEVQTGGFSKESILPKRNSDKLIARKKDWDPKKYGGFDSPTVAYSVLVVAKVEKGKSKKLKSVKELLGITIMERSSFEKNPIDFLEAKGYKEVKKDLIIKLPKYSLFELENGRKRMLASAGELQKGNELALPSKYVNFLYLASHYEKLKGSPEDNEQKQLFVEQHKHYLDEIIEQISEFSKRVILADANLDKVLSAYNKHRDKPIREQAENIIHLFTLTNLGAPAAFKYFDTTIDRKRYTSTKEVLDATLIHQSITGLYETRIDLSQLGGDGGEAAAKEAAAKEAAAKEAAAKEAAAKGGVPWLTQQPLQLTILVPLQEYQEKILSKTALPEDQKQQLKTLFVKYDNLWQHWENQVGHRKIRPHNIATGDYPPRPQKQYPINPKAKPSIQIVIDDLLKQGVLTPQNSTMNTPVYPVPKPDGRWRMVLDYREVNKTIPLTAAQNQHSAGILATIVRQKYKTTLDLANGFWAHPITPESYWLTAFTWQGKQYCWTRLPQGFLNSPALFNADVVDLLKEIPNVQVYVDDIYLSHDDPKEHVQQLEKVFQILLQAGYVVSLKKSEIGQKTVEFLGFNITKEGRGLTDTFKTKLLNITPPKDLKQLQSILGKLNFARNFIPNFAELVQPLYNLIAPAKGKYIEWSEENTKQLNMVIEALNTASNLEERLPEQRLVIKVNTSPSAGYVRYYNETGKKPIMYLNYVFSKAELKFSMLEKLLTTMHKALIKAMDLAMGQEILVYSPIVSMTKIQKTPLPERKALPIRWITWMTYLEDPRIQFHYDKTLPELKHIPDVYTSSQSPVKHPSQYEGVFYTDGSAIKSPDPTKSNNAGMGIVHATYKPEYQVLNQWSIPLGNHTAQMAEIAAVEFACKKALKIPGPVLVITDSFYVAESANKELPYWKSNGFVNNKKKPLKHISKWKSIAECLSMKPDITIQHEKGISLQIPVFILKGNALADKLATQGSYVVNAGKRTADGSEFEKRTADGSEFESPKKKAKVE

SEQ ID NO: 6428 - protein, 2190 aa, synthetic construct
MPAAKRVKLDGGDKKYSIGLDIGTNSVGWAVITDEYKVPSKKFKVLGNTDRHSIKKNLIGALLFDSGETAEATRLKRTARRRYTRRKNRICYLQEIFSNEMAKVDDSFFHRLEESFLVEEDKKHERHPIFGNIVDEVAYHEKYPTIYHLRKKLVDSTDKADLRLIYLALAHMIKFRGHFLIEGDLNPDNSDVDKLFIQLVQTYNQLFEENPINASGVDAKAILSARLSKSRRLENLIAQLPGEKKNGLFGNLIALSLGLTPNFKSNFDLAEDAKLQLSKDTYDDDLDNLLAQIGDQYADLFLAAKNLSDAILLSDILRVNTEITKAPLSASMIKRYDEHHQDLTLLKALVRQQLPEKYKEIFFDQSKNGYAGYIDGGASQEEFYKFIKPILEKMDGTEELLVKLNREDLLRKQRTFDNGSIPHQIHLGELHAILRRQEDFYPFLKDNREKIEKILTFRIPYYVGPLARGNSRFAWMTRKSEETITPWNFEEVVDKGASAQSFIERMTNFDKNLPNEKVLPKHSLLYEYFTVYNELTKVKYVTEGMRKPAFLSGEQKKAIVDLLFKTNRKVTVKQLKEDYFKKIECFDSVEISGVEDRFNASLGTYHDLLKIIKDKDFLDNEENEDILEDIVLTLTLFEDREMIEERLKTYAHLFDDKVMKQLKRRRYTGWGRLSRKLINGIRDKQSGKTILDFLKSDGFANRNFMQLIHDDSLTFKEDIQKAQVSGQGDSLHEHIANLAGSPAIKKGILQTVKVVDELVKVMGRHKPENIVIEMARENQTTQKGQKNSRERMKRIEEGIKELGSQILKEHPVENTQLQNEKLYLYYLQNGRDMYVDQELDINRLSDYDVDHIVPQSFLKDDSIDNKVLTRSDKARGKSDNVPSEEVVKKMKNYWRQLLNAKLITQRKFDNLTKAERGGLSELDKAGFIKRQLVETRQITKHVAQILDSRMNTKYDENDKLIREVKVITLKSKLVSDFRKDFQFYKVREINNYHHAHDAYLNAVVGTALIKKYPKLESEFVYGDYKVYDVRKMIAKSEQEIGKATAKYFFYSNIMNFFKTEITLANGEIRKRPLIETNGETGEIVWDKGRDFATVRKVLSMPQVNIVKKTEVQTGGFSKESILPKRNSDKLIARKKDWDPKKYGGFDSPTVAYSVLVVAKVEKGKSKKLKSVKELLGITIMERSSFEKNPIDFLEAKGYKEVKKDLIIKLPKYSLFELENGRKRMLASAGELQKGNELALPSKYVNFLYLASHYEKLKGSPEDNEQKQLFVEQHKHYLDEIIEQISEFSKRVILADANLDKVLSAYNKHRDKPIREQAENIIHLFTLTNLGAPAAFKYFDTTIDRKRYTSTKEVLDATLIHQSITGLYETRIDLSQLGGDGGEAAAKEAAAKEAAAKEAAAKEAAAKGGMNPLQLLQPLPAEIKGTKLLAHWNSGATITCIPESFLEDEQPIKKTLIKTIHGEKQQNVYYVTFKVKGRKVEAEVIASPYEYILLSPTDVPWLTQQPLQLTILVPLQEYQEKILSKTALPEDQKQQLKTLFVKYDNLWQHWENQVGHRKIRPHNIATGDYPPRPQKQYPINPKAKPSIQIVIDDLLKQGVLTPQNSTMNTPVYPVPKPDGRWRMVLDYREVNKTIPLTAAQNQHSAGILATIVRQKYKTTLDLANGFWAHPITPESYWLTAFTWQGKQYCWTRLPQGFLNSPALFNADVVDLLKEIPNVQVYVDDIYLSHDDPKEHVQQLEKVFQILLQAGYVVSLKKSEIGQKTVEFLGFNITKEGRGLTDTFKTKLLNITPPKDLKQLQSILGLLNFARNFIPNFAELVQPLYNLIAPAKGKYIEWSEENTKQLNMVIEALNTASNLEERLPEQRLVIKVNTSPSAGYVRYYNETGKKPIMYLNYVFSKAELKFSMLEKLLTTMHKALIKAMDLAMGQEILVYSPIVSMTKIQKTPLPERKALPIRWITWMTYLEDPRIQFHYDKTLPELKHIPDVYTSSQSPVKHPSQYEGVFYTDGSAIKSPDPTKSNNAGMGIVHATYKPEYQVLNQWSIPLGNHTAQMAEIAAVEFACKKALKIPGPVLVITDSFYVAESANKELPYWKSNGFVNNKKKPLKHISKWKSIAECLSMKPDITIQHEKGISLQIPVFILKGNALADKLATQGSYVVNAGKRTADGSEFEKRTADGSEFESPKKKAKVE

SEQ ID NO: 6429 - protein, 2190 aa, synthetic construct
MPAAKRVKLDGGDKKYSIGLDIGTNSVGWAVITDEYKVPSKKFKVLGNTDRHSIKKNLIGALLFDSGETAEATRLKRTARRRYTRRKNRICYLQEIFSNEMAKVDDSFFHRLEESFLVEEDKKHERHPIFGNIVDEVAYHEKYPTIYHLRKKLVDSTDKADLRLIYLALAHMIKFRGHFLIEGDLNPDNSDVDKLFIQLVQTYNQLFEENPINASGVDAKAILSARLSKSRRLENLIAQLPGEKKNGLFGNLIALSLGLTPNFKSNFDLAEDAKLQLSKDTYDDDLDNLLAQIGDQYADLFLAAKNLSDAILLSDILRVNTEITKAPLSASMIKRYDEHHQDLTLLKALVRQQLPEKYKEIFFDQSKNGYAGYIDGGASQEEFYKFIKPILEKMDGTEELLVKLNREDLLRKQRTFDNGSIPHQIHLGELHAILRRQEDFYPFLKDNREKIEKILTFRIPYYVGPLARGNSRFAWMTRKSEETITPWNFEEVVDKGASAQSFIERMTNFDKNLPNEKVLPKHSLLYEYFTVYNELTKVKYVTEGMRKPAFLSGEQKKAIVDLLFKTNRKVTVKQLKEDYFKKIECFDSVEISGVEDRFNASLGTYHDLLKIIKDKDFLDNEENEDILEDIVLTLTLFEDREMIEERLKTYAHLFDDKVMKQLKRRRYTGWGRLSRKLINGIRDKQSGKTILDFLKSDGFANRNFMQLIHDDSLTFKEDIQKAQVSGQGDSLHEHIANLAGSPAIKKGILQTVKVVDELVKVMGRHKPENIVIEMARENQTTQKGQKNSRERMKRIEEGIKELGSQILKEHPVENTQLQNEKLYLYYLQNGRDMYVDQELDINRLSDYDVDHIVPQSFLKDDSIDNKVLTRSDKARGKSDNVPSEEVVKKMKNYWRQLLNAKLITQRKFDNLTKAERGGLSELDKAGFIKRQLVETRQITKHVAQILDSRMNTKYDENDKLIREVKVITLKSKLVSDFRKDFQFYKVREINNYHHAHDAYLNAVVGTALIKKYPKLESEFVYGDYKVYDVRKMIAKSEQEIGKATAKYFFYSNIMNFFKTEITLANGEIRKRPLIETNGETGEIVWDKGRDFATVRKVLSMPQVNIVKKTEVQTGGFSKESILPKRNSDKLIARKKDWDPKKYGGFDSPTVAYSVLVVAKVEKGKSKKLKSVKELLGITIMERSSFEKNPIDFLEAKGYKEVKKDLIIKLPKYSLFELENGRKRMLASAGELQKGNELALPSKYVNFLYLASHYEKLKGSPEDNEQKQLFVEQHKHYLDEIIEQISEFSKRVILADANLDKVLSAYNKHRDKPIREQAENIIHLFTLTNLGAPAAFKYFDTTIDRKRYTSTKEVLDATLIHQSITGLYETRIDLSQLGGDGGEAAAKEAAAKEAAAKEAAAKEAAAKGGMNPLQLLQPLPAEIKGTKLLAHWNSGATITCIPESFLEDEQPIKKTLIKTIHGEKQQNVYYVTFKVKGRKVEAEVIASPYEYILLSPTDVPWLTQQPLQLTILVPLQEYQEKILSKTALPEDQKQQLKTLFVKYDNLWQHWENQVGHRKIRPHNIATGDYPPRPQKQYPINPKAKPSIQIVIDDLLKQGVLTPQNSTMNTPVYPVPKPDGRWRMVLDYREVNKTIPLTAAQNQHSAGILATIVRQKYKTTLDLANGFWAHPITPESYWLTAFTWQGKQYCWTRLPQGFLNSPALFNADVVDLLKEIPNVQVYVDDIYLSHDDPKEHVQQLEKVFQILLQAGYVVSLKKSEIGQKTVEFLGFNITKEGRGLTDTFKTKLLNITPPKDLKQLQSILGKLNFARNFIPNFAELVQPLYNLIAPAKGKYIEWSEENTKQLNMVIEALNTASNLEERLPEQRLVIKVNTSPSAGYVRYYNETGKKPIMYLNYVFSKAELKFSMLEKLLTTMHKALIKAMDLAMGQEILVYSPIVSMTKIQKTPLPERKALPIRWITWMTYLEDPRIQFHYDKTLPELKHIPDVYTSSQSPVKHPSQYEGVFYTDGSAIKSPDPTKSNNAGMGIVHATYKPEYQVLNQWSIPLGNHTAQMAEIAAVEFACKKALKIPGPVLVITDSFYVAESANKELPYWKSNGFVNNKKKPLKHISKWKSIAECLSMKPDITIQHEKGISLQIPVFILKGNALADKLATQGSYVVNAGKRTADGSEFEKRTADGSEFESPKKKAKVE

SEQ ID NO: 6430 - protein, 2108 aa, synthetic construct
MPAAKRVKLDGGDKKYSIGLDIGTNSVGWAVITDEYKVPSKKFKVLGNTDRHSIKKNLIGALLFDSGETAEATRLKRTARRRYTRRKNRICYLQEIFSNEMAKVDDSFFHRLEESFLVEEDKKHERHPIFGNIVDEVAYHEKYPTIYHLRKKLVDSTDKADLRLIYLALAHMIKFRGHFLIEGDLNPDNSDVDKLFIQLVQTYNQLFEENPINASGVDAKAILSARLSKSRRLENLIAQLPGEKKNGLFGNLIALSLGLTPNFKSNFDLAEDAKLQLSKDTYDDDLDNLLAQIGDQYADLFLAAKNLSDAILLSDILRVNTEITKAPLSASMIKRYDEHHQDLTLLKALVRQQLPEKYKEIFFDQSKNGYAGYIDGGASQEEFYKFIKPILEKMDGTEELLVKLNREDLLRKQRTFDNGSIPHQIHLGELHAILRRQEDFYPFLKDNREKIEKILTFRIPYYVGPLARGNSRFAWMTRKSEETITPWNFEEVVDKGASAQSFIERMTNFDKNLPNEKVLPKHSLLYEYFTVYNELTKVKYVTEGMRKPAFLSGEQKKAIVDLLFKTNRKVTVKQLKEDYFKKIECFDSVEISGVEDRFNASLGTYHDLLKIIKDKDFLDNEENEDILEDIVLTLTLFEDREMIEERLKTYAHLFDDKVMKQLKRRRYTGWGRLSRKLINGIRDKQSGKTILDFLKSDGFANRNFMQLIHDDSLTFKEDIQKAQVSGQGDSLHEHIANLAGSPAIKKGILQTVKVVDELVKVMGRHKPENIVIEMARENQTTQKGQKNSRERMKRIEEGIKELGSQILKEHPVENTQLQNEKLYLYYLQNGRDMYVDQELDINRLSDYDVDHIVPQSFLKDDSIDNKVLTRSDKARGKSDNVPSEEVVKKMKNYWRQLLNAKLITQRKFDNLTKAERGGLSELDKAGFIKRQLVETRQITKHVAQILDSRMNTKYDENDKLIREVKVITLKSKLVSDFRKDFQFYKVREINNYHHAHDAYLNAVVGTALIKKYPKLESEFVYGDYKVYDVRKMIAKSEQEIGKATAKYFFYSNIMNFFKTEITLANGEIRKRPLIETNGETGEIVWDKGRDFATVRKVLSMPQVNIVKKTEVQTGGFSKESILPKRNSDKLIARKKDWDPKKYGGFDSPTVAYSVLVVAKVEKGKSKKLKSVKELLGITIMERSSFEKNPIDFLEAKGYKEVKKDLIIKLPKYSLFELENGRKRMLASAGELQKGNELALPSKYVNFLYLASHYEKLKGSPEDNEQKQLFVEQHKHYLDEIIEQISEFSKRVILADANLDKVLSAYNKHRDKPIREQAENIIHLFTLTNLGAPAAFKYFDTTIDRKRYTSTKEVLDATLIHQSITGLYETRIDLSQLGGDGGEAAAKEAAAKEAAAKEAAAKEAAAKGGVLNLEEEYRLHEKPVPSSIDPSWLQLFPTVWAERAGMGLANQVPPVVVELRSGASPVAVRQYPMSKEAREGIRPHIQKFLDLGVLVPCRSPWNTPLLPVKKPGTNDYRPVQDLREINKRVQDIHPTVPNPYNLLSSLPPSYTWYSVLDLKDAFFCLRLHPNSQPLFAFEWKDPEKGNTGQLTWTRLPQGFKNSPTLFNEALHRDLAPFRALNPQVVLLQYVDDLLVAAPTYEDCKKGTQKLLQELSKLGYRVSAKKAQLCQREVTYLGYLLKEGKRWLTPARKATVMKIPVPTTPRQVREFLGTAGFCRLWIPGFASLAAPLYPLTKPSIPFIWTEEHQQAFDHIKKALLSAPALALPDLTKPFTLYIDERAGVARGVLTQTLGPWRRPVAYLSKKLDPVASGWPTCLKAVAAVALLLKDADKLTLGQNVTVIASHSLESIVRQPPDRWMTNARMTHYQSLLLNERVSFAPPAVLNPATLLPVESEATPVHRCSEILAEETGTRRDLEDQPLPGVPTWYTDGSSFITEGKRRAGAPIVDGKRTVWASSLPEGTSAQKAELVALTQALRLAEGKNINIYTDSRYAFATAHIHGAIYKQRGWLTSAGKDIKNKEEILALLEAIHLPRRVAIIHCPGHQRGSNPVATGNRRADEAAKQAALSTRVLAGTTKPAGKRTADGSEFEKRTADGSEFESPKKKAKVE

SEQ ID NO: 6431 - protein, 2108 aa, synthetic construct
MPAAKRVKLDGGDKKYSIGLDIGTNSVGWAVITDEYKVPSKKFKVLGNTDRHSIKKNLIGALLFDSGETAEATRLKRTARRRYTRRKNRICYLQEIFSNEMAKVDDSFFHRLEESFLVEEDKKHERHPIFGNIVDEVAYHEKYPTIYHLRKKLVDSTDKADLRLIYLALAHMIKFRGHFLIEGDLNPDNSDVDKLFIQLVQTYNQLFEENPINASGVDAKAILSARLSKSRRLENLIAQLPGEKKNGLFGNLIALSLGLTPNFKSNFDLAEDAKLQLSKDTYDDDLDNLLAQIGDQYADLFLAAKNLSDAILLSDILRVNTEITKAPLSASMIKRYDEHHQDLTLLKALVRQQLPEKYKEIFFDQSKNGYAGYIDGGASQEEFYKFIKPILEKMDGTEELLVKLNREDLLRKQRTFDNGSIPHQIHLGELHAILRRQEDFYPFLKDNREKIEKILTFRIPYYVGPLARGNSRFAWMTRKSEETITPWNFEEVVDKGASAQSFIERMTNFDKNLPNEKVLPKHSLLYEYFTVYNELTKVKYVTEGMRKPAFLSGEQKKAIVDLLFKTNRKVTVKQLKEDYFKKIECFDSVEISGVEDRFNASLGTYHDLLKIIKDKDFLDNEENEDILEDIVLTLTLFEDREMIEERLKTYAHLFDDKVMKQLKRRRYTGWGRLSRKLINGIRDKQSGKTILDFLKSDGFANRNFMQLIHDDSLTFKEDIQKAQVSGQGDSLHEHIANLAGSPAIKKGILQTVKVVDELVKVMGRHKPENIVIEMARENQTTQKGQKNSRERMKRIEEGIKELGSQILKEHPVENTQLQNEKLYLYYLQNGRDMYVDQELDINRLSDYDVDHIVPQSFLKDDSIDNKVLTRSDKARGKSDNVPSEEVVKKMKNYWRQLLNAKLITQRKFDNLTKAERGGLSELDKAGFIKRQLVETRQITKHVAQILDSRMNTKYDENDKLIREVKVITLKSKLVSDFRKDFQFYKVREINNYHHAHDAYLNAVVGTALIKKYPKLESEFVYGDYKVYDVRKMIAKSEQEIGKATAKYFFYSNIMNFFKTEITLANGEIRKRPLIETNGETGEIVWDKGRDFATVRKVLSMPQVNIVKKTEVQTGGFSKESILPKRNSDKLIARKKDWDPKKYGGFDSPTVAYSVLVVAKVEKGKSKKLKSVKELLGITIMERSSFEKNPIDFLEAKGYKEVKKDLIIKLPKYSLFELENGRKRMLASAGELQKGNELALPSKYVNFLYLASHYEKLKGSPEDNEQKQLFVEQHKHYLDEIIEQISEFSKRVILADANLDKVLSAYNKHRDKPIREQAENIIHLFTLTNLGAPAAFKYFDTTIDRKRYTSTKEVLDATLIHQSITGLYETRIDLSQLGGDGGEAAAKEAAAKEAAAKEAAAKEAAAKGGVLNLEEEYRLHEKPVPSSIDPSWLQLFPTVWAERAGMGLANQVPPVVVELRSGASPVAVRQYPMSKEAREGIRPHIQKFLDLGVLVPCRSPWNTPLLPVKKPGTNDYRPVQDLREINKRVQDIHPTVPNPYNLLSSLPPSYTWYSVLDLKDAFFCLRLHPNSQPLFAFEWKDPEKGNTGQLTWTRLPQGFKNSPTLFNEALHRDLAPFRALNPQVVLLQYVDDLLVAAPTYEDCKKGTQKLLQELSKLGYRVSAKKAQLCQREVTYLGYLLKEGKRWLTPARKATVMKIPVPTTPRQVREFLGKAGFCRLFIPGFASLAAPLYPLTKPSIPFIWTEEHQQAFDHIKKALLSAPALALPDLTKPFTLYIDERAGVARGVLTQTLGPWRRPVAYLSKKLDPVASGWPTCLKAVAAVALLLKDADKLTLGQNVTVIASHSLESIVRQPPDRWMTNARMTHYQSLLLNERVSFAPPAVLNPATLLPVESEATPVHRCSEILAEETGTRRDLEDQPLPGVPTWYTDGSSFITEGKRRAGAPIVDGKRTVWASSLPEGTSAQKAELVALTQALRLAEGKNINIYTDSRYAFATAHIHGAIYKQRGWLTSAGKDIKNKEEILALLEAIHLPRRVAIIHCPGHQRGSNPVATGNRRADEAAKQAALSTRVLAGTTKPAGKRTADGSEFEKRTADGSEFESPKKKAKVE

SEQ ID NO: 6432 - protein, 2232 aa, synthetic construct
MPAAKRVKLDGGDKKYSIGLDIGTNSVGWAVITDEYKVPSKKFKVLGNTDRHSIKKNLIGALLFDSGETAEATRLKRTARRRYTRRKNRICYLQEIFSNEMAKVDDSFFHRLEESFLVEEDKKHERHPIFGNIVDEVAYHEKYPTIYHLRKKLVDSTDKADLRLIYLALAHMIKFRGHFLIEGDLNPDNSDVDKLFIQLVQTYNQLFEENPINASGVDAKAILSARLSKSRRLENLIAQLPGEKKNGLFGNLIALSLGLTPNFKSNFDLAEDAKLQLSKDTYDDDLDNLLAQIGDQYADLFLAAKNLSDAILLSDILRVNTEITKAPLSASMIKRYDEHHQDLTLLKALVRQQLPEKYKEIFFDQSKNGYAGYIDGGASQEEFYKFIKPILEKMDGTEELLVKLNREDLLRKQRTFDNGSIPHQIHLGELHAILRRQEDFYPFLKDNREKIEKILTFRIPYYVGPLARGNSRFAWMTRKSEETITPWNFEEVVDKGASAQSFIERMTNFDKNLPNEKVLPKHSLLYEYFTVYNELTKVKYVTEGMRKPAFLSGEQKKAIVDLLFKTNRKVTVKQLKEDYFKKIECFDSVEISGVEDRFNASLGTYHDLLKIIKDKDFLDNEENEDILEDIVLTLTLFEDREMIEERLKTYAHLFDDKVMKQLKRRRYTGWGRLSRKLINGIRDKQSGKTILDFLKSDGFANRNFMQLIHDDSLTFKEDIQKAQVSGQGDSLHEHIANLAGSPAIKKGILQTVKVVDELVKVMGRHKPENIVIEMARENQTTQKGQKNSRERMKRIEEGIKELGSQILKEHPVENTQLQNEKLYLYYLQNGRDMYVDQELDINRLSDYDVDHIVPQSFLKDDSIDNKVLTRSDKARGKSDNVPSEEVVKKMKNYWRQLLNAKLITQRKFDNLTKAERGGLSELDKAGFIKRQLVETRQITKHVAQILDSRMNTKYDENDKLIREVKVITLKSKLVSDFRKDFQFYKVREINNYHHAHDAYLNAVVGTALIKKYPKLESEFVYGDYKVYDVRKMIAKSEQEIGKATAKYFFYSNIMNFFKTEITLANGEIRKRPLIETNGETGEIVWDKGRDFATVRKVLSMPQVNIVKKTEVQTGGFSKESILPKRNSDKLIARKKDWDPKKYGGFDSPTVAYSVLVVAKVEKGKSKKLKSVKELLGITIMERSSFEKNPIDFLEAKGYKEVKKDLIIKLPKYSLFELENGRKRMLASAGELQKGNELALPSKYVNFLYLASHYEKLKGSPEDNEQKQLFVEQHKHYLDEIIEQISEFSKRVILADANLDKVLSAYNKHRDKPIREQAENIIHLFTLTNLGAPAAFKYFDTTIDRKRYTSTKEVLDATLIHQSITGLYETRIDLSQLGGDGGEAAAKEAAAKEAAAKEAAAKEAAAKGGTLGDQGSRGSDPLPEPRVTLTVEGIPTEFLVNTGAEHSVLTKPMGKMGSKRTVVAGATGSKVYPWTTKRLLKIGQKQVTHSFLVIPECPAPLLGRDLLTKLKAQIQFSTEGPQVTWEDRPAMCLVLNLEEEYRLHEKPVPPSIDPSWLQLFPMVWAEKAGMGLANQVPPVVVELKSDASPVAVRQYPMSKEAREGIRPHIQRFLDLGILVPCQSPWNTPLLPVKKPGTNDYRPVQDLREVNKRVQDIHPTVPNPYNLLSSLPPSHTWYSVLDLKDAFFCLKLHPNSQPLFAFEWRDPEKGNTGQLTWTRLPQGFKNSPTLFNEALHRDLASFRALNPQVVMLQYVDDLLVAAPTYRDCKEGTRRLLQELSKLGYRVSAKKAQLCREEVTYLGYLLKGGKRWLTPARKATVMKIPTPTTPRQVREFLGTAGFCRLWIPGFASLAAPLYPLTRPKVPFTWTEAHQEAFGRIKEALLSAPALALPDLTKPFALYVDEKEGVARGVLTQTLGPWRRPVAYLSKKLDPVASGWPTCLKAIAAVALLLKDADKLTLGQNVLVIAPHNLESIVRQPPDRWMTNARMTHYQSLLLNERVSFAPPAILNPATLLPVESDDTPIHICSEILAEETGTRPDLRDQPLPGVPAWYTDGSSFIMDGRRQAGAAIVDNKRTVWASNLPEGTSAQKAELIALTQALRLAEGKSINIYTDSRYAFATAHVHGAIYKQRGWLTSAGKDIKNKEEILALLEAIHLPKRVAIIHCPGHQRGTDPVATGNRKADEAAKQAAQSTRILTETTKNAGKRTADGSEFEKRTADGSEFESPKKKAKVE

SEQ ID NO: 6433 - protein, 2110 aa, synthetic construct
MPAAKRVKLDGGDKKYSIGLDIGTNSVGWAVITDEYKVPSKKFKVLGNTDRHSIKKNLIGALLFDSGETAEATRLKRTARRRYTRRKNRICYLQEIFSNEMAKVDDSFFHRLEESFLVEEDKKHERHPIFGNIVDEVAYHEKYPTIYHLRKKLVDSTDKADLRLIYLALAHMIKFRGHFLIEGDLNPDNSDVDKLFIQLVQTYNQLFEENPINASGVDAKAILSARLSKSRRLENLIAQLPGEKKNGLFGNLIALSLGLTPNFKSNFDLAEDAKLQLSKDTYDDDLDNLLAQIGDQYADLFLAAKNLSDAILLSDILRVNTEITKAPLSASMIKRYDEHHQDLTLLKALVRQQLPEKYKEIFFDQSKNGYAGYIDGGASQEEFYKFIKPILEKMDGTEELLVKLNREDLLRKQRTFDNGSIPHQIHLGELHAILRRQEDFYPFLKDNREKIEKILTFRIPYYVGPLARGNSRFAWMTRKSEETITPWNFEEVVDKGASAQSFIERMTNFDKNLPNEKVLPKHSLLYEYFTVYNELTKVKYVTEGMRKPAFLSGEQKKAIVDLLFKTNRKVTVKQLKEDYFKKIECFDSVEISGVEDRFNASLGTYHDLLKIIKDKDFLDNEENEDILEDIVLTLTLFEDREMIEERLKTYAHLFDDKVMKQLKRRRYTGWGRLSRKLINGIRDKQSGKTILDFLKSDGFANRNFMQLIHDDSLTFKEDIQKAQVSGQGDSLHEHIANLAGSPAIKKGILQTVKVVDELVKVMGRHKPENIVIEMARENQTTQKGQKNSRERMKRIEEGIKELGSQILKEHPVENTQLQNEKLYLYYLQNGRDMYVDQELDINRLSDYDVDHIVPQSFLKDDSIDNKVLTRSDKARGKSDNVPSEEVVKKMKNYWRQLLNAKLITQRKFDNLTKAERGGLSELDKAGFIKRQLVETRQITKHVAQILDSRMNTKYDENDKLIREVKVITLKSKLVSDFRKDFQFYKVREINNYHHAHDAYLNAVVGTALIKKYPKLESEFVYGDYKVYDVRKMIAKSEQEIGKATAKYFFYSNIMNFFKTEITLANGEIRKRPLIETNGETGEIVWDKGRDFATVRKVLSMPQVNIVKKTEVQTGGFSKESILPKRNSDKLIARKKDWDPKKYGGFDSPTVAYSVLVVAKVEKGKSKKLKSVKELLGITIMERSSFEKNPIDFLEAKGYKEVKKDLIIKLPKYSLFELENGRKRMLASAGELQKGNELALPSKYVNFLYLASHYEKLKGSPEDNEQKQLFVEQHKHYLDEIIEQISEFSKRVILADANLDKVLSAYNKHRDKPIREQAENIIHLFTLTNLGAPAAFKYFDTTIDRKRYTSTKEVLDATLIHQSITGLYETRIDLSQLGGDGGEAAAKEAAAKEAAAKEAAAKEAAAKGGTLNLEDEYRLYETSAEPEVSPGSTWLSDFPQAWAETGGMGLAVRQAPLIIPLKATSTPVSIKQYPMSQEAKLGIKPHIQRLLDQGILVPCQSPWNTPLLPVKKPGTNDYRPVQDLREVNKRVEDIHPTVPNPYNLLSGLPPSHRWYTVLDLKDAFFCLRLHPTSQPLFAFEWRDPGMGISGQLTWTRLPQGFKNSPTLFNEALHRDLADFRIQHPDLILLQYVDDILLAATSELDCQQGTRALLLTLGNLGYRASAKKAQLCQKQVKYLGYLLKEGQRWLTEARKETVMGQPTPKTPRQLREFLGTAGFCRLWIPGFAEMAAPLYPLTKPGTLFNWGPDQQKAYQEIKQALLTAPALGLPDLTKPFELFVDEKQGYAKGVLTQKLGPWRRPVAYLSKKLDPVAAGWPPCLRMVAAIAVLRKDAGKLTMGQPLVILAPHAVEALVKQPPDRWLSNARMTHYQAMLLDTDRVQFGPVVALNPATLLPLPEEGAPHDCLEILAETHGTRPDLTDQPIPDADHTWYTDGSSFLQEGQRKAGAAVTTETEVIWARALPAGTSAQRAELIALTQALKMAEGKRLNVYTDSRYAFATAHIHGEIYRRRGWLTSEGREIKNKSEILALLKALFLPKRLSIIHCLGHQKGDSAEARGNRLADQAAREAAIKTPPDTSTLLAGKRTADGSEFEKRTADGSEFESPKKKAKVE

SEQ ID NO: 6434 - protein, 2110 aa, synthetic construct; identical to SEQ ID NO: 4507

SEQ ID NO: 6435 - protein, 2110 aa, synthetic construct
MPAAKRVKLDGGDKKYSIGLDIGTNSVGWAVITDEYKVPSKKFKVLGNTDRHSIKKNLIGALLFDSGETAEATRLKRTARRRYTRRKNRICYLQEIFSNEMAKVDDSFFHRLEESFLVEEDKKHERHPIFGNIVDEVAYHEKYPTIYHLRKKLVDSTDKADLRLIYLALAHMIKFRGHFLIEGDLNPDNSDVDKLFIQLVQTYNQLFEENPINASGVDAKAILSARLSKSRRLENLIAQLPGEKKNGLFGNLIALSLGLTPNFKSNFDLAEDAKLQLSKDTYDDDLDNLLAQIGDQYADLFLAAKNLSDAILLSDILRVNTEITKAPLSASMIKRYDEHHQDLTLLKALVRQQLPEKYKEIFFDQSKNGYAGYIDGGASQEEFYKFIKPILEKMDGTEELLVKLNREDLLRKQRTFDNGSIPHQIHLGELHAILRRQEDFYPFLKDNREKIEKILTFRIPYYVGPLARGNSRFAWMTRKSEETITPWNFEEVVDKGASAQSFIERMTNFDKNLPNEKVLPKHSLLYEYFTVYNELTKVKYVTEGMRKPAFLSGEQKKAIVDLLFKTNRKVTVKQLKEDYFKKIECFDSVEISGVEDRFNASLGTYHDLLKIIKDKDFLDNEENEDILEDIVLTLTLFEDREMIEERLKTYAHLFDDKVMKQLKRRRYTGWGRLSRKLINGIRDKQSGKTILDFLKSDGFANRNFMQLIHDDSLTFKEDIQKAQVSGQGDSLHEHIANLAGSPAIKKGILQTVKVVDELVKVMGRHKPENIVIEMARENQTTQKGQKNSRERMKRIEEGIKELGSQILKEHPVENTQLQNEKLYLYYLQNGRDMYVDQELDINRLSDYDVDHIVPQSFLKDDSIDNKVLTRSDKARGKSDNVPSEEVVKKMKNYWRQLLNAKLITQRKFDNLTKAERGGLSELDKAGFIKRQLVETRQITKHVAQILDSRMNTKYDENDKLIREVKVITLKSKLVSDFRKDFQFYKVREINNYHHAHDAYLNAVVGTALIKKYPKLESEFVYGDYKVYDVRKMIAKSEQEIGKATAKYFFYSNIMNFFKTEITLANGEIRKRPLIETNGETGEIVWDKGRDFATVRKVLSMPQVNIVKKTEVQTGGFSKESILPKRNSDKLIARKKDWDPKKYGGFDSPTVAYSVLVVAKVEKGKSKKLKSVKELLGITIMERSSFEKNPIDFLEAKGYKEVKKDLIIKLPKYSLFELENGRKRMLASAGELQKGNELALPSKYVNFLYLASHYEKLKGSPEDNEQKQLFVEQHKHYLDEIIEQISEFSKRVILADANLDKVLSAYNKHRDKPIREQAENIIHLFTLTNLGAPAAFKYFDTTIDRKRYTSTKEVLDATLIHQSITGLYETRIDLSQLGGDGGEAAAKEAAAKEAAAKEAAAKEAAAKGGTLNIEDEYRLHETSKGPDVPLGSTWLSDFPQAWAETGGMGLAVRQAPLIIPLKATSTPVSIKQYPMSQEARLGIKPHIQRLLDQGILVPCQSPWNTPLLPVKKPGTNDYRPVQDLREVNKRVEDIHPTVPNPYNLLSGLPPSHQWYTVLDLKDAFFCLRLHPTSQSLFAFEWRDPEMGISGQLTWTRLPQGFKNSPTLFDEALHRDLADFRIQHPDLILLQYVDDLLLAATSELDCQQGTRALLQTLGDLGYRASAKKAQICQKQVKYLGYLLKEGQRWLTEARKETVMGQPTPKTPRQLREFLGTAGFCRLWIPGFAEMAAPLYPLTKTGTLFEWGPDQQKAYQEIKQALLTAPALGLPDLTKPFELFVDEKQGYAKGVLTQKLGPWRRPVAYLSKKLDPVAAGWPPCLRMVAAIAVLTKDAGKLTMGQPLVILAPHAVEALVKQPPDRWLSNARMTHYQALLLDTDRVQFGPIVALNPATLLPLPEEGLQHDCLDILAEAHGTRPDLTDQPLPDADHTWYTDGSSFLQEGQRKAGAAVTTETEVVWAKALPAGTSAQRAELIALTQALKMAEGKKLNVYTDSRYAFATAHIHGEIYRRRGLLTSEGKEIKNKDEILALLKALFLPKRLSIIHCPGHQKGNRAEARGNRMADQAAREVATRETPETSTLLAGKRTADGSEFEKRTADGSEFESPKKKAKVE

SEQ ID NO: 6436 - protein, 2110 aa, synthetic construct
MPAAKRVKLDGGDKKYSIGLDIGTNSVGWAVITDEYKVPSKKFKVLGNTDRHSIKKNLIGALLFDSGETAEATRLKRTARRRYTRRKNRICYLQEIFSNEMAKVDDSFFHRLEESFLVEEDKKHERHPIFGNIVDEVAYHEKYPTIYHLRKKLVDSTDKADLRLIYLALAHMIKFRGHFLIEGDLNPDNSDVDKLFIQLVQTYNQLFEENPINASGVDAKAILSARLSKSRRLENLIAQLPGEKKNGLFGNLIALSLGLTPNFKSNFDLAEDAKLQLSKDTYDDDLDNLLAQIGDQYADLFLAAKNLSDAILLSDILRVNTEITKAPLSASMIKRYDEHHQDLTLLKALVRQQLPEKYKEIFFDQSKNGYAGYIDGGASQEEFYKFIKPILEKMDGTEELLVKLNREDLLRKQRTFDNGSIPHQIHLGELHAILRRQEDFYPFLKDNREKIEKILTFRIPYYVGPLARGNSRFAWMTRKSEETITPWNFEEVVDKGASAQSFIERMTNFDKNLPNEKVLPKHSLLYEYFTVYNELTKVKYVTEGMRKPAFLSGEQKKAIVDLLFKTNRKVTVKQLKEDYFKKIECFDSVEISGVEDRFNASLGTYHDLLKIIKDKDFLDNEENEDILEDIVLTLTLFEDREMIEERLKTYAHLFDDKVMKQLKRRRYTGWGRLSRKLINGIRDKQSGKTILDFLKSDGFANRNFMQLIHDDSLTFKEDIQKAQVSGQGDSLHEHIANLAGSPAIKKGILQTVKVVDELVKVMGRHKPENIVIEMARENQTTQKGQKNSRERMKRIEEGIKELGSQILKEHPVENTQLQNEKLYLYYLQNGRDMYVDQELDINRLSDYDVDHIVPQSFLKDDSIDNKVLTRSDKARGKSDNVPSEEVVKKMKNYWRQLLNAKLITQRKFDNLTKAERGGLSELDKAGFIKRQLVETRQITKHVAQILDSRMNTKYDENDKLIREVKVITLKSKLVSDFRKDFQFYKVREINNYHHAHDAYLNAVVGTALIKKYPKLESEFVYGDYKVYDVRKMIAKSEQEIGKATAKYFFYSNIMNFFKTEITLANGEIRKRPLIETNGETGEIVWDKGRDFATVRKVLSMPQVNIVKKTEVQTGGFSKESILPKRNSDKLIARKKDWDPKKYGGFDSPTVAYSVLVVAKVEKGKSKKLKSVKELLGITIMERSSFEKNPIDFLEAKGYKEVKKDLIIKLPKYSLFELENGRKRMLASAGELQKGNELALPSKYVNFLYLASHYEKLKGSPEDNEQKQLFVEQHKHYLDEIIEQISEFSKRVILADANLDKVLSAYNKHRDKPIREQAENIIHLFTLTNLGAPAAFKYFDTTIDRKRYTSTKEVLDATLIHQSITGLYETRIDLSQLGGDGGEAAAKEAAAKEAAAKEAAAKEAAAKGGTLNIEDEHRLHETSKEPDVSLGSTWLSDFPQAWAETGGMGLAVRQAPLIIPLKATSTPVSIKQYPMSQEARLGIKPHIQRLLDQGILVPCQSPWNTPLLPVKKPGTNDYRPVQDLREVNKRVEDIHPTVPNPYNLLSGLPPSHQWYTVLDLKDAFFCLRLHPTSQPLFAFEWRDPEMGISGQLTWTRLPQGFKNSPTLFDEALHRDLADFRIQHPDLILLQYVDDLLLAATSELDCQQGTRALLQTLGNLGYRASAKKAQICQKQVKYLGYLLKEGQRWLTEARKETVMGQPTPKTPRQLREFLGTAGFCRLWIPGFAEMAAPLYPLTKTGTLFNWGPDQQKAYQEIKQALLTAPALGLPDLTKPFELFVDEKQGYAKGVLTQKLGPWRRPVAYLSKKLDPVAAGWPPCLRMVAAIAVLTKDAGKLTMGQPLVILAPHAVEALVKQPPDRWLSNARMTHYQALLLDTDRVQFGPVVALNPATLLPLPEEGLQHNCLDILAEAHGTRPDLTDQPLPDADHTWYTDGSSLLQEGQRKAGAAVTTETEVIWAKALPAGTSAQRAELIALTQALKMAEGKKLNVYTDSRYAFATAHIHGEIYRRRGLLTSEGKEIKNKDEILALLKALFLPKRLSIIHCPGHQKGHSAEARGNRMADQAARKAAITETPDTSTLLAGKRTADGSEFEKRTADGSEFESPKKKAKVE

SEQ ID NO: 6437 - protein, 2190 aa, synthetic construct
MPAAKRVKLDGGDKKYSIGLDIGTNSVGWAVITDEYKVPSKKFKVLGNTDRHSIKKNLIGALLFDSGETAEATRLKRTARRRYTRRKNRICYLQEIFSNEMAKVDDSFFHRLEESFLVEEDKKHERHPIFGNIVDEVAYHEKYPTIYHLRKKLVDSTDKADLRLIYLALAHMIKFRGHFLIEGDLNPDNSDVDKLFIQLVQTYNQLFEENPINASGVDAKAILSARLSKSRRLENLIAQLPGEKKNGLFGNLIALSLGLTPNFKSNFDLAEDAKLQLSKDTYDDDLDNLLAQIGDQYADLFLAAKNLSDAILLSDILRVNTEITKAPLSASMIKRYDEHHQDLTLLKALVRQQLPEKYKEIFFDQSKNGYAGYIDGGASQEEFYKFIKPILEKMDGTEELLVKLNREDLLRKQRTFDNGSIPHQIHLGELHAILRRQEDFYPFLKDNREKIEKILTFRIPYYVGPLARGNSRFAWMTRKSEETITPWNFEEVVDKGASAQSFIERMTNFDKNLPNEKVLPKHSLLYEYFTVYNELTKVKYVTEGMRKPAFLSGEQKKAIVDLLFKTNRKVTVKQLKEDYFKKIECFDSVEISGVEDRFNASLGTYHDLLKIIKDKDFLDNEENEDILEDIVLTLTLFEDREMIEERLKTYAHLFDDKVMKQLKRRRYTGWGRLSRKLINGIRDKQSGKTILDFLKSDGFANRNFMQLIHDDSLTFKEDIQKAQVSGQGDSLHEHIANLAGSPAIKKGILQTVKVVDELVKVMGRHKPENIVIEMARENQTTQKGQKNSRERMKRIEEGIKELGSQILKEHPVENTQLQNEKLYLYYLQNGRDMYVDQELDINRLSDYDVDHIVPQSFLKDDSIDNKVLTRSDKARGKSDNVPSEEVVKKMKNYWRQLLNAKLITQRKFDNLTKAERGGLSELDKAGFIKRQLVETRQITKHVAQILDSRMNTKYDENDKLIREVKVITLKSKLVSDFRKDFQFYKVREINNYHHAHDAYLNAVVGTALIKKYPKLESEFVYGDYKVYDVRKMIAKSEQEIGKATAKYFFYSNIMNFFKTEITLANGEIRKRPLIETNGETGEIVWDKGRDFATVRKVLSMPQVNIVKKTEVQTGGFSKESILPKRNSDKLIARKKDWDPKKYGGFDSPTVAYSVLVVAKVEKGKSKKLKSVKELLGITIMERSSFEKNPIDFLEAKGYKEVKKDLIIKLPKYSLFELENGRKRMLASAGELQKGNELALPSKYVNFLYLASHYEKLKGSPEDNEQKQLFVEQHKHYLDEIIEQISEFSKRVILADANLDKVLSAYNKHRDKPIREQAENIIHLFTLTNLGAPAAFKYFDTTIDRKRYTSTKEVLDATLIHQSITGLYETRIDLSQLGGDGGEAAAKEAAAKEAAAKEAAAKEAAAKGGMDPLQLLQPLEAEIKGTKLKAHWNSGATITCVPEAFLEDERPIQTMLIKTIHGEKQQDVYYLTFKVQGRKVEAEVLASPYDYILLNPSDVPWLMKKPLQLTVLVPLHEYQERLLQQTALPKEQKELLQKLFLKYDALWQHWENQVGHRRIKPHNIATGTLAPRPQKQYPINPKAKPSIQIVIDDLLKQGVLIQQNSTMNTPVYPVPKPDGKWRMVLDYREVNKTIPLIAAQNQHSAGILSSIYRGKYKTTLDLTNGFWAHPITPESYWLTAFTWQGKQYCWTRLPQGFLNSPALFTADVVDLLKEIPNVQAYVDDIYISHDDPQEHLEQLEKIFSILLNAGYVVSLKKSEIAQREVEFLGFNITKEGRGLTDTFKQKLLNITPPKDLKQLQSILGLLNFARNFIPNYSELVKPLYTIVANANGKFISWTEDNSNQLQHIISVLNQADNLEERNPETRLIIKVNSSPSAGYIRYYNEGSKRPIMYVNYIFSKAEAKFTQTEKLLTTMHKGLIKAMDLAMGQEILVYSPIVSMTKIQRTPLPERKALPVRWITWMTYLEDPRIQFHYDKSLPELQQIPNVTEDVIAKTKHPSEFAMVFYTDGSAIKHPDVNKSHSAGMGIAQVQFIPEYKIVHQWSIPLGDHTAQLAEIAAVEFACKKALKISGPVLIVTDSFYVAESANKELPYWKSNGFLNNKKKPLRHVSKWKSIAECLQLKPDIIIMHEKGHQQPMTTLHTEGNNLADKLATQGSYVVHAGKRTADGSEFEKRTADGSEFESPKKKAKVE

SEQ ID NO: 6438 - protein, 2110 aa, synthetic construct
MPAAKRVKLDGGDKKYSIGLDIGTNSVGWAVITDEYKVPSKKFKVLGNTDRHSIKKNLIGALLFDSGETAEATRLKRTARRRYTRRKNRICYLQEIFSNEMAKVDDSFFHRLEESFLVEEDKKHERHPIFGNIVDEVAYHEKYPTIYHLRKKLVDSTDKADLRLIYLALAHMIKFRGHFLIEGDLNPDNSDVDKLFIQLVQTYNQLFEENPINASGVDAKAILSARLSKSRRLENLIAQLPGEKKNGLFGNLIALSLGLTPNFKSNFDLAEDAKLQLSKDTYDDDLDNLLAQIGDQYADLFLAAKNLSDAILLSDILRVNTEITKAPLSASMIKRYDEHHQDLTLLKALVRQQLPEKYKEIFFDQSKNGYAGYIDGGASQEEFYKFIKPILEKMDGTEELLVKLNREDLLRKQRTFDNGSIPHQIHLGELHAILRRQEDFYPFLKDNREKIEKILTFRIPYYVGPLARGNSRFAWMTRKSEETITPWNFEEVVDKGASAQSFIERMTNFDKNLPNEKVLPKHSLLYEYFTVYNELTKVKYVTEGMRKPAFLSGEQKKAIVDLLFKTNRKVTVKQLKEDYFKKIECFDSVEISGVEDRFNASLGTYHDLLKIIKDKDFLDNEENEDILEDIVLTLTLFEDREMIEERLKTYAHLFDDKVMKQLKRRRYTGWGRLSRKLINGIRDKQSGKTILDFLKSDGFANRNFMQLIHDDSLTFKEDIQKAQVSGQGDSLHEHIANLAGSPAIKKGILQTVKVVDELVKVMGRHKPENIVIEMARENQTTQKGQKNSRERMKRIEEGIKELGSQILKEHPVENTQLQNEKLYLYYLQNGRDMYVDQELDINRLSDYDVDHIVPQSFLKDDSIDNKVLTRSDKARGKSDNVPSEEVVKKMKNYWRQLLNAKLITQRKFDNLTKAERGGLSELDKAGFIKRQLVETRQITKHVAQILDSRMNTKYDENDKLIREVKVITLKSKLVSDFRKDFQFYKVREINNYHHAHDAYLNAVVGTALIKKYPKLESEFVYGDYKVYDVRKMIAKSEQEIGKATAKYFFYSNIMNFFKTEITLANGEIRKRPLIETNGETGEIVWDKGRDFATVRKVLSMPQVNIVKKTEVQTGGFSKESILPKRNSDKLIARKKDWDPKKYGGFDSPTVAYSVLVVAKVEKGKSKKLKSVKELLGITIMERSSFEKNPIDFLEAKGYKEVKKDLIIKLPKYSLFELENGRKRMLASAGELQKGNELALPSKYVNFLYLASHYEKLKGSPEDNEQKQLFVEQHKHYLDEIIEQISEFSKRVILADANLDKVLSAYNKHRDKPIREQAENIIHLFTLTNLGAPAAFKYFDTTIDRKRYTSTKEVLDATLIHQSITGLYETRIDLSQLGGDGGEAAAKEAAAKEAAAKEAAAKEAAAKGGTLNIEDEYRLHETSKEPDVPLGSTWLSDFPQAWAETGGMGLAVRQAPLIIPLKATSTPVSIKQYPMSQEARLGIKPHIQRLLDQGILVPCQSPWNTPLLPVKKPGTNDYRPVQDLREVNKRVEDIHPTVPNPYNLLSGLPPSHQWYTVLDLKDAFFCLRLHPTSQPLFAFEWRDPEMGISGQLTWTRLPQGFKNSPTLFDEALHRDLADFRIQHPDLILLQYVDDLLLAATSEQDCQRGTRALLQTLGNLGYRASAKKAQICQKQVKYLGYLLKEGQRWLTEARKETVMGQPTPKTPRQLREFLGTAGFCRLWIPGFAEMAAPLYPLTKTGTLFNWGPDQQKAYQEIKQALLTAPALGLPDLTKPFELFVDEKQGYAKGVLTQKLGPWRRPVAYLSKKLDPVAAGWPPCLRMVAAIAVLTKDAGKLTMGQPLVILAPHAVEALVKQPPDRWLSNARMTHYQAMLLDTDRVQFGPVVALNPATLLPLPEKEAPHDCLEILAETHGTRPDLTDQPIPDADYTWYTDGSSFLQEGQRRAGAAVTTETEVIWARALPAGTSAQRAELIALTQALKMAEGKKLNVYTDSRYAFATAHVHGEIYRRRGLLTSEGREIKNKNEILALLKALFLPKRLSIIHCPGHQKGNSAEARGNRMADQAAREAAMKAVLETSTLLAGKRTADGSEFEKRTADGSEFESPKKKAKVE

SEQ ID NO: 6439 - protein, 2110 aa, synthetic construct
MPAAKRVKLDGGDKKYSIGLDIGTNSVGWAVITDEYKVPSKKFKVLGNTDRHSIKKNLIGALLFDSGETAEATRLKRTARRRYTRRKNRICYLQEIFSNEMAKVDDSFFHRLEESFLVEEDKKHERHPIFGNIVDEVAYHEKYPTIYHLRKKLVDSTDKADLRLIYLALAHMIKFRGHFLIEGDLNPDNSDVDKLFIQLVQTYNQLFEENPINASGVDAKAILSARLSKSRRLENLIAQLPGEKKNGLFGNLIALSLGLTPNFKSNFDLAEDAKLQLSKDTYDDDLDNLLAQIGDQYADLFLAAKNLSDAILLSDILRVNTEITKAPLSASMIKRYDEHHQDLTLLKALVRQQLPEKYKEIFFDQSKNGYAGYIDGGASQEEFYKFIKPILEKMDGTEELLVKLNREDLLRKQRTFDNGSIPHQIHLGELHAILRRQEDFYPFLKDNREKIEKILTFRIPYYVGPLARGNSRFAWMTRKSEETITPWNFEEVVDKGASAQSFIERMTNFDKNLPNEKVLPKHSLLYEYFTVYNELTKVKYVTEGMRKPAFLSGEQKKAIVDLLFKTNRKVTVKQLKEDYFKKIECFDSVEISGVEDRFNASLGTYHDLLKIIKDKDFLDNEENEDILEDIVLTLTLFEDREMIEERLKTYAHLFDDKVMKQLKRRRYTGWGRLSRKLINGIRDKQSGKTILDFLKSDGFANRNFMQLIHDDSLTFKEDIQKAQVSGQGDSLHEHIANLAGSPAIKKGILQTVKVVDELVKVMGRHKPENIVIEMARENQTTQKGQKNSRERMKRIEEGIKELGSQILKEHPVENTQLQNEKLYLYYLQNGRDMYVDQELDINRLSDYDVDHIVPQSFLKDDSIDNKVLTRSDKARGKSDNVPSEEVVKKMKNYWRQLLNAKLITQRKFDNLTKAERGGLSELDKAGFIKRQLVETRQITKHVAQILDSRMNTKYDENDKLIREVKVITLKSKLVSDFRKDFQFYKVREINNYHHAHDAYLNAVVGTALIKKYPKLESEFVYGDYKVYDVRKMIAKSEQEIGKATAKYFFYSNIMNFFKTEITLANGEIRKRPLIETNGETGEIVWDKGRDFATVRKVLSMPQVNIVKKTEVQTGGFSKESILPKRNSDKLIARKKDWDPKKYGGFDSPTVAYSVLVVAKVEKGKSKKLKSVKELLGITIMERSSFEKNPIDFLEAKGYKEVKKDLIIKLPKYSLFELENGRKRMLASAGELQKGNELALPSKYVNFLYLASHYEKLKGSPEDNEQKQLFVEQHKHYLDEIIEQISEFSKRVILADANLDKVLSAYNKHRDKPIREQAENIIHLFTLTNLGAPAAFKYFDTTIDRKRYTSTKEVLDATLIHQSITGLYETRIDLSQLGGDGGEAAAKEAAAKEAAAKEAAAKEAAAKGGTLNIEDEYRLHETSKEPDVPLGSTWLSDFPQAWAETGGMGLAVRQAPLIIPLKATSTPVSIKQYPMSQEARLGIKPHIQRLLDQGILVPCQSPWNTPLLPVKKPGTNDYRPVQDLREVNKRVEDIHPTVPNPYNLLSGLPPSHQWYTVLDLKDAFFCLRLHPTSQPLFAFEWRDPEMGISGQLTWTRLPQGFKNSPTLFNEALHRDLADFRIQHPDLILLQYVDDLLLAATSEQDCQRGTRALLQTLGNLGYRASAKKAQICQKQVKYLGYLLKEGQRWLTEARKETVMGQPTPKTPRQLREFLGTAGFCRLWIPGFAEMAAPLYPLTKPGTLFNWGPDQQKAYQEIKQALLTAPALGLPDLTKPFELFVDEKQGYAKGVLTQKLGPWRRPVAYLSKKLDPVAAGWPPCLRMVAAIAVLTKDAGKLTMGQPLVILAPHAVEALVKQPPDRWLSNARMTHYQAMLLDTDRVQFGPVVALNPATLLPLPEKEAPHDCLEILAETHGTRPDLTDQPIPDADYTWYTDGSSFLQEGQRRAGAAVTTETEVIWARALPAGTSAQRAELIALTQALKMAEGKKLNVYTDSRYAFATAHVHGEIYRRRGWLTSEGREIKNKNEILALLKALFLPKRLSIIHCPGHQKGNSAEARGNRMADQAAREAAMKAVLETSTLLAGKRTADGSEFEKRTADGSEFESPKKKAKVE

SEQ ID NO: 6440 - protein, 2117 aa, synthetic construct
MPAAKRVKLDGGDKKYSIGLDIGTNSVGWAVITDEYKVPSKKFKVLGNTDRHSIKKNLIGALLFDSGETAEATRLKRTARRRYTRRKNRICYLQEIFSNEMAKVDDSFFHRLEESFLVEEDKKHERHPIFGNIVDEVAYHEKYPTIYHLRKKLVDSTDKADLRLIYLALAHMIKFRGHFLIEGDLNPDNSDVDKLFIQLVQTYNQLFEENPINASGVDAKAILSARLSKSRRLENLIAQLPGEKKNGLFGNLIALSLGLTPNFKSNFDLAEDAKLQLSKDTYDDDLDNLLAQIGDQYADLFLAAKNLSDAILLSDILRVNTEITKAPLSASMIKRYDEHHQDLTLLKALVRQQLPEKYKEIFFDQSKNGYAGYIDGGASQEEFYKFIKPILEKMDGTEELLVKLNREDLLRKQRTFDNGSIPHQIHLGELHAILRRQEDFYPFLKDNREKIEKILTFRIPYYVGPLARGNSRFAWMTRKSEETITPWNFEEVVDKGASAQSFIERMTNFDKNLPNEKVLPKHSLLYEYFTVYNELTKVKYVTEGMRKPAFLSGEQKKAIVDLLFKTNRKVTVKQLKEDYFKKIECFDSVEISGVEDRFNASLGTYHDLLKIIKDKDFLDNEENEDILEDIVLTLTLFEDREMIEERLKTYAHLFDDKVMKQLKRRRYTGWGRLSRKLINGIRDKQSGKTILDFLKSDGFANRNFMQLIHDDSLTFKEDIQKAQVSGQGDSLHEHIANLAGSPAIKKGILQTVKVVDELVKVMGRHKPENIVIEMARENQTTQKGQKNSRERMKRIEEGIKELGSQILKEHPVENTQLQNEKLYLYYLQNGRDMYVDQELDINRLSDYDVDHIVPQSFLKDDSIDNKVLTRSDKARGKSDNVPSEEVVKKMKNYWRQLLNAKLITQRKFDNLTKAERGGLSELDKAGFIKRQLVETRQITKHVAQILDSRMNTKYDENDKLIREVKVITLKSKLVSDFRKDFQFYKVREINNYHHAHDAYLNAVVGTALIKKYPKLESEFVYGDYKVYDVRKMIAKSEQEIGKATAKYFFYSNIMNFFKTEITLANGEIRKRPLIETNGETGEIVWDKGRDFATVRKVLSMPQVNIVKKTEVQTGGFSKESILPKRNSDKLIARKKDWDPKKYGGFDSPTVAYSVLVVAKVEKGKSKKLKSVKELLGITIMERSSFEKNPIDFLEAKGYKEVKKDLIIKLPKYSLFELENGRKRMLASAGELQKGNELALPSKYVNFLYLASHYEKLKGSPEDNEQKQLFVEQHKHYLDEIIEQISEFSKRVILADANLDKVLSAYNKHRDKPIREQAENIIHLFTLTNLGAPAAFKYFDTTIDRKRYTSTKEVLDATLIHQSITGLYETRIDLSQLGGDGGEAAAKEAAAKEAAAKEAAAKEAAAKEAAAKGGTAPLEEEYRLFLEAPIQNVTLLEQWKREIPKVWAEINPPGLASTQAPIHVQLLSTALPVRVRQYPITLEAKRSLRETIRKFRAAGILRPVHSPWNTPLLPVRKSGTSEYRMVQDLREVNKRVETIHPTVPNPYTLLSLLPPDRIWYSVLDLKDAFFCIPLAPESQLIFAFEWADAEEGESGQLTWTRLPQGFKNSPTLFDEALNRDLQGFRLDHPSVSLLQYVDDLLIAADTQAACLSATRDLLMTLAELGYRVSGKKAQLCQEEVTYLGFKIHKGSRSLSNSRTQAILQIPVPKTKRQVREFLGTIGYCRLWIPGFAELAQPLYAATRGGNDPLVWGEKEEEAFQSLKLALTQPPALALPSLDKPFQLFVEETSGAAKGVLTQALGPWKRPVAYLSKRLDPVAAGWPRCLRAIAAAALLTREASKLTFGQDIEITSSHNLESLLRSPPDKWLTNARITQYQVLLLDPPRVRFKQTAALNPATLLPETDDTLPIHHCLDTLDSLTSTRPDLTDQPLAQAEATLFTDGSSYIRDGKRYAGAAVVTLDSVIWAEPLPIGTSAQKAELIALTKALEWSKDKSVNIYTDSRYAFATLHVHGMIYRERGLLTAGGKAIKNAPEILALLTAVWLPKRVAVMHCKGHQKDDAPTSTGNRRADEVAREVAIRPLSTQATISAGKRTADGSEFEKRTADGSEFESPKKKAKVE

SEQ ID NO: 6441 - protein, 2117 aa, synthetic construct
MPAAKRVKLDGGDKKYSIGLDIGTNSVGWAVITDEYKVPSKKFKVLGNTDRHSIKKNLIGALLFDSGETAEATRLKRTARRRYTRRKNRICYLQEIFSNEMAKVDDSFFHRLEESFLVEEDKKHERHPIFGNIVDEVAYHEKYPTIYHLRKKLVDSTDKADLRLIYLALAHMIKFRGHFLIEGDLNPDNSDVDKLFIQLVQTYNQLFEENPINASGVDAKAILSARLSKSRRLENLIAQLPGEKKNGLFGNLIALSLGLTPNFKSNFDLAEDAKLQLSKDTYDDDLDNLLAQIGDQYADLFLAAKNLSDAILLSDILRVNTEITKAPLSASMIKRYDEHHQDLTLLKALVRQQLPEKYKEIFFDQSKNGYAGYIDGGASQEEFYKFIKPILEKMDGTEELLVKLNREDLLRKQRTFDNGSIPHQIHLGELHAILRRQEDFYPFLKDNREKIEKILTFRIPYYVGPLARGNSRFAWMTRKSEETITPWNFEEVVDKGASAQSFIERMTNFDKNLPNEKVLPKHSLLYEYFTVYNELTKVKYVTEGMRKPAFLSGEQKKAIVDLLFKTNRKVTVKQLKEDYFKKIECFDSVEISGVEDRFNASLGTYHDLLKIIKDKDFLDNEENEDILEDIVLTLTLFEDREMIEERLKTYAHLFDDKVMKQLKRRRYTGWGRLSRKLINGIRDKQSGKTILDFLKSDGFANRNFMQLIHDDSLTFKEDIQKAQVSGQGDSLHEHIANLAGSPAIKKGILQTVKVVDELVKVMGRHKPENIVIEMARENQTTQKGQKNSRERMKRIEEGIKELGSQILKEHPVENTQLQNEKLYLYYLQNGRDMYVDQELDINRLSDYDVDHIVPQSFLKDDSIDNKVLTRSDKARGKSDNVPSEEVVKKMKNYWRQLLNAKLITQRKFDNLTKAERGGLSELDKAGFIKRQLVETRQITKHVAQILDSRMNTKYDENDKLIREVKVITLKSKLVSDFRKDFQFYKVREINNYHHAHDAYLNAVVGTALIKKYPKLESEFVYGDYKVYDVRKMIAKSEQEIGKATAKYFFYSNIMNFFKTEITLANGEIRKRPLIETNGETGEIVWDKGRDFATVRKVLSMPQVNIVKKTEVQTGGFSKESILPKRNSDKLIARKKDWDPKKYGGFDSPTVAYSVLVVAKVEKGKSKKLKSVKELLGITIMERSSFEKNPIDFLEAKGYKEVKKDLIIKLPKYSLFELENGRKRMLASAGELQKGNELALPSKYVNFLYLASHYEKLKGSPEDNEQKQLFVEQHKHYLDEIIEQISEFSKRVILADANLDKVLSAYNKHRDKPIREQAENIIHLFTLTNLGAPAAFKYFDTTIDRKRYTSTKEVLDATLIHQSITGLYETRIDLSQLGGDGGEAAAKEAAAKEAAAKEAAAKEAAAKEAAAKGGTAPLEEEYRLFLEAPIQNVTLLEQWKREIPKVWAEINPPGLASTQAPIHVQLLSTALPVRVRQYPITLEAKRSLRETIRKFRAAGILRPVHSPWNTPLLPVRKSGTSEYRMVQDLREVNKRVETIHPTVPNPYTLLSLLPPDRIWYSVLDLKDAFFCIPLAPESQLIFAFEWADAEEGESGQLTWTRLPQGFKNSPTLFNEALNRDLQGFRLDHPSVSLLQYVDDLLIAADTQAACLSATRDLLMTLAELGYRVSGKKAQLCQEEVTYLGFKIHKGSRSLSNSRTQAILQIPVPKTKRQVREFLGTIGYCRLWIPGFAELAQPLYAATRPGNDPLVWGEKEEEAFQSLKLALTQPPALALPSLDKPFQLFVEETSGAAKGVLTQALGPWKRPVAYLSKRLDPVAAGWPRCLRAIAAAALLTREASKLTFGQDIEITSSHNLESLLRSPPDKWLTNARITQYQVLLLDPPRVRFKQTAALNPATLLPETDDTLPIHHCLDTLDSLTSTRPDLTDQPLAQAEATLFTDGSSYIRDGKRYAGAAVVTLDSVIWAEPLPIGTSAQKAELIALTKALEWSKDKSVNIYTDSRYAFATLHVHGMIYRERGWLTAGGKAIKNAPEILALLTAVWLPKRVAVMHCKGHQKDDAPTSTGNRRADEVAREVAIRPLSTQATISAGKRTADGSEFEKRTADGSEFESPKKKAKVE

SEQ ID NO: 6442 - protein, 2121 aa, synthetic construct
MPAAKRVKLDGGDKKYSIGLDIGTNSVGWAVITDEYKVPSKKFKVLGNTDRHSIKKNLIGALLFDSGETAEATRLKRTARRRYTRRKNRICYLQEIFSNEMAKVDDSFFHRLEESFLVEEDKKHERHPIFGNIVDEVAYHEKYPTIYHLRKKLVDSTDKADLRLIYLALAHMIKFRGHFLIEGDLNPDNSDVDKLFIQLVQTYNQLFEENPINASGVDAKAILSARLSKSRRLENLIAQLPGEKKNGLFGNLIALSLGLTPNFKSNFDLAEDAKLQLSKDTYDDDLDNLLAQIGDQYADLFLAAKNLSDAILLSDILRVNTEITKAPLSASMIKRYDEHHQDLTLLKALVRQQLPEKYKEIFFDQSKNGYAGYIDGGASQEEFYKFIKPILEKMDGTEELLVKLNREDLLRKQRTFDNGSIPHQIHLGELHAILRRQEDFYPFLKDNREKIEKILTFRIPYYVGPLARGNSRFAWMTRKSEETITPWNFEEVVDKGASAQSFIERMTNFDKNLPNEKVLPKHSLLYEYFTVYNELTKVKYVTEGMRKPAFLSGEQKKAIVDLLFKTNRKVTVKQLKEDYFKKIECFDSVEISGVEDRFNASLGTYHDLLKIIKDKDFLDNEENEDILEDIVLTLTLFEDREMIEERLKTYAHLFDDKVMKQLKRRRYTGWGRLSRKLINGIRDKQSGKTILDFLKSDGFANRNFMQLIHDDSLTFKEDIQKAQVSGQGDSLHEHIANLAGSPAIKKGILQTVKVVDELVKVMGRHKPENIVIEMARENQTTQKGQKNSRERMKRIEEGIKELGSQILKEHPVENTQLQNEKLYLYYLQNGRDMYVDQELDINRLSDYDVDHIVPQSFLKDDSIDNKVLTRSDKARGKSDNVPSEEVVKKMKNYWRQLLNAKLITQRKFDNLTKAERGGLSELDKAGFIKRQLVETRQITKHVAQILDSRMNTKYDENDKLIREVKVITLKSKLVSDFRKDFQFYKVREINNYHHAHDAYLNAVVGTALIKKYPKLESEFVYGDYKVYDVRKMIAKSEQEIGKATAKYFFYSNIMNFFKTEITLANGEIRKRPLIETNGETGEIVWDKGRDFATVRKVLSMPQVNIVKKTEVQTGGFSKESILPKRNSDKLIARKKDWDPKKYGGFDSPTVAYSVLVVAKVEKGKSKKLKSVKELLGITIMERSSFEKNPIDFLEAKGYKEVKKDLIIKLPKYSLFELENGRKRMLASAGELQKGNELALPSKYVNFLYLASHYEKLKGSPEDNEQKQLFVEQHKHYLDEIIEQISEFSKRVILADANLDKVLSAYNKHRDKPIREQAENIIHLFTLTNLGAPAAFKYFDTTIDRKRYTSTKEVLDATLIHQSITGLYETRIDLSQLGGDGGEAAAKEAAAKEAAAKEAAAKEAAAKEAAAKGGTVSLQDEHRLFDIPVTTSLPDVWLQDFPQAWAETGGLGRAKCQAPIIIDLKPTAVPVSIKQYPMSLEAHMGIRQHIIKFLELGVLRPCRSPWNTPLLPVKKPGTQDYRPVQDLREINKRTVDIHPTVPNPYNLLSTLKPDYSWYTVLDLKDAFFCLPLAPQSQELFAFEWKDPERGISGQLTWTRLPQGFKNSPTLFDEALHRDLTDFRTQHPEVTLLQYVDDLLLAAPTKKACTQGTRHLLQELGEKGYRASAKKAQICQTKVTYLGYILSEGKRWLTPGRIETVARIPPPRNPREVREFLGTAGFCRLWIPGFAELAAPLYALTKESTPFTWQTEHQLAFEALKKALLSAPALGLPDTSKPFTLFLDERQGIAKGVLTQKLGPWKRPVAYLSKKLDPVAAGWPPCLRIMAATAMLVKDSAKLTLGQPLTVITPHTLEAIVRQPPDRWITNARLTHYQALLLDTDRVQFGPPVTLNPATLLPVPENQPSPHDCRQVLAETHGTREDLKDQELPDADHTWYTDGSSYLDSGTRRAGAAVVDGHNTIWAQSLPPGTSAQKAELIALTKALELSKGKKANIYTDSRYAFATAHTHGSIYERRGLLTSEGKEIKNKAEIIALLKALFLPQEVAIIHCPGHQKGQDPVAVGNRQADRVARQAAMAEVLTLATEPDNTSHITAGKRTADGSEFEKRTADGSEFESPKKKAKVE

SEQ ID NO: 6443 - protein, 2192 aa, synthetic construct
MPAAKRVKLDGGDKKYSIGLDIGTNSVGWAVITDEYKVPSKKFKVLGNTDRHSIKKNLIGALLFDSGETAEATRLKRTARRRYTRRKNRICYLQEIFSNEMAKVDDSFFHRLEESFLVEEDKKHERHPIFGNIVDEVAYHEKYPTIYHLRKKLVDSTDKADLRLIYLALAHMIKFRGHFLIEGDLNPDNSDVDKLFIQLVQTYNQLFEENPINASGVDAKAILSARLSKSRRLENLIAQLPGEKKNGLFGNLIALSLGLTPNFKSNFDLAEDAKLQLSKDTYDDDLDNLLAQIGDQYADLFLAAKNLSDAILLSDILRVNTEITKAPLSASMIKRYDEHHQDLTLLKALVRQQLPEKYKEIFFDQSKNGYAGYIDGGASQEEFYKFIKPILEKMDGTEELLVKLNREDLLRKQRTFDNGSIPHQIHLGELHAILRRQEDFYPFLKDNREKIEKILTFRIPYYVGPLARGNSRFAWMTRKSEETITPWNFEEVVDKGASAQSFIERMTNFDKNLPNEKVLPKHSLLYEYFTVYNELTKVKYVTEGMRKPAFLSGEQKKAIVDLLFKTNRKVTVKQLKEDYFKKIECFDSVEISGVEDRFNASLGTYHDLLKIIKDKDFLDNEENEDILEDIVLTLTLFEDREMIEERLKTYAHLFDDKVMKQLKRRRYTGWGRLSRKLINGIRDKQSGKTILDFLKSDGFANRNFMQLIHDDSLTFKEDIQKAQVSGQGDSLHEHIANLAGSPAIKKGILQTVKVVDELVKVMGRHKPENIVIEMARENQTTQKGQKNSRERMKRIEEGIKELGSQILKEHPVENTQLQNEKLYLYYLQNGRDMYVDQELDINRLSDYDVDHIVPQSFLKDDSIDNKVLTRSDKARGKSDNVPSEEVVKKMKNYWRQLLNAKLITQRKFDNLTKAERGGLSELDKAGFIKRQLVETRQITKHVAQILDSRMNTKYDENDKLIREVKVITLKSKLVSDFRKDFQFYKVREINNYHHAHDAYLNAVVGTALIKKYPKLESEFVYGDYKVYDVRKMIAKSEQEIGKATAKYFFYSNIMNFFKTEITLANGEIRKRPLIETNGETGEIVWDKGRDFATVRKVLSMPQVNIVKKTEVQTGGFSKESILPKRNSDKLIARKKDWDPKKYGGFDSPTVAYSVLVVAKVEKGKSKKLKSVKELLGITIMERSSFEKNPIDFLEAKGYKEVKKDLIIKLPKYSLFELENGRKRMLASAGELQKGNELALPSKYVNFLYLASHYEKLKGSPEDNEQKQLFVEQHKHYLDEIIEQISEFSKRVILADANLDKVLSAYNKHRDKPIREQAENIIHLFTLTNLGAPAAFKYFDTTIDRKRYTSTKEVLDATLIHQSITGLYETRIDLSQLGGDGGEAAAKEAAAKEAAAKEAAAKEAAAKEAAAKGGMDLLKPLTVERKGVKIKGYWNSQADITCVPKDLLQGEEPVRQQNVTTIHGTQEGDVYYVNLKIDGRRINTEVIGTTLDYAIITPGDVPWILKKPLELTIKLDLEEQQGTLLNNSILSKKGKEELKQLFEKYSALWQSWENQVGHRRIRPHKIATGTVKPTPQKQYHINPKAKPDIQIVINDLLKQGVLIQKESTMNTPVYPVPKPNGRWRMVLDYRAVNKVTPLIAVQNQHSYGILGSLFKGRYKTTIDLSNGFWAHPIVPEDYWITAFTWQGKQYCWTVLPQGFLNSPGLFTGDVVDLLQGIPNVEVYVDDVYISHDSEKEHLEYLDILFNRLKEAGYIISLKKSNIANSIVDFLGFQITNEGRGLTDTFKEKLENITAPTTLKQLQSILGLLNFARNFIPDFTELIAPLYALIPKSTKNYVPWQIEHSTTLETLITKLNGAEYLQGRKGDKTLIMKVNASYTTGYIRYYNEGEKKPISYVSIVFSKTELKFTELEKLLTTVHKGLLKALDLSMGQNIHVYSPIVSMQNIQKTPQTAKKALASRWLSWLSYLEDPRIRFFYDPQMPALKDLPAVDTGKDNKKHPSNFQHIFYTDGSAITSPTKEGHLNAGMGIVYFINKDGNLQKQQEWSISLGNHTAQFAEIAAFEFALKKCLPLGGNILVVTDSNYVAKAYNEELDVWASNGFVNNRKKPLKHISKWKSVADLKRLRPDVVVTHEPGHQKLDSSPHAYGNNLADQLATQASFKVHAGKRTADGSEFEKRTADGSEFESPKKKAKVE

SEQ ID NO: 6444 - protein, 2106 aa, synthetic construct
MPAAKRVKLDGGDKKYSIGLDIGTNSVGWAVITDEYKVPSKKFKVLGNTDRHSIKKNLIGALLFDSGETAEATRLKRTARRRYTRRKNRICYLQEIFSNEMAKVDDSFFHRLEESFLVEEDKKHERHPIFGNIVDEVAYHEKYPTIYHLRKKLVDSTDKADLRLIYLALAHMIKFRGHFLIEGDLNPDNSDVDKLFIQLVQTYNQLFEENPINASGVDAKAILSARLSKSRRLENLIAQLPGEKKNGLFGNLIALSLGLTPNFKSNFDLAEDAKLQLSKDTYDDDLDNLLAQIGDQYADLFLAAKNLSDAILLSDILRVNTEITKAPLSASMIKRYDEHHQDLTLLKALVRQQLPEKYKEIFFDQSKNGYAGYIDGGASQEEFYKFIKPILEKMDGTEELLVKLNREDLLRKQRTFDNGSIPHQIHLGELHAILRRQEDFYPFLKDNREKIEKILTFRIPYYVGPLARGNSRFAWMTRKSEETITPWNFEEVVDKGASAQSFIERMTNFDKNLPNEKVLPKHSLLYEYFTVYNELTKVKYVTEGMRKPAFLSGEQKKAIVDLLFKTNRKVTVKQLKEDYFKKIECFDSVEISGVEDRFNASLGTYHDLLKIIKDKDFLDNEENEDILEDIVLTLTLFEDREMIEERLKTYAHLFDDKVMKQLKRRRYTGWGRLSRKLINGIRDKQSGKTILDFLKSDGFANRNFMQLIHDDSLTFKEDIQKAQVSGQGDSLHEHIANLAGSPAIKKGILQTVKVVDELVKVMGRHKPENIVIEMARENQTTQKGQKNSRERMKRIEEGIKELGSQILKEHPVENTQLQNEKLYLYYLQNGRDMYVDQELDINRLSDYDVDHIVPQSFLKDDSIDNKVLTRSDKARGKSDNVPSEEVVKKMKNYWRQLLNAKLITQRKFDNLTKAERGGLSELDKAGFIKRQLVETRQITKHVAQILDSRMNTKYDENDKLIREVKVITLKSKLVSDFRKDFQFYKVREINNYHHAHDAYLNAVVGTALIKKYPKLESEFVYGDYKVYDVRKMIAKSEQEIGKATAKYFFYSNIMNFFKTEITLANGEIRKRPLIETNGETGEIVWDKGRDFATVRKVLSMPQVNIVKKTEVQTGGFSKESILPKRNSDKLIARKKDWDPKKYGGFDSPTVAYSVLVVAKVEKGKSKKLKSVKELLGITIMERSSFEKNPIDFLEAKGYKEVKKDLIIKLPKYSLFELENGRKRMLASAGELQKGNELALPSKYVNFLYLASHYEKLKGSPEDNEQKQLFVEQHKHYLDEIIEQISEFSKRVILADANLDKVLSAYNKHRDKPIREQAENIIHLFTLTNLGAPAAFKYFDTTIDRKRYTSTKEVLDATLIHQSITGLYETRIDLSQLGGDGGEAAAKEAAAKEAAAKEAAAKEAAAKEAAAKGGVPWILKKPLELTIKLDLEEQQGTLLNNSILSKKGKEELKQLFEKYSALWQSWENQVGHRRIRPHKIATGTVKPTPQKQYHINPKAKPDIQIVINDLLKQGVLIQKESTMNTPVYPVPKPNGRWRMVLDYRAVNKVTPLIAVQNQHSYGILGSLFKGRYKTTIDLSNGFWAHPIVPEDYWITAFTWQGKQYCWTVLPQGFLNSPGLFTGDVVDLLQGIPNVEVYVDDVYISHDSEKEHLEYLDILFNRLKEAGYIISLKKSNIANSIVDFLGFQITNEGRGLTDTFKEKLENITAPTTLKQLQSILGLLNFARNFIPDFTELIAPLYALIPKSTKNYVPWQIEHSTTLETLITKLNGAEYLQGRKGDKTLIMKVNASYTTGYIRYYNEGEKKPISYVSIVFSKTELKFTELEKLLTTVHKGLLKALDLSMGQNIHVYSPIVSMQNIQKTPQTAKKALASRWLSWLSYLEDPRIRFFYDPQMPALKDLPAVDTGKDNKKHPSNFQHIFYTDGSAITSPTKEGHLNAGMGIVYFINKDGNLQKQQEWSISLGNHTAQFAEIAAFEFALKKCLPLGGNILVVTDSNYVAKAYNEELDVWASNGFVNNRKKPLKHISKWKSVADLKRLRPDVVVTHEPGHQKLDSSPHAYGNNLADQLATQASFKVHAGKRTADGSEFEKRTADGSEFESPKKKAKVE

SEQ ID NO: 6445 - protein, 2192 aa, synthetic construct
MPAAKRVKLDGGDKKYSIGLDIGTNSVGWAVITDEYKVPSKKFKVLGNTDRHSIKKNLIGALLFDSGETAEATRLKRTARRRYTRRKNRICYLQEIFSNEMAKVDDSFFHRLEESFLVEEDKKHERHPIFGNIVDEVAYHEKYPTIYHLRKKLVDSTDKADLRLIYLALAHMIKFRGHFLIEGDLNPDNSDVDKLFIQLVQTYNQLFEENPINASGVDAKAILSARLSKSRRLENLIAQLPGEKKNGLFGNLIALSLGLTPNFKSNFDLAEDAKLQLSKDTYDDDLDNLLAQIGDQYADLFLAAKNLSDAILLSDILRVNTEITKAPLSASMIKRYDEHHQDLTLLKALVRQQLPEKYKEIFFDQSKNGYAGYIDGGASQEEFYKFIKPILEKMDGTEELLVKLNREDLLRKQRTFDNGSIPHQIHLGELHAILRRQEDFYPFLKDNREKIEKILTFRIPYYVGPLARGNSRFAWMTRKSEETITPWNFEEVVDKGASAQSFIERMTNFDKNLPNEKVLPKHSLLYEYFTVYNELTKVKYVTEGMRKPAFLSGEQKKAIVDLLFKTNRKVTVKQLKEDYFKKIECFDSVEISGVEDRFNASLGTYHDLLKIIKDKDFLDNEENEDILEDIVLTLTLFEDREMIEERLKTYAHLFDDKVMKQLKRRRYTGWGRLSRKLINGIRDKQSGKTILDFLKSDGFANRNFMQLIHDDSLTFKEDIQKAQVSGQGDSLHEHIANLAGSPAIKKGILQTVKVVDELVKVMGRHKPENIVIEMARENQTTQKGQKNSRERMKRIEEGIKELGSQILKEHPVENTQLQNEKLYLYYLQNGRDMYVDQELDINRLSDYDVDHIVPQSFLKDDSIDNKVLTRSDKARGKSDNVPSEEVVKKMKNYWRQLLNAKLITQRKFDNLTKAERGGLSELDKAGFIKRQLVETRQITKHVAQILDSRMNTKYDENDKLIREVKVITLKSKLVSDFRKDFQFYKVREINNYHHAHDAYLNAVVGTALIKKYPKLESEFVYGDYKVYDVRKMIAKSEQEIGKATAKYFFYSNIMNFFKTEITLANGEIRKRPLIETNGETGEIVWDKGRDFATVRKVLSMPQVNIVKKTEVQTGGFSKESILPKRNSDKLIARKKDWDPKKYGGFDSPTVAYSVLVVAKVEKGKSKKLKSVKELLGITIMERSSFEKNPIDFLEAKGYKEVKKDLIIKLPKYSLFELENGRKRMLASAGELQKGNELALPSKYVNFLYLASHYEKLKGSPEDNEQKQLFVEQHKHYLDEIIEQISEFSKRVILADANLDKVLSAYNKHRDKPIREQAENIIHLFTLTNLGAPAAFKYFDTTIDRKRYTSTKEVLDATLIHQSITGLYETRIDLSQLGGDGGEAAAKEAAAKEAAAKEAAAKEAAAKEAAAKGGMDLLKPLTVERKGVKIKGYWNSQADITCVPKDLLQGEEPVRQQNVTTIHGTQEGDVYYVNLKIDGRRINTEVIGTTLDYAIITPGDVPWILKKPLELTIKLDLEEQQGTLLNNSILSKKGKEELKQLFEKYSALWQSWENQVGHRRIRPHKIATGTVKPTPQKQYHINPKAKPDIQIVINDLLKQGVLIQKESTMNTPVYPVPKPNGRWRMVLDYRAVNKVTPLIAVQNQHSYGILGSLFKGRYKTTIDLSNGFWAHPIVPEDYWITAFTWQGKQYCWTVLPQGFLNSPGLFNGDVVDLLQGIPNVEVYVDDVYISHDSEKEHLEYLDILFNRLKEAGYIISLKKSNIANSIVDFLGFQITNEGRGLTDTFKEKLENITAPTTLKQLQSILGLLNFARNFIPDFTELIAPLYALIPKSPKNYVPWQIEHSTTLETLITKLNGAEYLQGRKGDKTLIMKVNASYTTGYIRYYNEGEKKPISYVSIVFSKTELKFTELEKLLTTVHKGLLKALDLSMGQNIHVYSPIVSMQNIQKTPQTAKKALASRWLSWLSYLEDPRIRFFYDPQMPALKDLPAVDTGKDNKKHPSNFQHIFYTDGSAITSPTKEGHLNAGMGIVYFINKDGNLQKQQEWSISLGNHTAQFAEIAAFEFALKKCLPLGGNILVVTDSNYVAKAYNEELDVWASNGFVNNRKKPLKHISKWKSVADLKRLRPDVVVTHEPGHQKLDSSPHAYGNNLADQLATQASFKVHAGKRTADGSEFEKRTADGSEFESPKKKAKVE

SEQ ID NO: 6446 - protein, 2192 aa, synthetic construct
MPAAKRVKLDGGDKKYSIGLDIGTNSVGWAVITDEYKVPSKKFKVLGNTDRHSIKKNLIGALLFDSGETAEATRLKRTARRRYTRRKNRICYLQEIFSNEMAKVDDSFFHRLEESFLVEEDKKHERHPIFGNIVDEVAYHEKYPTIYHLRKKLVDSTDKADLRLIYLALAHMIKFRGHFLIEGDLNPDNSDVDKLFIQLVQTYNQLFEENPINASGVDAKAILSARLSKSRRLENLIAQLPGEKKNGLFGNLIALSLGLTPNFKSNFDLAEDAKLQLSKDTYDDDLDNLLAQIGDQYADLFLAAKNLSDAILLSDILRVNTEITKAPLSASMIKRYDEHHQDLTLLKALVRQQLPEKYKEIFFDQSKNGYAGYIDGGASQEEFYKFIKPILEKMDGTEELLVKLNREDLLRKQRTFDNGSIPHQIHLGELHAILRRQEDFYPFLKDNREKIEKILTFRIPYYVGPLARGNSRFAWMTRKSEETITPWNFEEVVDKGASAQSFIERMTNFDKNLPNEKVLPKHSLLYEYFTVYNELTKVKYVTEGMRKPAFLSGEQKKAIVDLLFKTNRKVTVKQLKEDYFKKIECFDSVEISGVEDRFNASLGTYHDLLKIIKDKDFLDNEENEDILEDIVLTLTLFEDREMIEERLKTYAHLFDDKVMKQLKRRRYTGWGRLSRKLINGIRDKQSGKTILDFLKSDGFANRNFMQLIHDDSLTFKEDIQKAQVSGQGDSLHEHIANLAGSPAIKKGILQTVKVVDELVKVMGRHKPENIVIEMARENQTTQKGQKNSRERMKRIEEGIKELGSQILKEHPVENTQLQNEKLYLYYLQNGRDMYVDQELDINRLSDYDVDHIVPQSFLKDDSIDNKVLTRSDKARGKSDNVPSEEVVKKMKNYWRQLLNAKLITQRKFDNLTKAERGGLSELDKAGFIKRQLVETRQITKHVAQILDSRMNTKYDENDKLIREVKVITLKSKLVSDFRKDFQFYKVREINNYHHAHDAYLNAVVGTALIKKYPKLESEFVYGDYKVYDVRKMIAKSEQEIGKATAKYFFYSNIMNFFKTEITLANGEIRKRPLIETNGETGEIVWDKGRDFATVRKVLSMPQVNIVKKTEVQTGGFSKESILPKRNSDKLIARKKDWDPKKYGGFDSPTVAYSVLVVAKVEKGKSKKLKSVKELLGITIMERSSFEKNPIDFLEAKGYKEVKKDLIIKLPKYSLFELENGRKRMLASAGELQKGNELALPSKYVNFLYLASHYEKLKGSPEDNEQKQLFVEQHKHYLDEIIEQISEFSKRVILADANLDKVLSAYNKHRDKPIREQAENIIHLFTLTNLGAPAAFKYFDTTIDRKRYTSTKEVLDATLIHQSITGLYETRIDLSQLGGDGGEAAAKEAAAKEAAAKEAAAKEAAAKEAAAKGGMDLLKPLTVERKGVKIKGYWNSQADITCVPKDLLQGEEPVRQQNVTTIHGTQEGDVYYVNLKIDGRRINTEVIGTTLDYAIITPGDVPWILKKPLELTIKLDLEEQQGTLLNNSILSKKGKEELKQLFEKYSALWQSWENQVGHRRIRPHKIATGTVKPTPQKQYHINPKAKPDIQIVINDLLKQGVLIQKESTMNTPVYPVPKPNGRWRMVLDYRAVNKVTPLIAVQNQHSYGILGSLFKGRYKTTIDLSNGFWAHPIVPEDYWITAFTWQGKQYCWTVLPQGFLNSPGLFNGDVVDLLQGIPNVEVYVDDVYISHDSEKEHLEYLDILFNRLKEAGYIISLKKSNIANSIVDFLGFQITNEGRGLTDTFKEKLENITAPTTLKQLQSILGKLNFARNFIPDFTELIAPLYALIPKSPKNYVPWQIEHSTTLETLITKLNGAEYLQGRKGDKTLIMKVNASYTTGYIRYYNEGEKKPISYVSIVFSKTELKFTELEKLLTTVHKGLLKALDLSMGQNIHVYSPIVSMQNIQKTPQTAKKALASRWLSWLSYLEDPRIRFFYDPQMPALKDLPAVDTGKDNKKHPSNFQHIFYTDGSAITSPTKEGHLNAGMGIVYFINKDGNLQKQQEWSISLGNHTAQFAEIAAFEFALKKCLPLGGNILVVTDSNYVAKAYNEELDVWASNGFVNNRKKPLKHISKWKSVADLKRLRPDVVVTHEPGHQKLDSSPHAYGNNLADQLATQASFKVHAGKRTADGSEFEKRTADGSEFESPKKKAKVE

SEQ ID NO: 6447 - protein, 2195 aa, synthetic construct
MPAAKRVKLDGGDKKYSIGLDIGTNSVGWAVITDEYKVPSKKFKVLGNTDRHSIKKNLIGALLFDSGETAEATRLKRTARRRYTRRKNRICYLQEIFSNEMAKVDDSFFHRLEESFLVEEDKKHERHPIFGNIVDEVAYHEKYPTIYHLRKKLVDSTDKADLRLIYLALAHMIKFRGHFLIEGDLNPDNSDVDKLFIQLVQTYNQLFEENPINASGVDAKAILSARLSKSRRLENLIAQLPGEKKNGLFGNLIALSLGLTPNFKSNFDLAEDAKLQLSKDTYDDDLDNLLAQIGDQYADLFLAAKNLSDAILLSDILRVNTEITKAPLSASMIKRYDEHHQDLTLLKALVRQQLPEKYKEIFFDQSKNGYAGYIDGGASQEEFYKFIKPILEKMDGTEELLVKLNREDLLRKQRTFDNGSIPHQIHLGELHAILRRQEDFYPFLKDNREKIEKILTFRIPYYVGPLARGNSRFAWMTRKSEETITPWNFEEVVDKGASAQSFIERMTNFDKNLPNEKVLPKHSLLYEYFTVYNELTKVKYVTEGMRKPAFLSGEQKKAIVDLLFKTNRKVTVKQLKEDYFKKIECFDSVEISGVEDRFNASLGTYHDLLKIIKDKDFLDNEENEDILEDIVLTLTLFEDREMIEERLKTYAHLFDDKVMKQLKRRRYTGWGRLSRKLINGIRDKQSGKTILDFLKSDGFANRNFMQLIHDDSLTFKEDIQKAQVSGQGDSLHEHIANLAGSPAIKKGILQTVKVVDELVKVMGRHKPENIVIEMARENQTTQKGQKNSRERMKRIEEGIKELGSQILKEHPVENTQLQNEKLYLYYLQNGRDMYVDQELDINRLSDYDVDHIVPQSFLKDDSIDNKVLTRSDKARGKSDNVPSEEVVKKMKNYWRQLLNAKLITQRKFDNLTKAERGGLSELDKAGFIKRQLVETRQITKHVAQILDSRMNTKYDENDKLIREVKVITLKSKLVSDFRKDFQFYKVREINNYHHAHDAYLNAVVGTALIKKYPKLESEFVYGDYKVYDVRKMIAKSEQEIGKATAKYFFYSNIMNFFKTEITLANGEIRKRPLIETNGETGEIVWDKGRDFATVRKVLSMPQVNIVKKTEVQTGGFSKESILPKRNSDKLIARKKDWDPKKYGGFDSPTVAYSVLVVAKVEKGKSKKLKSVKELLGITIMERSSFEKNPIDFLEAKGYKEVKKDLIIKLPKYSLFELENGRKRMLASAGELQKGNELALPSKYVNFLYLASHYEKLKGSPEDNEQKQLFVEQHKHYLDEIIEQISEFSKRVILADANLDKVLSAYNKHRDKPIREQAENIIHLFTLTNLGAPAAFKYFDTTIDRKRYTSTKEVLDATLIHQSITGLYETRIDLSQLGGDGGEAAAKEAAAKEAAAKEAAAKEAAAKEAAAKGGMNPLQLLQPLPAEIKGTKLLAHWNSGATITCIPESFLEDEQPIKKTLIKTIHGEKQQNVYYVTFKVKGRKVEAEVIASPYEYILLSPTDVPWLTQQPLQLTILVPLQEYQEKILSKTALPEDQKQQLKTLFVKYDNLWQHWENQVGHRKIRPHNIATGDYPPRPQKQYPINPKAKPSIQIVIDDLLKQGVLTPQNSTMNTPVYPVPKPDGRWRMVLDYREVNKTIPLTAAQNQHSAGILATIVRQKYKTTLDLANGFWAHPITPESYWLTAFTWQGKQYCWTRLPQGFLNSPALFTADVVDLLKEIPNVQVYVDDIYLSHDDPKEHVQQLEKVFQILLQAGYVVSLKKSEIGQKTVEFLGFNITKEGRGLTDTFKTKLLNITPPKDLKQLQSILGLLNFARNFIPNFAELVQPLYNLIASAKGKYIEWSEENTKQLNMVIEALNTASNLEERLPEQRLVIKVNTSPSAGYVRYYNETGKKPIMYLNYVFSKAELKFSMLEKLLTTMHKALIKAMDLAMGQEILVYSPIVSMTKIQKTPLPERKALPIRWITWMTYLEDPRIQFHYDKTLPELKHIPDVYTSSQSPVKHPSQYEGVFYTDGSAIKSPDPTKSNNAGMGIVHATYKPEYQVLNQWSIPLGNHTAQMAEIAAVEFACKKALKIPGPVLVITDSFYVAESANKELPYWKSNGFVNNKKKPLKHISKWKSIAECLSMKPDITIQHEKGISLQIPVFILKGNALADKLATQGSYVVNAGKRTADGSEFEKRTADGSEFESPKKKAKVE

SEQ ID NO: 6448 - protein, 2106 aa, synthetic construct
MPAAKRVKLDGGDKKYSIGLDIGTNSVGWAVITDEYKVPSKKFKVLGNTDRHSIKKNLIGALLFDSGETAEATRLKRTARRRYTRRKNRICYLQEIFSNEMAKVDDSFFHRLEESFLVEEDKKHERHPIFGNIVDEVAYHEKYPTIYHLRKKLVDSTDKADLRLIYLALAHMIKFRGHFLIEGDLNPDNSDVDKLFIQLVQTYNQLFEENPINASGVDAKAILSARLSKSRRLENLIAQLPGEKKNGLFGNLIALSLGLTPNFKSNFDLAEDAKLQLSKDTYDDDLDNLLAQIGDQYADLFLAAKNLSDAILLSDILRVNTEITKAPLSASMIKRYDEHHQDLTLLKALVRQQLPEKYKEIFFDQSKNGYAGYIDGGASQEEFYKFIKPILEKMDGTEELLVKLNREDLLRKQRTFDNGSIPHQIHLGELHAILRRQEDFYPFLKDNREKIEKILTFRIPYYVGPLARGNSRFAWMTRKSEETITPWNFEEVVDKGASAQSFIERMTNFDKNLPNEKVLPKHSLLYEYFTVYNELTKVKYVTEGMRKPAFLSGEQKKAIVDLLFKTNRKVTVKQLKEDYFKKIECFDSVEISGVEDRFNASLGTYHDLLKIIKDKDFLDNEENEDILEDIVLTLTLFEDREMIEERLKTYAHLFDDKVMKQLKRRRYTGWGRLSRKLINGIRDKQSGKTILDFLKSDGFANRNFMQLIHDDSLTFKEDIQKAQVSGQGDSLHEHIANLAGSPAIKKGILQTVKVVDELVKVMGRHKPENIVIEMARENQTTQKGQKNSRERMKRIEEGIKELGSQILKEHPVENTQLQNEKLYLYYLQNGRDMYVDQELDINRLSDYDVDHIVPQSFLKDDSIDNKVLTRSDKARGKSDNVPSEEVVKKMKNYWRQLLNAKLITQRKFDNLTKAERGGLSELDKAGFIKRQLVETRQITKHVAQILDSRMNTKYDENDKLIREVKVITLKSKLVSDFRKDFQFYKVREINNYHHAHDAYLNAVVGTALIKKYPKLESEFVYGDYKVYDVRKMIAKSEQEIGKATAKYFFYSNIMNFFKTEITLANGEIRKRPLIETNGETGEIVWDKGRDFATVRKVLSMPQVNIVKKTEVQTGGFSKESILPKRNSDKLIARKKDWDPKKYGGFDSPTVAYSVLVVAKVEKGKSKKLKSVKELLGITIMERSSFEKNPIDFLEAKGYKEVKKDLIIKLPKYSLFELENGRKRMLASAGELQKGNELALPSKYVNFLYLASHYEKLKGSPEDNEQKQLFVEQHKHYLDEIIEQISEFSKRVILADANLDKVLSAYNKHRDKPIREQAENIIHLFTLTNLGAPAAFKYFDTTIDRKRYTSTKEVLDATLIHQSITGLYETRIDLSQLGGDGGEAAAKEAAAKEAAAKEAAAKEAAAKEAAAKGGVPWLTQQPLQLTILVPLQEYQEKILSKTALPEDQKQQLKTLFVKYDNLWQHWENQVGHRKIRPHNIATGDYPPRPQKQYPINPKAKPSIQIVIDDLLKQGVLTPQNSTMNTPVYPVPKPDGRWRMVLDYREVNKTIPLTAAQNQHSAGILATIVRQKYKTTLDLANGFWAHPITPESYWLTAFTWQGKQYCWTRLPQGFLNSPALFNADVVDLLKEIPNVQVYVDDIYLSHDDPKEHVQQLEKVFQILLQAGYVVSLKKSEIGQKTVEFLGFNITKEGRGLTDTFKTKLLNITPPKDLKQLQSILGKLNFARNFIPNFAELVQPLYNLIAPAKGKYIEWSEENTKQLNMVIEALNTASNLEERLPEQRLVIKVNTSPSAGYVRYYNETGKKPIMYLNYVFSKAELKFSMLEKLLTTMHKALIKAMDLAMGQEILVYSPIVSMTKIQKTPLPERKALPIRWITWMTYLEDPRIQFHYDKTLPELKHIPDVYTSSQSPVKHPSQYEGVFYTDGSAIKSPDPTKSNNAGMGIVHATYKPEYQVLNQWSIPLGNHTAQMAEIAAVEFACKKALKIPGPVLVITDSFYVAESANKELPYWKSNGFVNNKKKPLKHISKWKSIAECLSMKPDITIQHEKGISLQIPVFILKGNALADKLATQGSYVVNAGKRTADGSEFEKRTADGSEFESPKKKAKVE

SEQ ID NO: 6449 - protein, 2195 aa, synthetic construct
MPAAKRVKLDGGDKKYSIGLDIGTNSVGWAVITDEYKVPSKKFKVLGNTDRHSIKKNLIGALLFDSGETAEATRLKRTARRRYTRRKNRICYLQEIFSNEMAKVDDSFFHRLEESFLVEEDKKHERHPIFGNIVDEVAYHEKYPTIYHLRKKLVDSTDKADLRLIYLALAHMIKFRGHFLIEGDLNPDNSDVDKLFIQLVQTYNQLFEENPINASGVDAKAILSARLSKSRRLENLIAQLPGEKKNGLFGNLIALSLGLTPNFKSNFDLAEDAKLQLSKDTYDDDLDNLLAQIGDQYADLFLAAKNLSDAILLSDILRVNTEITKAPLSASMIKRYDEHHQDLTLLKALVRQQLPEKYKEIFFDQSKNGYAGYIDGGASQEEFYKFIKPILEKMDGTEELLVKLNREDLLRKQRTFDNGSIPHQIHLGELHAILRRQEDFYPFLKDNREKIEKILTFRIPYYVGPLARGNSRFAWMTRKSEETITPWNFEEVVDKGASAQSFIERMTNFDKNLPNEKVLPKHSLLYEYFTVYNELTKVKYVTEGMRKPAFLSGEQKKAIVDLLFKTNRKVTVKQLKEDYFKKIECFDSVEISGVEDRFNASLGTYHDLLKIIKDKDFLDNEENEDILEDIVLTLTLFEDREMIEERLKTYAHLFDDKVMKQLKRRRYTGWGRLSRKLINGIRDKQSGKTILDFLKSDGFANRNFMQLIHDDSLTFKEDIQKAQVSGQGDSLHEHIANLAGSPAIKKGILQTVKVVDELVKVMGRHKPENIVIEMARENQTTQKGQKNSRERMKRIEEGIKELGSQILKEHPVENTQLQNEKLYLYYLQNGRDMYVDQELDINRLSDYDVDHIVPQSFLKDDSIDNKVLTRSDKARGKSDNVPSEEVVKKMKNYWRQLLNAKLITQRKFDNLTKAERGGLSELDKAGFIKRQLVETRQITKHVAQILDSRMNTKYDENDKLIREVKVITLKSKLVSDFRKDFQFYKVREINNYHHAHDAYLNAVVGTALIKKYPKLESEFVYGDYKVYDVRKMIAKSEQEIGKATAKYFFYSNIMNFFKTEITLANGEIRKRPLIETNGETGEIVWDKGRDFATVRKVLSMPQVNIVKKTEVQTGGFSKESILPKRNSDKLIARKKDWDPKKYGGFDSPTVAYSVLVVAKVEKGKSKKLKSVKELLGITIMERSSFEKNPIDFLEAKGYKEVKKDLIIKLPKYSLFELENGRKRMLASAGELQKGNELALPSKYVNFLYLASHYEKLKGSPEDNEQKQLFVEQHKHYLDEIIEQISEFSKRVILADANLDKVLSAYNKHRDKPIREQAENIIHLFTLTNLGAPAAFKYFDTTIDRKRYTSTKEVLDATLIHQSITGLYETRIDLSQLGGDGGEAAAKEAAAKEAAAKEAAAKEAAAKEAAAKGGMNPLQLLQPLPAEIKGTKLLAHWNSGATITCIPESFLEDEQPIKKTLIKTIHGEKQQNVYYVTFKVKGRKVEAEVIASPYEYILLSPTDVPWLTQQPLQLTILVPLQEYQEKILSKTALPEDQKQQLKTLFVKYDNLWQHWENQVGHRKIRPHNIATGDYPPRPQKQYPINPKAKPSIQIVIDDLLKQGVLTPQNSTMNTPVYPVPKPDGRWRMVLDYREVNKTIPLTAAQNQHSAGILATIVRQKYKTTLDLANGFWAHPITPESYWLTAFTWQGKQYCWTRLPQGFLNSPALFNADVVDLLKEIPNVQVYVDDIYLSHDDPKEHVQQLEKVFQILLQAGYVVSLKKSEIGQKTVEFLGFNITKEGRGLTDTFKTKLLNITPPKDLKQLQSILGLLNFARNFIPNFAELVQPLYNLIAPAKGKYIEWSEENTKQLNMVIEALNTASNLEERLPEQRLVIKVNTSPSAGYVRYYNETGKKPIMYLNYVFSKAELKFSMLEKLLTTMHKALIKAMDLAMGQEILVYSPIVSMTKIQKTPLPERKALPIRWITWMTYLEDPRIQFHYDKTLPELKHIPDVYTSSQSPVKHPSQYEGVFYTDGSAIKSPDPTKSNNAGMGIVHATYKPEYQVLNQWSIPLGNHTAQMAEIAAVEFACKKALKIPGPVLVITDSFYVAESANKELPYWKSNGFVNNKKKPLKHISKWKSIAECLSMKPDITIQHEKGISLQIPVFILKGNALADKLATQGSYVVNAGKRTADGSEFEKRTADGSEFESPKKKAKVE

SEQ ID NO: 6450 - protein, 2113 aa, synthetic construct
MPAAKRVKLDGGDKKYSIGLDIGTNSVGWAVITDEYKVPSKKFKVLGNTDRHSIKKNLIGALLFDSGETAEATRLKRTARRRYTRRKNRICYLQEIFSNEMAKVDDSFFHRLEESFLVEEDKKHERHPIFGNIVDEVAYHEKYPTIYHLRKKLVDSTDKADLRLIYLALAHMIKFRGHFLIEGDLNPDNSDVDKLFIQLVQTYNQLFEENPINASGVDAKAILSARLSKSRRLENLIAQLPGEKKNGLFGNLIALSLGLTPNFKSNFDLAEDAKLQLSKDTYDDDLDNLLAQIGDQYADLFLAAKNLSDAILLSDILRVNTEITKAPLSASMIKRYDEHHQDLTLLKALVRQQLPEKYKEIFFDQSKNGYAGYIDGGASQEEFYKFIKPILEKMDGTEELLVKLNREDLLRKQRTFDNGSIPHQIHLGELHAILRRQEDFYPFLKDNREKIEKILTFRIPYYVGPLARGNSRFAWMTRKSEETITPWNFEEVVDKGASAQSFIERMTNFDKNLPNEKVLPKHSLLYEYFTVYNELTKVKYVTEGMRKPAFLSGEQKKAIVDLLFKTNRKVTVKQLKEDYFKKIECFDSVEISGVEDRFNASLGTYHDLLKIIKDKDFLDNEENEDILEDIVLTLTLFEDREMIEERLKTYAHLFDDKVMKQLKRRRYTGWGRLSRKLINGIRDKQSGKTILDFLKSDGFANRNFMQLIHDDSLTFKEDIQKAQVSGQGDSLHEHIANLAGSPAIKKGILQTVKVVDELVKVMGRHKPENIVIEMARENQTTQKGQKNSRERMKRIEEGIKELGSQILKEHPVENTQLQNEKLYLYYLQNGRDMYVDQELDINRLSDYDVDHIVPQSFLKDDSIDNKVLTRSDKARGKSDNVPSEEVVKKMKNYWRQLLNAKLITQRKFDNLTKAERGGLSELDKAGFIKRQLVETRQITKHVAQILDSRMNTKYDENDKLIREVKVITLKSKLVSDFRKDFQFYKVREINNYHHAHDAYLNAVVGTALIKKYPKLESEFVYGDYKVYDVRKMIAKSEQEIGKATAKYFFYSNIMNFFKTEITLANGEIRKRPLIETNGETGEIVWDKGRDFATVRKVLSMPQVNIVKKTEVQTGGFSKESILPKRNSDKLIARKKDWDPKKYGGFDSPTVAYSVLVVAKVEKGKSKKLKSVKELLGITIMERSSFEKNPIDFLEAKGYKEVKKDLIIKLPKYSLFELENGRKRMLASAGELQKGNELALPSKYVNFLYLASHYEKLKGSPEDNEQKQLFVEQHKHYLDEIIEQISEFSKRVILADANLDKVLSAYNKHRDKPIREQAENIIHLFTLTNLGAPAAFKYFDTTIDRKRYTSTKEVLDATLIHQSITGLYETRIDLSQLGGDGGEAAAKEAAAKEAAAKEAAAKEAAAKEAAAKGGVLNLEEEYRLHEKPVPSSIDPSWLQLFPTVWAERAGMGLANQVPPVVVELRSGASPVAVRQYPMSKEAREGIRPHIQKFLDLGVLVPCRSPWNTPLLPVKKPGTNDYRPVQDLREINKRVQDIHPTVPNPYNLLSSLPPSYTWYSVLDLKDAFFCLRLHPNSQPLFAFEWKDPEKGNTGQLTWTRLPQGFKNSPTLFDEALHRDLAPFRALNPQVVLLQYVDDLLVAAPTYEDCKKGTQKLLQELSKLGYRVSAKKAQLCQREVTYLGYLLKEGKRWLTPARKATVMKIPVPTTPRQVREFLGTAGFCRLWIPGFASLAAPLYPLTKESIPFIWTEEHQQAFDHIKKALLSAPALALPDLTKPFTLYIDERAGVARGVLTQTLGPWRRPVAYLSKKLDPVASGWPTCLKAVAAVALLLKDADKLTLGQNVTVIASHSLESIVRQPPDRWMTNARMTHYQSLLLNERVSFAPPAVLNPATLLPVESEATPVHRCSEILAEETGTRRDLEDQPLPGVPTWYTDGSSFITEGKRRAGAPIVDGKRTVWASSLPEGTSAQKAELVALTQALRLAEGKNINIYTDSRYAFATAHIHGAIYKQRGLLTSAGKDIKNKEEILALLEAIHLPRRVAIIHCPGHQRGSNPVATGNRRADEAAKQAALSTRVLAGTTKPAGKRTADGSEFEKRTADGSEFESPKKKAKVE

SEQ ID NO: 6451 - protein, 2113 aa, synthetic construct
MPAAKRVKLDGGDKKYSIGLDIGTNSVGWAVITDEYKVPSKKFKVLGNTDRHSIKKNLIGALLFDSGETAEATRLKRTARRRYTRRKNRICYLQEIFSNEMAKVDDSFFHRLEESFLVEEDKKHERHPIFGNIVDEVAYHEKYPTIYHLRKKLVDSTDKADLRLIYLALAHMIKFRGHFLIEGDLNPDNSDVDKLFIQLVQTYNQLFEENPINASGVDAKAILSARLSKSRRLENLIAQLPGEKKNGLFGNLIALSLGLTPNFKSNFDLAEDAKLQLSKDTYDDDLDNLLAQIGDQYADLFLAAKNLSDAILLSDILRVNTEITKAPLSASMIKRYDEHHQDLTLLKALVRQQLPEKYKEIFFDQSKNGYAGYIDGGASQEEFYKFIKPILEKMDGTEELLVKLNREDLLRKQRTFDNGSIPHQIHLGELHAILRRQEDFYPFLKDNREKIEKILTFRIPYYVGPLARGNSRFAWMTRKSEETITPWNFEEVVDKGASAQSFIERMTNFDKNLPNEKVLPKHSLLYEYFTVYNELTKVKYVTEGMRKPAFLSGEQKKAIVDLLFKTNRKVTVKQLKEDYFKKIECFDSVEISGVEDRFNASLGTYHDLLKIIKDKDFLDNEENEDILEDIVLTLTLFEDREMIEERLKTYAHLFDDKVMKQLKRRRYTGWGRLSRKLINGIRDKQSGKTILDFLKSDGFANRNFMQLIHDDSLTFKEDIQKAQVSGQGDSLHEHIANLAGSPAIKKGILQTVKVVDELVKVMGRHKPENIVIEMARENQTTQKGQKNSRERMKRIEEGIKELGSQILKEHPVENTQLQNEKLYLYYLQNGRDMYVDQELDINRLSDYDVDHIVPQSFLKDDSIDNKVLTRSDKARGKSDNVPSEEVVKKMKNYWRQLLNAKLITQRKFDNLTKAERGGLSELDKAGFIKRQLVETRQITKHVAQILDSRMNTKYDENDKLIREVKVITLKSKLVSDFRKDFQFYKVREINNYHHAHDAYLNAVVGTALIKKYPKLESEFVYGDYKVYDVRKMIAKSEQEIGKATAKYFFYSNIMNFFKTEITLANGEIRKRPLIETNGETGEIVWDKGRDFATVRKVLSMPQVNIVKKTEVQTGGFSKESILPKRNSDKLIARKKDWDPKKYGGFDSPTVAYSVLVVAKVEKGKSKKLKSVKELLGITIMERSSFEKNPIDFLEAKGYKEVKKDLIIKLPKYSLFELENGRKRMLASAGELQKGNELALPSKYVNFLYLASHYEKLKGSPEDNEQKQLFVEQHKHYLDEIIEQISEFSKRVILADANLDKVLSAYNKHRDKPIREQAENIIHLFTLTNLGAPAAFKYFDTTIDRKRYTSTKEVLDATLIHQSITGLYETRIDLSQLGGDGGEAAAKEAAAKEAAAKEAAAKEAAAKEAAAKGGVLNLEEEYRLHEKPVPSSIDPSWLQLFPTVWAERAGMGLANQVPPVVVELRSGASPVAVRQYPMSKEAREGIRPHIQKFLDLGVLVPCRSPWNTPLLPVKKPGTNDYRPVQDLREINKRVQDIHPTVPNPYNLLSSLPPSYTWYSVLDLKDAFFCLRLHPNSQPLFAFEWKDPEKGNTGQLTWTRLPQGFKNSPTLFNEALHRDLAPFRALNPQVVLLQYVDDLLVAAPTYEDCKKGTQKLLQELSKLGYRVSAKKAQLCQREVTYLGYLLKEGKRWLTPARKATVMKIPVPTTPRQVREFLGTAGFCRLWIPGFASLAAPLYPLTKPSIPFIWTEEHQQAFDHIKKALLSAPALALPDLTKPFTLYIDERAGVARGVLTQTLGPWRRPVAYLSKKLDPVASGWPTCLKAVAAVALLLKDADKLTLGQNVTVIASHSLESIVRQPPDRWMTNARMTHYQSLLLNERVSFAPPAVLNPATLLPVESEATPVHRCSEILAEETGTRRDLEDQPLPGVPTWYTDGSSFITEGKRRAGAPIVDGKRTVWASSLPEGTSAQKAELVALTQALRLAEGKNINIYTDSRYAFATAHIHGAIYKQRGWLTSAGKDIKNKEEILALLEAIHLPRRVAIIHCPGHQRGSNPVATGNRRADEAAKQAALSTRVLAGTTKPAGKRTADGSEFEKRTADGSEFESPKKKAKVE

SEQ ID NO: 6452 - protein, 2237 aa, synthetic construct
MPAAKRVKLDGGDKKYSIGLDIGTNSVGWAVITDEYKVPSKKFKVLGNTDRHSIKKNLIGALLFDSGETAEATRLKRTARRRYTRRKNRICYLQEIFSNEMAKVDDSFFHRLEESFLVEEDKKHERHPIFGNIVDEVAYHEKYPTIYHLRKKLVDSTDKADLRLIYLALAHMIKFRGHFLIEGDLNPDNSDVDKLFIQLVQTYNQLFEENPINASGVDAKAILSARLSKSRRLENLIAQLPGEKKNGLFGNLIALSLGLTPNFKSNFDLAEDAKLQLSKDTYDDDLDNLLAQIGDQYADLFLAAKNLSDAILLSDILRVNTEITKAPLSASMIKRYDEHHQDLTLLKALVRQQLPEKYKEIFFDQSKNGYAGYIDGGASQEEFYKFIKPILEKMDGTEELLVKLNREDLLRKQRTFDNGSIPHQIHLGELHAILRRQEDFYPFLKDNREKIEKILTFRIPYYVGPLARGNSRFAWMTRKSEETITPWNFEEVVDKGASAQSFIERMTNFDKNLPNEKVLPKHSLLYEYFTVYNELTKVKYVTEGMRKPAFLSGEQKKAIVDLLFKTNRKVTVKQLKEDYFKKIECFDSVEISGVEDRFNASLGTYHDLLKIIKDKDFLDNEENEDILEDIVLTLTLFEDREMIEERLKTYAHLFDDKVMKQLKRRRYTGWGRLSRKLINGIRDKQSGKTILDFLKSDGFANRNFMQLIHDDSLTFKEDIQKAQVSGQGDSLHEHIANLAGSPAIKKGILQTVKVVDELVKVMGRHKPENIVIEMARENQTTQKGQKNSRERMKRIEEGIKELGSQILKEHPVENTQLQNEKLYLYYLQNGRDMYVDQELDINRLSDYDVDHIVPQSFLKDDSIDNKVLTRSDKARGKSDNVPSEEVVKKMKNYWRQLLNAKLITQRKFDNLTKAERGGLSELDKAGFIKRQLVETRQITKHVAQILDSRMNTKYDENDKLIREVKVITLKSKLVSDFRKDFQFYKVREINNYHHAHDAYLNAVVGTALIKKYPKLESEFVYGDYKVYDVRKMIAKSEQEIGKATAKYFFYSNIMNFFKTEITLANGEIRKRPLIETNGETGEIVWDKGRDFATVRKVLSMPQVNIVKKTEVQTGGFSKESILPKRNSDKLIARKKDWDPKKYGGFDSPTVAYSVLVVAKVEKGKSKKLKSVKELLGITIMERSSFEKNPIDFLEAKGYKEVKKDLIIKLPKYSLFELENGRKRMLASAGELQKGNELALPSKYVNFLYLASHYEKLKGSPEDNEQKQLFVEQHKHYLDEIIEQISEFSKRVILADANLDKVLSAYNKHRDKPIREQAENIIHLFTLTNLGAPAAFKYFDTTIDRKRYTSTKEVLDATLIHQSITGLYETRIDLSQLGGDGGEAAAKEAAAKEAAAKEAAAKEAAAKEAAAKGGTLGDQGSRGSDPLPEPRVTLTVEGIPTEFLVNTGAEHSVLTKPMGKMGSKRTVVAGATGSKVYPWTTKRLLKIGQKQVTHSFLVIPECPAPLLGRDLLTKLKAQIQFSTEGPQVTWEDRPAMCLVLNLEEEYRLHEKPVPPSIDPSWLQLFPMVWAEKAGMGLANQVPPVVVELKSDASPVAVRQYPMSKEAREGIRPHIQRFLDLGILVPCQSPWNTPLLPVKKPGTNDYRPVQDLREVNKRVQDIHPTVPNPYNLLSSLPPSHTWYSVLDLKDAFFCLKLHPNSQPLFAFEWRDPEKGNTGQLTWTRLPQGFKNSPTLFDEALHRDLASFRALNPQVVMLQYVDDLLVAAPTYRDCKEGTRRLLQELSKLGYRVSAKKAQLCREEVTYLGYLLKGGKRWLTPARKATVMKIPTPTTPRQVREFLGTAGFCRLWIPGFASLAAPLYPLTREKVPFTWTEAHQEAFGRIKEALLSAPALALPDLTKPFALYVDEKEGVARGVLTQTLGPWRRPVAYLSKKLDPVASGWPTCLKAIAAVALLLKDADKLTLGQNVLVIAPHNLESIVRQPPDRWMTNARMTHYQSLLLNERVSFAPPAILNPATLLPVESDDTPIHICSEILAEETGTRPDLRDQPLPGVPAWYTDGSSFIMDGRRQAGAAIVDNKRTVWASNLPEGTSAQKAELIALTQALRLAEGKSINIYTDSRYAFATAHVHGAIYKQRGLLTSAGKDIKNKEEILALLEAIHLPKRVAIIHCPGHQRGTDPVATGNRKADEAAKQAAQSTRILTETTKNAGKRTADGSEFEKRTADGSEFESPKKKAKVE

SEQ ID NO: 6453 - protein, 2237 aa, synthetic construct
MPAAKRVKLDGGDKKYSIGLDIGTNSVGWAVITDEYKVPSKKFKVLGNTDRHSIKKNLIGALLFDSGETAEATRLKRTARRRYTRRKNRICYLQEIFSNEMAKVDDSFFHRLEESFLVEEDKKHERHPIFGNIVDEVAYHEKYPTIYHLRKKLVDSTDKADLRLIYLALAHMIKFRGHFLIEGDLNPDNSDVDKLFIQLVQTYNQLFEENPINASGVDAKAILSARLSKSRRLENLIAQLPGEKKNGLFGNLIALSLGLTPNFKSNFDLAEDAKLQLSKDTYDDDLDNLLAQIGDQYADLFLAAKNLSDAILLSDILRVNTEITKAPLSASMIKRYDEHHQDLTLLKALVRQQLPEKYKEIFFDQSKNGYAGYIDGGASQEEFYKFIKPILEKMDGTEELLVKLNREDLLRKQRTFDNGSIPHQIHLGELHAILRRQEDFYPFLKDNREKIEKILTFRIPYYVGPLARGNSRFAWMTRKSEETITPWNFEEVVDKGASAQSFIERMTNFDKNLPNEKVLPKHSLLYEYFTVYNELTKVKYVTEGMRKPAFLSGEQKKAIVDLLFKTNRKVTVKQLKEDYFKKIECFDSVEISGVEDRFNASLGTYHDLLKIIKDKDFLDNEENEDILEDIVLTLTLFEDREMIEERLKTYAHLFDDKVMKQLKRRRYTGWGRLSRKLINGIRDKQSGKTILDFLKSDGFANRNFMQLIHDDSLTFKEDIQKAQVSGQGDSLHEHIANLAGSPAIKKGILQTVKVVDELVKVMGRHKPENIVIEMARENQTTQKGQKNSRERMKRIEEGIKELGSQILKEHPVENTQLQNEKLYLYYLQNGRDMYVDQELDINRLSDYDVDHIVPQSFLKDDSIDNKVLTRSDKARGKSDNVPSEEVVKKMKNYWRQLLNAKLITQRKFDNLTKAERGGLSELDKAGFIKRQLVETRQITKHVAQILDSRMNTKYDENDKLIREVKVITLKSKLVSDFRKDFQFYKVREINNYHHAHDAYLNAVVGTALIKKYPKLESEFVYGDYKVYDVRKMIAKSEQEIGKATAKYFFYSNIMNFFKTEITLANGEIRKRPLIETNGETGEIVWDKGRDFATVRKVLSMPQVNIVKKTEVQTGGFSKESILPKRNSDKLIARKKDWDPKKYGGFDSPTVAYSVLVVAKVEKGKSKKLKSVKELLGITIMERSSFEKNPIDFLEAKGYKEVKKDLIIKLPKYSLFELENGRKRMLASAGELQKGNELALPSKYVNFLYLASHYEKLKGSPEDNEQKQLFVEQHKHYLDEIIEQISEFSKRVILADANLDKVLSAYNKHRDKPIREQAENIIHLFTLTNLGAPAAFKYFDTTIDRKRYTSTKEVLDATLIHQSITGLYETRIDLSQLGGDGGEAAAKEAAAKEAAAKEAAAKEAAAKEAAAKGGTLGDQGSRGSDPLPEPRVTLTVEGIPTEFLVNTGAEHSVLTKPMGKMGSKRTVVAGATGSKVYPWTTKRLLKIGQKQVTHSFLVIPECPAPLLGRDLLTKLKAQIQFSTEGPQVTWEDRPAMCLVLNLEEEYRLHEKPVPPSIDPSWLQLFPMVWAEKAGMGLANQVPPVVVELKSDASPVAVRQYPMSKEAREGIRPHIQRFLDLGILVPCQSPWNTPLLPVKKPGTNDYRPVQDLREVNKRVQDIHPTVPNPYNLLSSLPPSHTWYSVLDLKDAFFCLKLHPNSQPLFAFEWRDPEKGNTGQLTWTRLPQGFKNSPTLFNEALHRDLASFRALNPQVVMLQYVDDLLVAAPTYRDCKEGTRRLLQELSKLGYRVSAKKAQLCREEVTYLGYLLKGGKRWLTPARKATVMKIPTPTTPRQVREFLGTAGFCRLWIPGFASLAAPLYPLTRPKVPFTWTEAHQEAFGRIKEALLSAPALALPDLTKPFALYVDEKEGVARGVLTQTLGPWRRPVAYLSKKLDPVASGWPTCLKAIAAVALLLKDADKLTLGQNVLVIAPHNLESIVRQPPDRWMTNARMTHYQSLLLNERVSFAPPAILNPATLLPVESDDTPIHICSEILAEETGTRPDLRDQPLPGVPAWYTDGSSFIMDGRRQAGAAIVDNKRTVWASNLPEGTSAQKAELIALTQALRLAEGKSINIYTDSRYAFATAHVHGAIYKQRGWLTSAGKDIKNKEEILALLEAIHLPKRVAIIHCPGHQRGTDPVATGNRKADEAAKQAAQSTRILTETTKNAGKRTADGSEFEKRTADGSEFESPKKKAKVE

SEQ ID NO: 6454 - protein, 2115 aa, synthetic construct
MPAAKRVKLDGGDKKYSIGLDIGTNSVGWAVITDEYKVPSKKFKVLGNTDRHSIKKNLIGALLFDSGETAEATRLKRTARRRYTRRKNRICYLQEIFSNEMAKVDDSFFHRLEESFLVEEDKKHERHPIFGNIVDEVAYHEKYPTIYHLRKKLVDSTDKADLRLIYLALAHMIKFRGHFLIEGDLNPDNSDVDKLFIQLVQTYNQLFEENPINASGVDAKAILSARLSKSRRLENLIAQLPGEKKNGLFGNLIALSLGLTPNFKSNFDLAEDAKLQLSKDTYDDDLDNLLAQIGDQYADLFLAAKNLSDAILLSDILRVNTEITKAPLSASMIKRYDEHHQDLTLLKALVRQQLPEKYKEIFFDQSKNGYAGYIDGGASQEEFYKFIKPILEKMDGTEELLVKLNREDLLRKQRTFDNGSIPHQIHLGELHAILRRQEDFYPFLKDNREKIEKILTFRIPYYVGPLARGNSRFAWMTRKSEETITPWNFEEVVDKGASAQSFIERMTNFDKNLPNEKVLPKHSLLYEYFTVYNELTKVKYVTEGMRKPAFLSGEQKKAIVDLLFKTNRKVTVKQLKEDYFKKIECFDSVEISGVEDRFNASLGTYHDLLKIIKDKDFLDNEENEDILEDIVLTLTLFEDREMIEERLKTYAHLFDDKVMKQLKRRRYTGWGRLSRKLINGIRDKQSGKTILDFLKSDGFANRNFMQLIHDDSLTFKEDIQKAQVSGQGDSLHEHIANLAGSPAIKKGILQTVKVVDELVKVMGRHKPENIVIEMARENQTTQKGQKNSRERMKRIEEGIKELGSQILKEHPVENTQLQNEKLYLYYLQNGRDMYVDQELDINRLSDYDVDHIVPQSFLKDDSIDNKVLTRSDKARGKSDNVPSEEVVKKMKNYWRQLLNAKLITQRKFDNLTKAERGGLSELDKAGFIKRQLVETRQITKHVAQILDSRMNTKYDENDKLIREVKVITLKSKLVSDFRKDFQFYKVREINNYHHAHDAYLNAVVGTALIKKYPKLESEFVYGDYKVYDVRKMIAKSEQEIGKATAKYFFYSNIMNFFKTEITLANGEIRKRPLIETNGETGEIVWDKGRDFATVRKVLSMPQVNIVKKTEVQTGGFSKESILPKRNSDKLIARKKDWDPKKYGGFDSPTVAYSVLVVAKVEKGKSKKLKSVKELLGITIMERSSFEKNPIDFLEAKGYKEVKKDLIIKLPKYSLFELENGRKRMLASAGELQKGNELALPSKYVNFLYLASHYEKLKGSPEDNEQKQLFVEQHKHYLDEIIEQISEFSKRVILADANLDKVLSAYNKHRDKPIREQAENIIHLFTLTNLGAPAAFKYFDTTIDRKRYTSTKEVLDATLIHQSITGLYETRIDLSQLGGDGGEAAAKEAAAKEAAAKEAAAKEAAAKEAAAKGGTLNLEDEYRLYETSAEPEVSPGSTWLSDFPQAWAETGGMGLAVRQAPLIIPLKATSTPVSIKQYPMSQEAKLGIKPHIQRLLDQGILVPCQSPWNTPLLPVKKPGTNDYRPVQDLREVNKRVEDIHPTVPNPYNLLSGLPPSHRWYTVLDLKDAFFCLRLHPTSQPLFAFEWRDPGMGISGQLTWTRLPQGFKNSPTLFNEALHRDLADFRIQHPDLILLQYVDDILLAATSELDCQQGTRALLLTLGNLGYRASAKKAQLCQKQVKYLGYLLKEGQRWLTEARKETVMGQPTPKTPRQLREFLGTAGFCRLWIPGFAEMAAPLYPLTKPGTLFNWGPDQQKAYQEIKQALLTAPALGLPDLTKPFELFVDEKQGYAKGVLTQKLGPWRRPVAYLSKKLDPVAAGWPPCLRMVAAIAVLRKDAGKLTMGQPLVILAPHAVEALVKQPPDRWLSNARMTHYQAMLLDTDRVQFGPVVALNPATLLPLPEEGAPHDCLEILAETHGTRPDLTDQPIPDADHTWYTDGSSFLQEGQRKAGAAVTTETEVIWARALPAGTSAQRAELIALTQALKMAEGKRLNVYTDSRYAFATAHIHGEIYRRRGWLTSEGREIKNKSEILALLKALFLPKRLSIIHCLGHQKGDSAEARGNRLADQAAREAAIKTPPDTSTLLAGKRTADGSEFEKRTADGSEFESPKKKAKVE

SEQ ID NO: 6455 - protein, 2115 aa, synthetic construct
MPAAKRVKLDGGDKKYSIGLDIGTNSVGWAVITDEYKVPSKKFKVLGNTDRHSIKKNLIGALLFDSGETAEATRLKRTARRRYTRRKNRICYLQEIFSNEMAKVDDSFFHRLEESFLVEEDKKHERHPIFGNIVDEVAYHEKYPTIYHLRKKLVDSTDKADLRLIYLALAHMIKFRGHFLIEGDLNPDNSDVDKLFIQLVQTYNQLFEENPINASGVDAKAILSARLSKSRRLENLIAQLPGEKKNGLFGNLIALSLGLTPNFKSNFDLAEDAKLQLSKDTYDDDLDNLLAQIGDQYADLFLAAKNLSDAILLSDILRVNTEITKAPLSASMIKRYDEHHQDLTLLKALVRQQLPEKYKEIFFDQSKNGYAGYIDGGASQEEFYKFIKPILEKMDGTEELLVKLNREDLLRKQRTFDNGSIPHQIHLGELHAILRRQEDFYPFLKDNREKIEKILTFRIPYYVGPLARGNSRFAWMTRKSEETITPWNFEEVVDKGASAQSFIERMTNFDKNLPNEKVLPKHSLLYEYFTVYNELTKVKYVTEGMRKPAFLSGEQKKAIVDLLFKTNRKVTVKQLKEDYFKKIECFDSVEISGVEDRFNASLGTYHDLLKIIKDKDFLDNEENEDILEDIVLTLTLFEDREMIEERLKTYAHLFDDKVMKQLKRRRYTGWGRLSRKLINGIRDKQSGKTILDFLKSDGFANRNFMQLIHDDSLTFKEDIQKAQVSGQGDSLHEHIANLAGSPAIKKGILQTVKVVDELVKVMGRHKPENIVIEMARENQTTQKGQKNSRERMKRIEEGIKELGSQILKEHPVENTQLQNEKLYLYYLQNGRDMYVDQELDINRLSDYDVDHIVPQSFLKDDSIDNKVLTRSDKARGKSDNVPSEEVVKKMKNYWRQLLNAKLITQRKFDNLTKAERGGLSELDKAGFIKRQLVETRQITKHVAQILDSRMNTKYDENDKLIREVKVITLKSKLVSDFRKDFQFYKVREINNYHHAHDAYLNAVVGTALIKKYPKLESEFVYGDYKVYDVRKMIAKSEQEIGKATAKYFFYSNIMNFFKTEITLANGEIRKRPLIETNGETGEIVWDKGRDFATVRKVLSMPQVNIVKKTEVQTGGFSKESILPKRNSDKLIARKKDWDPKKYGGFDSPTVAYSVLVVAKVEKGKSKKLKSVKELLGITIMERSSFEKNPIDFLEAKGYKEVKKDLIIKLPKYSLFELENGRKRMLASAGELQKGNELALPSKYVNFLYLASHYEKLKGSPEDNEQKQLFVEQHKHYLDEIIEQISEFSKRVILADANLDKVLSAYNKHRDKPIREQAENIIHLFTLTNLGAPAAFKYFDTTIDRKRYTSTKEVLDATLIHQSITGLYETRIDLSQLGGDGGEAAAKEAAAKEAAAKEAAAKEAAAKEAAAKGGTLGIEDEYRLHETSTEPDVSLGSTWLSDFPQAWAETGGMGLAVRQAPLIIPLKATSTPVSIQQYPMSHEARLGIKPHIQRLLDQGILVPCQSPWNTPLLPVKKPGTNDYRPVQDLREVNKRVEDIHPTVPNPYNLLSGLPPSHQWYTVLDLKDAFFCLRLHPTSQPLFAFEWRDPGMGISGQLTWTRLPQGFKNSPTLFDEALHRDLADFRIQHPDLILLQYVDDILLAATSELDCQQGTRALLQTLGDLGYRASAKKAQICQKQVKYLGYLLREGQRWLTEARKETVMGQPVPKTPRQLREFLGTAGFCRLWIPGFAEMAAPLYPLTKTGTLFSWGPDQQKAYQEIKQALLTAPALGLPDLTKPFELFVDEKQGYAKGVLTQKLGPWRRPVAYLSKKLDPVAAGWPPCLRMVAAIAVLTKDAGKLTMGQPLVILAPHAVEALVKQPPDRWLSNARMTHYQAMLLDTDRVQFGPVVALNPATLLPLPEEGAPHDCLEILAETHGTRPDLTDQPIPDADHTWYTDGSSFLQEGQRKAGAAVTTETEVIWAGALPAGTSAQRAELIALTQALKMAEGKRLNVYTDSRYAFATAHIHGEIYRRRGLLTSEGREIKNKSEILALLKALFLPKRLSIIHCLGHQKGDSAEARGNRLADQAAREAAIKTPPDTSTLLAGKRTADGSEFEKRTADGSEFESPKKKAKVE

SEQ ID NO: 6456 - protein, 2115 aa, synthetic construct; identical to SEQ ID NO: 6455

SEQ ID NO: 6457 - protein, 2115 aa, synthetic construct
MPAAKRVKLDGGDKKYSIGLDIGTNSVGWAVITDEYKVPSKKFKVLGNTDRHSIKKNLIGALLFDSGETAEATRLKRTARRRYTRRKNRICYLQEIFSNEMAKVDDSFFHRLEESFLVEEDKKHERHPIFGNIVDEVAYHEKYPTIYHLRKKLVDSTDKADLRLIYLALAHMIKFRGHFLIEGDLNPDNSDVDKLFIQLVQTYNQLFEENPINASGVDAKAILSARLSKSRRLENLIAQLPGEKKNGLFGNLIALSLGLTPNFKSNFDLAEDAKLQLSKDTYDDDLDNLLAQIGDQYADLFLAAKNLSDAILLSDILRVNTEITKAPLSASMIKRYDEHHQDLTLLKALVRQQLPEKYKEIFFDQSKNGYAGYIDGGASQEEFYKFIKPILEKMDGTEELLVKLNREDLLRKQRTFDNGSIPHQIHLGELHAILRRQEDFYPFLKDNREKIEKILTFRIPYYVGPLARGNSRFAWMTRKSEETITPWNFEEVVDKGASAQSFIERMTNFDKNLPNEKVLPKHSLLYEYFTVYNELTKVKYVTEGMRKPAFLSGEQKKAIVDLLFKTNRKVTVKQLKEDYFKKIECFDSVEISGVEDRFNASLGTYHDLLKIIKDKDFLDNEENEDILEDIVLTLTLFEDREMIEERLKTYAHLFDDKVMKQLKRRRYTGWGRLSRKLINGIRDKQSGKTILDFLKSDGFANRNFMQLIHDDSLTFKEDIQKAQVSGQGDSLHEHIANLAGSPAIKKGILQTVKVVDELVKVMGRHKPENIVIEMARENQTTQKGQKNSRERMKRIEEGIKELGSQILKEHPVENTQLQNEKLYLYYLQNGRDMYVDQELDINRLSDYDVDHIVPQSFLKDDSIDNKVLTRSDKARGKSDNVPSEEVVKKMKNYWRQLLNAKLITQRKFDNLTKAERGGLSELDKAGFIKRQLVETRQITKHVAQILDSRMNTKYDENDKLIREVKVITLKSKLVSDFRKDFQFYKVREINNYHHAHDAYLNAVVGTALIKKYPKLESEFVYGDYKVYDVRKMIAKSEQEIGKATAKYFFYSNIMNFFKTEITLANGEIRKRPLIETNGETGEIVWDKGRDFATVRKVLSMPQVNIVKKTEVQTGGFSKESILPKRNSDKLIARKKDWDPKKYGGFDSPTVAYSVLVVAKVEKGKSKKLKSVKELLGITIMERSSFEKNPIDFLEAKGYKEVKKDLIIKLPKYSLFELENGRKRMLASAGELQKGNELALPSKYVNFLYLASHYEKLKGSPEDNEQKQLFVEQHKHYLDEIIEQISEFSKRVILADANLDKVLSAYNKHRDKPIREQAENIIHLFTLTNLGAPAAFKYFDTTIDRKRYTSTKEVLDATLIHQSITGLYETRIDLSQLGGDGGEAAAKEAAAKEAAAKEAAAKEAAAKEAAAKGGTLNIEDEYRLHETSKEPDVSLGSTWLSDFPQAWAETGGMGLAVRQAPLIIPLKATSTPVSIKQYPMSQEARLGIKPHIQRLLDQGILVPCQSPWNTPLLPVKKPGTNDYRPVQDLREVNKRVEDIHPTVPNPYNLLSGLPPSHQWYTVLDLKDAFFCLRLHPTSQPLFAFEWRDPEMGISGQLTWTRLPQGFKNSPTLFDEALHRDLAGFRIQHPDLILLQYVDDLLLAATSELDCQQGTRALLQTLGDLGYRASAKKAQICQKQVKYLGYLLKEGQRWLTEARKETVMGQPIPKTPRQLREFLGTAGFCRLWIPGFAEMAAPLYPLTKTGTLFNWGPDQQKAFQEIKQALLTAPALGLPDLTKPFELFVDEKQGYAKGVLTQKLGPWRRPVAYLSKKLDPVAAGWPPCLRMVAAIAVLTKDAGKLTMGQPLVILAPHAVEALVKQPPDRWLSNARMTHYQALLLDTDRVQFGPVVALNPATLLPLPEEGLQHDCLDILAEAHGTRSDLMDQPLPDADHTWYTDGSSFLQEGQRKAGAAVTTETEVIWARALPAGTSAQRAELIALTQALKMAEGKKLNVYTDSRYAFATAHIHGEIYRRRGLLTSEGKEIKNKDEILALLKALFLPKRLSIIHCPGHQKGNSAEARGNRMADQAAREVATRETPETSTLLAGKRTADGSEFEKRTADGSEFESPKKKAKVE

SEQ ID NO: 6458 - protein, 2115 aa, synthetic construct
MPAAKRVKLDGGDKKYSIGLDIGTNSVGWAVITDEYKVPSKKFKVLGNTDRHSIKKNLIGALLFDSGETAEATRLKRTARRRYTRRKNRICYLQEIFSNEMAKVDDSFFHRLEESFLVEEDKKHERHPIFGNIVDEVAYHEKYPTIYHLRKKLVDSTDKADLRLIYLALAHMIKFRGHFLIEGDLNPDNSDVDKLFIQLVQTYNQLFEENPINASGVDAKAILSARLSKSRRLENLIAQLPGEKKNGLFGNLIALSLGLTPNFKSNFDLAEDAKLQLSKDTYDDDLDNLLAQIGDQYADLFLAAKNLSDAILLSDILRVNTEITKAPLSASMIKRYDEHHQDLTLLKALVRQQLPEKYKEIFFDQSKNGYAGYIDGGASQEEFYKFIKPILEKMDGTEELLVKLNREDLLRKQRTFDNGSIPHQIHLGELHAILRRQEDFYPFLKDNREKIEKILTFRIPYYVGPLARGNSRFAWMTRKSEETITPWNFEEVVDKGASAQSFIERMTNFDKNLPNEKVLPKHSLLYEYFTVYNELTKVKYVTEGMRKPAFLSGEQKKAIVDLLFKTNRKVTVKQLKEDYFKKIECFDSVEISGVEDRFNASLGTYHDLLKIIKDKDFLDNEENEDILEDIVLTLTLFEDREMIEERLKTYAHLFDDKVMKQLKRRRYTGWGRLSRKLINGIRDKQSGKTILDFLKSDGFANRNFMQLIHDDSLTFKEDIQKAQVSGQGDSLHEHIANLAGSPAIKKGILQTVKVVDELVKVMGRHKPENIVIEMARENQTTQKGQKNSRERMKRIEEGIKELGSQILKEHPVENTQLQNEKLYLYYLQNGRDMYVDQELDINRLSDYDVDHIVPQSFLKDDSIDNKVLTRSDKARGKSDNVPSEEVVKKMKNYWRQLLNAKLITQRKFDNLTKAERGGLSELDKAGFIKRQLVETRQITKHVAQILDSRMNTKYDENDKLIREVKVITLKSKLVSDFRKDFQFYKVREINNYHHAHDAYLNAVVGTALIKKYPKLESEFVYGDYKVYDVRKMIAKSEQEIGKATAKYFFYSNIMNFFKTEITLANGEIRKRPLIETNGETGEIVWDKGRDFATVRKVLSMPQVNIVKKTEVQTGGFSKESILPKRNSDKLIARKKDWDPKKYGGFDSPTVAYSVLVVAKVEKGKSKKLKSVKELLGITIMERSSFEKNPIDFLEAKGYKEVKKDLIIKLPKYSLFELENGRKRMLASAGELQKGNELALPSKYVNFLYLASHYEKLKGSPEDNEQKQLFVEQHKHYLDEIIEQISEFSKRVILADANLDKVLSAYNKHRDKPIREQAENIIHLFTLTNLGAPAAFKYFDTTIDRKRYTSTKEVLDATLIHQSITGLYETRIDLSQLGGDGGEAAAKEAAAKEAAAKEAAAKEAAAKEAAAKGGTLNIEDEHRLHETSKEPDVSLGSTWLSDFPQAWAETGGMGLAVRQAPLIIPLKATSTPVSIKQYPMSQEARLGIKPHIQRLLDQGILVPCQSPWNTPLLPVKKPGTNDYRPVQDLREVNKRVEDIHPTVPNPYNLLSGLPPSHQWYTVLDLKDAFFCLRLHPTSQPLFAFEWRDPEMGISGQLTWTRLPQGFKNSPTLFDEALHRDLADFRIQHPDLILLQYVDDLLLAATSELDCQQGTRALLQTLGNLGYRASAKKAQICQKQVKYLGYLLKEGQRWLTEARKETVMGQPTPKTPRQLREFLGTAGFCRLWIPGFAEMAAPLYPLTKTGTLFNWGPDQQKAYQEIKQALLTAPALGLPDLTKPFELFVDEKQGYAKGVLTQKLGPWRRPVAYLSKKLDPVAAGWPPCLRMVAAIAVLTKDAGKLTMGQPLVILAPHAVEALVKQPPDRWLSNARMTHYQALLLDTDRVQFGPVVALNPATLLPLPEEGLQHNCLDILAEAHGTRPDLTDQPLPDADHTWYTDGSSLLQEGQRKAGAAVTTETEVIWAKALPAGTSAQRAELIALTQALKMAEGKKLNVYTDSRYAFATAHIHGEIYRRRGLLTSEGKEIKNKDEILALLKALFLPKRLSIIHCPGHQKGHSAEARGNRMADQAARKAAITETPDTSTLLAGKRTADGSEFEKRTADGSEFESPKKKAKVE

SEQ ID NO: 6459 - protein, 2115 aa, synthetic construct; identical to SEQ ID NO: 6458

SEQ ID NO: 6460 - protein, 2115 aa, synthetic construct
MPAAKRVKLDGGDKKYSIGLDIGTNSVGWAVITDEYKVPSKKFKVLGNTDRHSIKKNLIGALLFDSGETAEATRLKRTARRRYTRRKNRICYLQEIFSNEMAKVDDSFFHRLEESFLVEEDKKHERHPIFGNIVDEVAYHEKYPTIYHLRKKLVDSTDKADLRLIYLALAHMIKFRGHFLIEGDLNPDNSDVDKLFIQLVQTYNQLFEENPINASGVDAKAILSARLSKSRRLENLIAQLPGEKKNGLFGNLIALSLGLTPNFKSNFDLAEDAKLQLSKDTYDDDLDNLLAQIGDQYADLFLAAKNLSDAILLSDILRVNTEITKAPLSASMIKRYDEHHQDLTLLKALVRQQLPEKYKEIFFDQSKNGYAGYIDGGASQEEFYKFIKPILEKMDGTEELLVKLNREDLLRKQRTFDNGSIPHQIHLGELHAILRRQEDFYPFLKDNREKIEKILTFRIPYYVGPLARGNSRFAWMTRKSEETITPWNFEEVVDKGASAQSFIERMTNFDKNLPNEKVLPKHSLLYEYFTVYNELTKVKYVTEGMRKPAFLSGEQKKAIVDLLFKTNRKVTVKQLKEDYFKKIECFDSVEISGVEDRFNASLGTYHDLLKIIKDKDFLDNEENEDILEDIVLTLTLFEDREMIEERLKTYAHLFDDKVMKQLKRRRYTGWGRLSRKLINGIRDKQSGKTILDFLKSDGFANRNFMQLIHDDSLTFKEDIQKAQVSGQGDSLHEHIANLAGSPAIKKGILQTVKVVDELVKVMGRHKPENIVIEMARENQTTQKGQKNSRERMKRIEEGIKELGSQILKEHPVENTQLQNEKLYLYYLQNGRDMYVDQELDINRLSDYDVDHIVPQSFLKDDSIDNKVLTRSDKARGKSDNVPSEEVVKKMKNYWRQLLNAKLITQRKFDNLTKAERGGLSELDKAGFIKRQLVETRQITKHVAQILDSRMNTKYDENDKLIREVKVITLKSKLVSDFRKDFQFYKVREINNYHHAHDAYLNAVVGTALIKKYPKLESEFVYGDYKVYDVRKMIAKSEQEIGKATAKYFFYSNIMNFFKTEITLANGEIRKRPLIETNGETGEIVWDKGRDFATVRKVLSMPQVNIVKKTEVQTGGFSKESILPKRNSDKLIARKKDWDPKKYGGFDSPTVAYSVLVVAKVEKGKSKKLKSVKELLGITIMERSSFEKNPIDFLEAKGYKEVKKDLIIKLPKYSLFELENGRKRMLASAGELQKGNELALPSKYVNFLYLASHYEKLKGSPEDNEQKQLFVEQHKHYLDEIIEQISEFSKRVILADANLDKVLSAYNKHRDKPIREQAENIIHLFTLTNLGAPAAFKYFDTTIDRKRYTSTKEVLDATLIHQSITGLYETRIDLSQLGGDGGEAAAKEAAAKEAAAKEAAAKEAAAKEAAAKGGTLNIEDEYRLHEISTEPDVSPGSTWLSDFPQAWAETGGMGLAVRQAPLIIPLKATSTPVSIKQYPMSQEAKLGIKPHIQRLLDQGILVPCQSPWNTPLLPVKKPGTNDYRPVQGLREVNKRVEDIHPTVPNPYNLLSGLPTSHRWYTVLDLKDAFFCLRLHPTSQPLFASEWRDPGMGISGQLTWTRLPQGFKNSPTLFDEALHRGLADFRIQHPDLILLQYVDDLLLAATSELDCQQGTRALLKTLGNLGYRASAKKAQICQKQVKYLGYLLREGQRWLTEARKETVMGQPTPKTPRQLREFLGTAGFCRLWIPRFAEMAAPLYPLTKTGTLFNWGPDQQKAYHEIKQALLTAPALGLPDLTKPFELFVDEKQGYAKGVLTQKLGPWRRPVAYLSKKLDPVAAGWPPCLRMVAAIAVLTKDAGKLTMGQPLVILAPHAVEALVKQPPDRWLSNARMTHYQAMLLDTDRVQFGPVVALNPATLLPLPEEGAPHDCLEILAETHGTEPDLTDQPIPDADHTWYTDGSSFLQEGQRKAGAAVTTETEVIWARALPAGTSAQRAELIALTQALKMAEGKRLNVYTDSRYAFATAHIHGEIYKRRGLLTSEGREIKNKSEILALLKALFLPKRLSIIHCLGHQKGDSAEARGNRLADQAAREAAIKTPPDTSTLLAGKRTADGSEFEKRTADGSEFESPKKKAKVE

SEQ ID NO: 6461 - protein, 2115 aa, synthetic construct
MPAAKRVKLDGGDKKYSIGLDIGTNSVGWAVITDEYKVPSKKFKVLGNTDRHSIKKNLIGALLFDSGETAEATRLKRTARRRYTRRKNRICYLQEIFSNEMAKVDDSFFHRLEESFLVEEDKKHERHPIFGNIVDEVAYHEKYPTIYHLRKKLVDSTDKADLRLIYLALAHMIKFRGHFLIEGDLNPDNSDVDKLFIQLVQTYNQLFEENPINASGVDAKAILSARLSKSRRLENLIAQLPGEKKNGLFGNLIALSLGLTPNFKSNFDLAEDAKLQLSKDTYDDDLDNLLAQIGDQYADLFLAAKNLSDAILLSDILRVNTEITKAPLSASMIKRYDEHHQDLTLLKALVRQQLPEKYKEIFFDQSKNGYAGYIDGGASQEEFYKFIKPILEKMDGTEELLVKLNREDLLRKQRTFDNGSIPHQIHLGELHAILRRQEDFYPFLKDNREKIEKILTFRIPYYVGPLARGNSRFAWMTRKSEETITPWNFEEVVDKGASAQSFIERMTNFDKNLPNEKVLPKHSLLYEYFTVYNELTKVKYVTEGMRKPAFLSGEQKKAIVDLLFKTNRKVTVKQLKEDYFKKIECFDSVEISGVEDRFNASLGTYHDLLKIIKDKDFLDNEENEDILEDIVLTLTLFEDREMIEERLKTYAHLFDDKVMKQLKRRRYTGWGRLSRKLINGIRDKQSGKTILDFLKSDGFANRNFMQLIHDDSLTFKEDIQKAQVSGQGDSLHEHIANLAGSPAIKKGILQTVKVVDELVKVMGRHKPENIVIEMARENQTTQKGQKNSRERMKRIEEGIKELGSQILKEHPVENTQLQNEKLYLYYLQNGRDMYVDQELDINRLSDYDVDHIVPQSFLKDDSIDNKVLTRSDKARGKSDNVPSEEVVKKMKNYWRQLLNAKLITQRKFDNLTKAERGGLSELDKAGFIKRQLVETRQITKHVAQILDSRMNTKYDENDKLIREVKVITLKSKLVSDFRKDFQFYKVREINNYHHAHDAYLNAVVGTALIKKYPKLESEFVYGDYKVYDVRKMIAKSEQEIGKATAKYFFYSNIMNFFKTEITLANGEIRKRPLIETNGETGEIVWDKGRDFATVRKVLSMPQVNIVKKTEVQTGGFSKESILPKRNSDKLIARKKDWDPKKYGGFDSPTVAYSVLVVAKVEKGKSKKLKSVKELLGITIMERSSFEKNPIDFLEAKGYKEVKKDLIIKLPKYSLFELENGRKRMLASAGELQKGNELALPSKYVNFLYLASHYEKLKGSPEDNEQKQLFVEQHKHYLDEIIEQISEFSKRVILADANLDKVLSAYNKHRDKPIREQAENIIHLFTLTNLGAPAAFKYFDTTIDRKRYTSTKEVLDATLIHQSITGLYETRIDLSQLGGDGGEAAAKEAAAKEAAAKEAAAKEAAAKEAAAKGGTLNIEDEYRLHEISTEPDVSPGSTWLSDFPQAWAETGGMGLAVRQAPLIIPLKATSTPVSIKQYPMSQEAKLGIKPHIQRLLDQGILVPCQSPWNTPLLPVKKPGTNDYRPVQGLREVNKRVEDIHPTVPNPYNLLSGLPTSHRWYTVLDLKDAFFCLRLHPTSQPLFASEWRDPGMGISGQLTWTRLPQGFKNSPTLFNEALHRGLADFRIQHPDLILLQYVDDLLLAATSELDCQQGTRALLKTLGNLGYRASAKKAQICQKQVKYLGYLLREGQRWLTEARKETVMGQPTPKTPRQLREFLGKAGFCRLFIPRFAEMAAPLYPLTKPGTLFNWGPDQQKAYHEIKQALLTAPALGLPDLTKPFELFVDEKQGYAKGVLTQKLGPWRRPVAYLSKKLDPVAAGWPPCLRMVAAIAVLTKDAGKLTMGQPLVILAPHAVEALVKQPPDRWLSNARMTHYQAMLLDTDRVQFGPVVALNPATLLPLPEEGAPHDCLEILAETHGTEPDLTDQPIPDADHTWYTDGSSFLQEGQRKAGAAVTTETEVIWARALPAGTSAQRAELIALTQALKMAEGKRLNVYTDSRYAFATAHIHGEIYKRRGWLTSEGREIKNKSEILALLKALFLPKRLSIIHCLGHQKGDSAEARGNRLADQAAREAAIKTPPDTSTLLAGKRTADGSEFEKRTADGSEFESPKKKAKVE

SEQ ID NO: 6462 - protein, 2195 aa, synthetic construct
MPAAKRVKLDGGDKKYSIGLDIGTNSVGWAVITDEYKVPSKKFKVLGNTDRHSIKKNLIGALLFDSGETAEATRLKRTARRRYTRRKNRICYLQEIFSNEMAKVDDSFFHRLEESFLVEEDKKHERHPIFGNIVDEVAYHEKYPTIYHLRKKLVDSTDKADLRLIYLALAHMIKFRGHFLIEGDLNPDNSDVDKLFIQLVQTYNQLFEENPINASGVDAKAILSARLSKSRRLENLIAQLPGEKKNGLFGNLIALSLGLTPNFKSNFDLAEDAKLQLSKDTYDDDLDNLLAQIGDQYADLFLAAKNLSDAILLSDILRVNTEITKAPLSASMIKRYDEHHQDLTLLKALVRQQLPEKYKEIFFDQSKNGYAGYIDGGASQEEFYKFIKPILEKMDGTEELLVKLNREDLLRKQRTFDNGSIPHQIHLGELHAILRRQEDFYPFLKDNREKIEKILTFRIPYYVGPLARGNSRFAWMTRKSEETITPWNFEEVVDKGASAQSFIERMTNFDKNLPNEKVLPKHSLLYEYFTVYNELTKVKYVTEGMRKPAFLSGEQKKAIVDLLFKTNRKVTVKQLKEDYFKKIECFDSVEISGVEDRFNASLGTYHDLLKIIKDKDFLDNEENEDILEDIVLTLTLFEDREMIEERLKTYAHLFDDKVMKQLKRRRYTGWGRLSRKLINGIRDKQSGKTILDFLKSDGFANRNFMQLIHDDSLTFKEDIQKAQVSGQGDSLHEHIANLAGSPAIKKGILQTVKVVDELVKVMGRHKPENIVIEMARENQTTQKGQKNSRERMKRIEEGIKELGSQILKEHPVENTQLQNEKLYLYYLQNGRDMYVDQELDINRLSDYDVDHIVPQSFLKDDSIDNKVLTRSDKARGKSDNVPSEEVVKKMKNYWRQLLNAKLITQRKFDNLTKAERGGLSELDKAGFIKRQLVETRQITKHVAQILDSRMNTKYDENDKLIREVKVITLKSKLVSDFRKDFQFYKVREINNYHHAHDAYLNAVVGTALIKKYPKLESEFVYGDYKVYDVRKMIAKSEQEIGKATAKYFFYSNIMNFFKTEITLANGEIRKRPLIETNGETGEIVWDKGRDFATVRKVLSMPQVNIVKKTEVQTGGFSKESILPKRNSDKLIARKKDWDPKKYGGFDSPTVAYSVLVVAKVEKGKSKKLKSVKELLGITIMERSSFEKNPIDFLEAKGYKEVKKDLIIKLPKYSLFELENGRKRMLASAGELQKGNELALPSKYVNFLYLASHYEKLKGSPEDNEQKQLFVEQHKHYLDEIIEQISEFSKRVILADANLDKVLSAYNKHRDKPIREQAENIIHLFTLTNLGAPAAFKYFDTTIDRKRYTSTKEVLDATLIHQSITGLYETRIDLSQLGGDGGEAAAKEAAAKEAAAKEAAAKEAAAKEAAAKGGMDPLQLLQPLEAEIKGTKLKAHWNSGATITCVPEAFLEDERPIQTMLIKTIHGEKQQDVYYLTFKVQGRKVEAEVLASPYDYILLNPSDVPWLMKKPLQLTVLVPLHEYQERLLQQTALPKEQKELLQKLFLKYDALWQHWENQVGHRRIKPHNIATGTLAPRPQKQYPINPKAKPSIQIVIDDLLKQGVLIQQNSTMNTPVYPVPKPDGKWRMVLDYREVNKTIPLIAAQNQHSAGILSSIYRGKYKTTLDLTNGFWAHPITPESYWLTAFTWQGKQYCWTRLPQGFLNSPALFTADVVDLLKEIPNVQAYVDDIYISHDDPQEHLEQLEKIFSILLNAGYVVSLKKSEIAQREVEFLGFNITKEGRGLTDTFKQKLLNITPPKDLKQLQSILGLLNFARNFIPNYSELVKPLYTIVANANGKFISWTEDNSNQLQHIISVLNQADNLEERNPETRLIIKVNSSPSAGYIRYYNEGSKRPIMYVNYIFSKAEAKFTQTEKLLTTMHKGLIKAMDLAMGQEILVYSPIVSMTKIQRTPLPERKALPVRWITWMTYLEDPRIQFHYDKSLPELQQIPNVTEDVIAKTKHPSEFAMVFYTDGSAIKHPDVNKSHSAGMGIAQVQFIPEYKIVHQWSIPLGDHTAQLAEIAAVEFACKKALKISGPVLIVTDSFYVAESANKELPYWKSNGFLNNKKKPLRHVSKWKSIAECLQLKPDIIIMHEKGHQQPMTTLHTEGNNLADKLATQGSYVVHAGKRTADGSEFEKRTADGSEFESPKKKAKVE

SEQ ID NO: 6463 - protein, 2106 aa, synthetic construct
MPAAKRVKLDGGDKKYSIGLDIGTNSVGWAVITDEYKVPSKKFKVLGNTDRHSIKKNLIGALLFDSGETAEATRLKRTARRRYTRRKNRICYLQEIFSNEMAKVDDSFFHRLEESFLVEEDKKHERHPIFGNIVDEVAYHEKYPTIYHLRKKLVDSTDKADLRLIYLALAHMIKFRGHFLIEGDLNPDNSDVDKLFIQLVQTYNQLFEENPINASGVDAKAILSARLSKSRRLENLIAQLPGEKKNGLFGNLIALSLGLTPNFKSNFDLAEDAKLQLSKDTYDDDLDNLLAQIGDQYADLFLAAKNLSDAILLSDILRVNTEITKAPLSASMIKRYDEHHQDLTLLKALVRQQLPEKYKEIFFDQSKNGYAGYIDGGASQEEFYKFIKPILEKMDGTEELLVKLNREDLLRKQRTFDNGSIPHQIHLGELHAILRRQEDFYPFLKDNREKIEKILTFRIPYYVGPLARGNSRFAWMTRKSEETITPWNFEEVVDKGASAQSFIERMTNFDKNLPNEKVLPKHSLLYEYFTVYNELTKVKYVTEGMRKPAFLSGEQKKAIVDLLFKTNRKVTVKQLKEDYFKKIECFDSVEISGVEDRFNASLGTYHDLLKIIKDKDFLDNEENEDILEDIVLTLTLFEDREMIEERLKTYAHLFDDKVMKQLKRRRYTGWGRLSRKLINGIRDKQSGKTILDFLKSDGFANRNFMQLIHDDSLTFKEDIQKAQVSGQGDSLHEHIANLAGSPAIKKGILQTVKVVDELVKVMGRHKPENIVIEMARENQTTQKGQKNSRERMKRIEEGIKELGSQILKEHPVENTQLQNEKLYLYYLQNGRDMYVDQELDINRLSDYDVDHIVPQSFLKDDSIDNKVLTRSDKARGKSDNVPSEEVVKKMKNYWRQLLNAKLITQRKFDNLTKAERGGLSELDKAGFIKRQLVETRQITKHVAQILDSRMNTKYDENDKLIREVKVITLKSKLVSDFRKDFQFYKVREINNYHHAHDAYLNAVVGTALIKKYPKLESEFVYGDYKVYDVRKMIAKSEQEIGKATAKYFFYSNIMNFFKTEITLANGEIRKRPLIETNGETGEIVWDKGRDFATVRKVLSMPQVNIVKKTEVQTGGFSKESILPKRNSDKLIARKKDWDPKKYGGFDSPTVAYSVLVVAKVEKGKSKKLKSVKELLGITIMERSSFEKNPIDFLEAKGYKEVKKDLIIKLPKYSLFELENGRKRMLASAGELQKGNELALPSKYVNFLYLASHYEKLKGSPEDNEQKQLFVEQHKHYLDEIIEQISEFSKRVILADANLDKVLSAYNKHRDKPIREQAENIIHLFTLTNLGAPAAFKYFDTTIDRKRYTSTKEVLDATLIHQSITGLYETRIDLSQLGGDGGEAAAKEAAAKEAAAKEAAAKEAAAKEAAAKGGVPWLMKKPLQLTVLVPLHEYQERLLQQTALPKEQKELLQKLFLKYDALWQHWENQVGHRRIKPHNIATGTLAPRPQKQYPINPKAKPSIQIVIDDLLKQGVLIQQNSTMNTPVYPVPKPDGKWRMVLDYREVNKTIPLIAAQNQHSAGILSSIYRGKYKTTLDLTNGFWAHPITPESYWLTAFTWQGKQYCWTRLPQGFLNSPALFTADVVDLLKEIPNVQAYVDDIYISHDDPQEHLEQLEKIFSILLNAGYVVSLKKSEIAQREVEFLGFNITKEGRGLTDTFKQKLLNITPPKDLKQLQSILGLLNFARNFIPNYSELVKPLYTIVANANGKFISWTEDNSNQLQHIISVLNQADNLEERNPETRLIIKVNSSPSAGYIRYYNEGSKRPIMYVNYIFSKAEAKFTQTEKLLTTMHKGLIKAMDLAMGQEILVYSPIVSMTKIQRTPLPERKALPVRWITWMTYLEDPRIQFHYDKSLPELQQIPNVTEDVIAKTKHPSEFAMVFYTDGSAIKHPDVNKSHSAGMGIAQVQFIPEYKIVHQWSIPLGDHTAQLAEIAAVEFACKKALKISGPVLIVTDSFYVAESANKELPYWKSNGFLNNKKKPLRHVSKWKSIAECLQLKPDIIIMHEKGHQQPMTTLHTEGNNLADKLATQGSYVVHAGKRTADGSEFEKRTADGSEFESPKKKAKVE

SEQ ID NO: 6464 - protein, 2106 aa, synthetic construct
MPAAKRVKLDGGDKKYSIGLDIGTNSVGWAVITDEYKVPSKKFKVLGNTDRHSIKKNLIGALLFDSGETAEATRLKRTARRRYTRRKNRICYLQEIFSNEMAKVDDSFFHRLEESFLVEEDKKHERHPIFGNIVDEVAYHEKYPTIYHLRKKLVDSTDKADLRLIYLALAHMIKFRGHFLIEGDLNPDNSDVDKLFIQLVQTYNQLFEENPINASGVDAKAILSARLSKSRRLENLIAQLPGEKKNGLFGNLIALSLGLTPNFKSNFDLAEDAKLQLSKDTYDDDLDNLLAQIGDQYADLFLAAKNLSDAILLSDILRVNTEITKAPLSASMIKRYDEHHQDLTLLKALVRQQLPEKYKEIFFDQSKNGYAGYIDGGASQEEFYKFIKPILEKMDGTEELLVKLNREDLLRKQRTFDNGSIPHQIHLGELHAILRRQEDFYPFLKDNREKIEKILTFRIPYYVGPLARGNSRFAWMTRKSEETITPWNFEEVVDKGASAQSFIERMTNFDKNLPNEKVLPKHSLLYEYFTVYNELTKVKYVTEGMRKPAFLSGEQKKAIVDLLFKTNRKVTVKQLKEDYFKKIECFDSVEISGVEDRFNASLGTYHDLLKIIKDKDFLDNEENEDILEDIVLTLTLFEDREMIEERLKTYAHLFDDKVMKQLKRRRYTGWGRLSRKLINGIRDKQSGKTILDFLKSDGFANRNFMQLIHDDSLTFKEDIQKAQVSGQGDSLHEHIANLAGSPAIKKGILQTVKVVDELVKVMGRHKPENIVIEMARENQTTQKGQKNSRERMKRIEEGIKELGSQILKEHPVENTQLQNEKLYLYYLQNGRDMYVDQELDINRLSDYDVDHIVPQSFLKDDSIDNKVLTRSDKARGKSDNVPSEEVVKKMKNYWRQLLNAKLITQRKFDNLTKAERGGLSELDKAGFIKRQLVETRQITKHVAQILDSRMNTKYDENDKLIREVKVITLKSKLVSDFRKDFQFYKVREINNYHHAHDAYLNAVVGTALIKKYPKLESEFVYGDYKVYDVRKMIAKSEQEIGKATAKYFFYSNIMNFFKTEITLANGEIRKRPLIETNGETGEIVWDKGRDFATVRKVLSMPQVNIVKKTEVQTGGFSKESILPKRNSDKLIARKKDWDPKKYGGFDSPTVAYSVLVVAKVEKGKSKKLKSVKELLGITIMERSSFEKNPIDFLEAKGYKEVKKDLIIKLPKYSLFELENGRKRMLASAGELQKGNELALPSKYVNFLYLASHYEKLKGSPEDNEQKQLFVEQHKHYLDEIIEQISEFSKRVILADANLDKVLSAYNKHRDKPIREQAENIIHLFTLTNLGAPAAFKYFDTTIDRKRYTSTKEVLDATLIHQSITGLYETRIDLSQLGGDGGEAAAKEAAAKEAAAKEAAAKEAAAKEAAAKGGVPWLMKKPLQLTVLVPLHEYQERLLQQTALPKEQKELLQKLFLKYDALWQHWENQVGHRRIKPHNIATGTLAPRPQKQYPINPKAKPSIQIVIDDLLKQGVLIQQNSTMNTPVYPVPKPDGKWRMVLDYREVNKTIPLIAAQNQHSAGILSSIYRGKYKTTLDLTNGFWAHPITPESYWLTAFTWQGKQYCWTRLPQGFLNSPALFNADVVDLLKEIPNVQAYVDDIYISHDDPQEHLEQLEKIFSILLNAGYVVSLKKSEIAQREVEFLGFNITKEGRGLTDTFKQKLLNITPPKDLKQLQSILGKLNFARNFIPNYSELVKPLYTIVAPANGKFISWTEDNSNQLQHIISVLNQADNLEERNPETRLIIKVNSSPSAGYIRYYNEGSKRPIMYVNYIFSKAEAKFTQTEKLLTTMHKGLIKAMDLAMGQEILVYSPIVSMTKIQRTPLPERKALPVRWITWMTYLEDPRIQFHYDKSLPELQQIPNVTEDVIAKTKHPSEFAMVFYTDGSAIKHPDVNKSHSAGMGIAQVQFIPEYKIVHQWSIPLGDHTAQLAEIAAVEFACKKALKISGPVLIVTDSFYVAESANKELPYWKSNGFLNNKKKPLRHVSKWKSIAECLQLKPDIIIMHEKGHQQPMTTLHTEGNNLADKLATQGSYVVHAGKRTADGSEFEKRTADGSEFESPKKKAKVE

SEQ ID NO: 6465 - protein, 2195 aa, synthetic construct
MPAAKRVKLDGGDKKYSIGLDIGTNSVGWAVITDEYKVPSKKFKVLGNTDRHSIKKNLIGALLFDSGETAEATRLKRTARRRYTRRKNRICYLQEIFSNEMAKVDDSFFHRLEESFLVEEDKKHERHPIFGNIVDEVAYHEKYPTIYHLRKKLVDSTDKADLRLIYLALAHMIKFRGHFLIEGDLNPDNSDVDKLFIQLVQTYNQLFEENPINASGVDAKAILSARLSKSRRLENLIAQLPGEKKNGLFGNLIALSLGLTPNFKSNFDLAEDAKLQLSKDTYDDDLDNLLAQIGDQYADLFLAAKNLSDAILLSDILRVNTEITKAPLSASMIKRYDEHHQDLTLLKALVRQQLPEKYKEIFFDQSKNGYAGYIDGGASQEEFYKFIKPILEKMDGTEELLVKLNREDLLRKQRTFDNGSIPHQIHLGELHAILRRQEDFYPFLKDNREKIEKILTFRIPYYVGPLARGNSRFAWMTRKSEETITPWNFEEVVDKGASAQSFIERMTNFDKNLPNEKVLPKHSLLYEYFTVYNELTKVKYVTEGMRKPAFLSGEQKKAIVDLLFKTNRKVTVKQLKEDYFKKIECFDSVEISGVEDRFNASLGTYHDLLKIIKDKDFLDNEENEDILEDIVLTLTLFEDREMIEERLKTYAHLFDDKVMKQLKRRRYTGWGRLSRKLINGIRDKQSGKTILDFLKSDGFANRNFMQLIHDDSLTFKEDIQKAQVSGQGDSLHEHIANLAGSPAIKKGILQTVKVVDELVKVMGRHKPENIVIEMARENQTTQKGQKNSRERMKRIEEGIKELGSQILKEHPVENTQLQNEKLYLYYLQNGRDMYVDQELDINRLSDYDVDHIVPQSFLKDDSIDNKVLTRSDKARGKSDNVPSEEVVKKMKNYWRQLLNAKLITQRKFDNLTKAERGGLSELDKAGFIKRQLVETRQITKHVAQILDSRMNTKYDENDKLIREVKVITLKSKLVSDFRKDFQFYKVREINNYHHAHDAYLNAVVGTALIKKYPKLESEFVYGDYKVYDVRKMIAKSEQEIGKATAKYFFYSNIMNFFKTEITLANGEIRKRPLIETNGETGEIVWDKGRDFATVRKVLSMPQVNIVKKTEVQTGGFSKESILPKRNSDKLIARKKDWDPKKYGGFDSPTVAYSVLVVAKVEKGKSKKLKSVKELLGITIMERSSFEKNPIDFLEAKGYKEVKKDLIIKLPKYSLFELENGRKRMLASAGELQKGNELALPSKYVNFLYLASHYEKLKGSPEDNEQKQLFVEQHKHYLDEIIEQISEFSKRVILADANLDKVLSAYNKHRDKPIREQAENIIHLFTLTNLGAPAAFKYFDTTIDRKRYTSTKEVLDATLIHQSITGLYETRIDLSQLGGDGGEAAAKEAAAKEAAAKEAAAKEAAAKEAAAKGGMDPLQLLQPLEAEIKGTKLKAHWNSGATITCVPQAFLEEEVPIKNIWIKTIHGEKEQPVYYLTFKIQGRKVEAEVISSPYDYILVSPSDIPWLMKKPLQLTTLVPLQEYEERLLKQTMLTGSYKEKLQSLFLKYDALWQHWENQVGHRRIKPHHIATGTVNPRPQKQYPINPKAKASIQTVINDLLKQGVLIQQNSIMNTPVYPVPKPDGKWRMVLDYREVNKTIPLIAAQNQHSAGILSSIFRGKYKTTLDLSNGFWAHSITPESYWLTAFTWLGQQYCWTRLPQGFLNSPALFTADVVDLLKEVPNVQVYVDDIYISHDDPREHLEQLEKVFSLLLNAGYVVSLKKSEIAQHEVEFLGFNITKEGRGLTETFKQKLLNITPPRDLKQLQSILGLLNFARNFIPNFSELVKPLYNIIATANGKYITWTTDNSQQLQNIISMLNSAENLEERNPEVRLIMKVNTSPSAGYIRFYNEFAKRPIMYLNYVYTKAEVKFTNTEKLLTTIHKGLIKALDLGMGQEILVYSPIVSMTKIQKTPLPERKALPIRWITWMSYLEDPRIQFHYDKTLPELQQVPTVTDDIIAKIKHPSEFSMVFYTDGSAIKHPNVNKSHNAGMGIAQVQFKPEFTVINTWSIPLGDHTAQLAEVAAVEFACKKALKIDGPVLIVTDSFYVAESVNKELPYWQSNGFFNNKKKPLKHVSKWKSIADCIQLKPDIIIIHEKGHQPTASTFHTEGNNLADKLATQGSYVVNAGKRTADGSEFEKRTADGSEFESPKKKAKVE

SEQ ID NO: 6466 - protein, 2106 aa, synthetic construct
MPAAKRVKLDGGDKKYSIGLDIGTNSVGWAVITDEYKVPSKKFKVLGNTDRHSIKKNLIGALLFDSGETAEATRLKRTARRRYTRRKNRICYLQEIFSNEMAKVDDSFFHRLEESFLVEEDKKHERHPIFGNIVDEVAYHEKYPTIYHLRKKLVDSTDKADLRLIYLALAHMIKFRGHFLIEGDLNPDNSDVDKLFIQLVQTYNQLFEENPINASGVDAKAILSARLSKSRRLENLIAQLPGEKKNGLFGNLIALSLGLTPNFKSNFDLAEDAKLQLSKDTYDDDLDNLLAQIGDQYADLFLAAKNLSDAILLSDILRVNTEITKAPLSASMIKRYDEHHQDLTLLKALVRQQLPEKYKEIFFDQSKNGYAGYIDGGASQEEFYKFIKPILEKMDGTEELLVKLNREDLLRKQRTFDNGSIPHQIHLGELHAILRRQEDFYPFLKDNREKIEKILTFRIPYYVGPLARGNSRFAWMTRKSEETITPWNFEEVVDKGASAQSFIERMTNFDKNLPNEKVLPKHSLLYEYFTVYNELTKVKYVTEGMRKPAFLSGEQKKAIVDLLFKTNRKVTVKQLKEDYFKKIECFDSVEISGVEDRFNASLGTYHDLLKIIKDKDFLDNEENEDILEDIVLTLTLFEDREMIEERLKTYAHLFDDKVMKQLKRRRYTGWGRLSRKLINGIRDKQSGKTILDFLKSDGFANRNFMQLIHDDSLTFKEDIQKAQVSGQGDSLHEHIANLAGSPAIKKGILQTVKVVDELVKVMGRHKPENIVIEMARENQTTQKGQKNSRERMKRIEEGIKELGSQILKEHPVENTQLQNEKLYLYYLQNGRDMYVDQELDINRLSDYDVDHIVPQSFLKDDSIDNKVLTRSDKARGKSDNVPSEEVVKKMKNYWRQLLNAKLITQRKFDNLTKAERGGLSELDKAGFIKRQLVETRQITKHVAQILDSRMNTKYDENDKLIREVKVITLKSKLVSDFRKDFQFYKVREINNYHHAHDAYLNAVVGTALIKKYPKLESEFVYGDYKVYDVRKMIAKSEQEIGKATAKYFFYSNIMNFFKTEITLANGEIRKRPLIETNGETGEIVWDKGRDFATVRKVLSMPQVNIVKKTEVQTGGFSKESILPKRNSDKLIARKKDWDPKKYGGFDSPTVAYSVLVVAKVEKGKSKKLKSVKELLGITIMERSSFEKNPIDFLEAKGYKEVKKDLIIKLPKYSLFELENGRKRMLASAGELQKGNELALPSKYVNFLYLASHYEKLKGSPEDNEQKQLFVEQHKHYLDEIIEQISEFSKRVILADANLDKVLSAYNKHRDKPIREQAENIIHLFTLTNLGAPAAFKYFDTTIDRKRYTSTKEVLDATLIHQSITGLYETRIDLSQLGGDGGEAAAKEAAAKEAAAKEAAAKEAAAKEAAAKGGIPWLMKKPLQLTTLVPLQEYEERLLKQTMLTGSYKEKLQSLFLKYDALWQHWENQVGHRRIKPHHIATGTVNPRPQKQYPINPKAKASIQTVINDLLKQGVLIQQNSIMNTPVYPVPKPDGKWRMVLDYREVNKTIPLIAAQNQHSAGILSSIFRGKYKTTLDLSNGFWAHSITPESYWLTAFTWLGQQYCWTRLPQGFLNSPALFNADVVDLLKEVPNVQVYVDDIYISHDDPREHLEQLEKVFSLLLNAGYVVSLKKSEIAQHEVEFLGFNITKEGRGLTETFKQKLLNITPPRDLKQLQSILGLLNFARNFIPNFSELVKPLYNIIATAPGKYITWTTDNSQQLQNIISMLNSAENLEERNPEVRLIMKVNTSPSAGYIRFYNEFAKRPIMYLNYVYTKAEVKFTNTEKLLTTIHKGLIKALDLGMGQEILVYSPIVSMTKIQKTPLPERKALPIRWITWMSYLEDPRIQFHYDKTLPELQQVPTVTDDIIAKIKHPSEFSMVFYTDGSAIKHPNVNKSHNAGMGIAQVQFKPEFTVINTWSIPLGDHTAQLAEVAAVEFACKKALKIDGPVLIVTDSFYVAESVNKELPYWQSNGFFNNKKKPLKHVSKWKSIADCIQLKPDIIIIHEKGHQPTASTFHTEGNNLADKLATQGSYVVNAGKRTADGSEFEKRTADGSEFESPKKKAKVE

SEQ ID NO: 6467 - protein, 2113 aa, synthetic construct
MPAAKRVKLDGGDKKYSIGLDIGTNSVGWAVITDEYKVPSKKFKVLGNTDRHSIKKNLIGALLFDSGETAEATRLKRTARRRYTRRKNRICYLQEIFSNEMAKVDDSFFHRLEESFLVEEDKKHERHPIFGNIVDEVAYHEKYPTIYHLRKKLVDSTDKADLRLIYLALAHMIKFRGHFLIEGDLNPDNSDVDKLFIQLVQTYNQLFEENPINASGVDAKAILSARLSKSRRLENLIAQLPGEKKNGLFGNLIALSLGLTPNFKSNFDLAEDAKLQLSKDTYDDDLDNLLAQIGDQYADLFLAAKNLSDAILLSDILRVNTEITKAPLSASMIKRYDEHHQDLTLLKALVRQQLPEKYKEIFFDQSKNGYAGYIDGGASQEEFYKFIKPILEKMDGTEELLVKLNREDLLRKQRTFDNGSIPHQIHLGELHAILRRQEDFYPFLKDNREKIEKILTFRIPYYVGPLARGNSRFAWMTRKSEETITPWNFEEVVDKGASAQSFIERMTNFDKNLPNEKVLPKHSLLYEYFTVYNELTKVKYVTEGMRKPAFLSGEQKKAIVDLLFKTNRKVTVKQLKEDYFKKIECFDSVEISGVEDRFNASLGTYHDLLKIIKDKDFLDNEENEDILEDIVLTLTLFEDREMIEERLKTYAHLFDDKVMKQLKRRRYTGWGRLSRKLINGIRDKQSGKTILDFLKSDGFANRNFMQLIHDDSLTFKEDIQKAQVSGQGDSLHEHIANLAGSPAIKKGILQTVKVVDELVKVMGRHKPENIVIEMARENQTTQKGQKNSRERMKRIEEGIKELGSQILKEHPVENTQLQNEKLYLYYLQNGRDMYVDQELDINRLSDYDVDHIVPQSFLKDDSIDNKVLTRSDKARGKSDNVPSEEVVKKMKNYWRQLLNAKLITQRKFDNLTKAERGGLSELDKAGFIKRQLVETRQITKHVAQILDSRMNTKYDENDKLIREVKVITLKSKLVSDFRKDFQFYKVREINNYHHAHDAYLNAVVGTALIKKYPKLESEFVYGDYKVYDVRKMIAKSEQEIGKATAKYFFYSNIMNFFKTEITLANGEIRKRPLIETNGETGEIVWDKGRDFATVRKVLSMPQVNIVKKTEVQTGGFSKESILPKRNSDKLIARKKDWDPKKYGGFDSPTVAYSVLVVAKVEKGKSKKLKSVKELLGITIMERSSFEKNPIDFLEAKGYKEVKKDLIIKLPKYSLFELENGRKRMLASAGELQKGNELALPSKYVNFLYLASHYEKLKGSPEDNEQKQLFVEQHKHYLDEIIEQISEFSKRVILADANLDKVLSAYNKHRDKPIREQAENIIHLFTLTNLGAPAAFKYFDTTIDRKRYTSTKEVLDATLIHQSITGLYETRIDLSQLGGDGGEAAAKEAAAKEAAAKEAAAKEAAAKEAAAKGGVLNLEEEYRLHEKPVPSSIDPSWLQLFPTVWAERAGMGLANQVPPVVVELRSGASPVAVRQYPMSKEAREGIRPHIQRFLDLGVLVPCQSPWNTPLLPVKKPGTNDYRPVQDLREINKRVQDIHPTVPNPYNLLSSLPPSHTWYSVLDLKDAFFCLKLHPNSQPLFAFEWRDPEKGNTGQLTWTRLPQGFKNSPTLFDEALHRDLAPFRALNPQVVLLQYVDDLLVAAPTYRDCKEGTQKLLQELSKLGYRVSAKKAQLCQKEVTYLGYLLKEGKRWLTPARKATVMKIPPPTTPRQVREFLGTAGFCRLWIPGFASLAAPLYPLTKESIPFIWTEEHQKAFDRIKEALLSAPALALPDLTKPFTLYVDERAGVARGVLTQTLGPWRRPVAYLSKKLDPVASGWPTCLKAVAAVALLLKDADKLTLGQNVTVIASHSLESIVRQPPDRWMTNARMTHYQSLLLNERVSFAPPAVLNPATLLPVESEATPVHRCSEILAEETGTRRDLKDQPLPGVPAWYTDGSSFIAEGKRRAGAAIVDGKRTVWASSLPEGTSAQKAELVALTQALRLAEGKDINIYTDSRYAFATAHIHGAIYKQRGLLTSAGKDIKNKEEILALLEAIHLPKRVAIIHCPGHQKGNDPVATGNRRADEAAKQAALSTRVLAETTKPAGKRTADGSEFEKRTADGSEFESPKKKAKVE

SEQ ID NO: 6468 - protein, 2113 aa, synthetic construct
MPAAKRVKLDGGDKKYSIGLDIGTNSVGWAVITDEYKVPSKKFKVLGNTDRHSIKKNLIGALLFDSGETAEATRLKRTARRRYTRRKNRICYLQEIFSNEMAKVDDSFFHRLEESFLVEEDKKHERHPIFGNIVDEVAYHEKYPTIYHLRKKLVDSTDKADLRLIYLALAHMIKFRGHFLIEGDLNPDNSDVDKLFIQLVQTYNQLFEENPINASGVDAKAILSARLSKSRRLENLIAQLPGEKKNGLFGNLIALSLGLTPNFKSNFDLAEDAKLQLSKDTYDDDLDNLLAQIGDQYADLFLAAKNLSDAILLSDILRVNTEITKAPLSASMIKRYDEHHQDLTLLKALVRQQLPEKYKEIFFDQSKNGYAGYIDGGASQEEFYKFIKPILEKMDGTEELLVKLNREDLLRKQRTFDNGSIPHQIHLGELHAILRRQEDFYPFLKDNREKIEKILTFRIPYYVGPLARGNSRFAWMTRKSEETITPWNFEEVVDKGASAQSFIERMTNFDKNLPNEKVLPKHSLLYEYFTVYNELTKVKYVTEGMRKPAFLSGEQKKAIVDLLFKTNRKVTVKQLKEDYFKKIECFDSVEISGVEDRFNASLGTYHDLLKIIKDKDFLDNEENEDILEDIVLTLTLFEDREMIEERLKTYAHLFDDKVMKQLKRRRYTGWGRLSRKLINGIRDKQSGKTILDFLKSDGFANRNFMQLIHDDSLTFKEDIQKAQVSGQGDSLHEHIANLAGSPAIKKGILQTVKVVDELVKVMGRHKPENIVIEMARENQTTQKGQKNSRERMKRIEEGIKELGSQILKEHPVENTQLQNEKLYLYYLQNGRDMYVDQELDINRLSDYDVDHIVPQSFLKDDSIDNKVLTRSDKARGKSDNVPSEEVVKKMKNYWRQLLNAKLITQRKFDNLTKAERGGLSELDKAGFIKRQLVETRQITKHVAQILDSRMNTKYDENDKLIREVKVITLKSKLVSDFRKDFQFYKVREINNYHHAHDAYLNAVVGTALIKKYPKLESEFVYGDYKVYDVRKMIAKSEQEIGKATAKYFFYSNIMNFFKTEITLANGEIRKRPLIETNGETGEIVWDKGRDFATVRKVLSMPQVNIVKKTEVQTGGFSKESILPKRNSDKLIARKKDWDPKKYGGFDSPTVAYSVLVVAKVEKGKSKKLKSVKELLGITIMERSSFEKNPIDFLEAKGYKEVKKDLIIKLPKYSLFELENGRKRMLASAGELQKGNELALPSKYVNFLYLASHYEKLKGSPEDNEQKQLFVEQHKHYLDEIIEQISEFSKRVILADANLDKVLSAYNKHRDKPIREQAENIIHLFTLTNLGAPAAFKYFDTTIDRKRYTSTKEVLDATLIHQSITGLYETRIDLSQLGGDGGEAAAKEAAAKEAAAKEAAAKEAAAKEAAAKGGVLNLEEEYRLHEKPVPSSIDPSWLQLFPTVWAERAGMGLANQVPPVVVELRSGASPVAVRQYPMSKEAREGIRPHIQRFLDLGVLVPCQSPWNTPLLPVKKPGTNDYRPVQDLREINKRVQDIHPTVPNPYNLLSSLPPSHTWYSVLDLKDAFFCLKLHPNSQPLFAFEWRDPEKGNTGQLTWTRLPQGFKNSPTLFNEALHRDLAPFRALNPQVVLLQYVDDLLVAAPTYRDCKEGTQKLLQELSKLGYRVSAKKAQLCQKEVTYLGYLLKEGKRWLTPARKATVMKIPPPTTPRQVREFLGTAGFCRLWIPGFASLAAPLYPLTKPSIPFIWTEEHQKAFDRIKEALLSAPALALPDLTKPFTLYVDERAGVARGVLTQTLGPWRRPVAYLSKKLDPVASGWPTCLKAVAAVALLLKDADKLTLGQNVTVIASHSLESIVRQPPDRWMTNARMTHYQSLLLNERVSFAPPAVLNPATLLPVESEATPVHRCSEILAEETGTRRDLKDQPLPGVPAWYTDGSSFIAEGKRRAGAAIVDGKRTVWASSLPEGTSAQKAELVALTQALRLAEGKDINIYTDSRYAFATAHIHGAIYKQRGWLTSAGKDIKNKEEILALLEAIHLPKRVAIIHCPGHQKGNDPVATGNRRADEAAKQAALSTRVLAETTKPAGKRTADGSEFEKRTADGSEFESPKKKAKVE

SEQ ID NO: 6469 - protein, 2115 aa, synthetic construct
MPAAKRVKLDGGDKKYSIGLDIGTNSVGWAVITDEYKVPSKKFKVLGNTDRHSIKKNLIGALLFDSGETAEATRLKRTARRRYTRRKNRICYLQEIFSNEMAKVDDSFFHRLEESFLVEEDKKHERHPIFGNIVDEVAYHEKYPTIYHLRKKLVDSTDKADLRLIYLALAHMIKFRGHFLIEGDLNPDNSDVDKLFIQLVQTYNQLFEENPINASGVDAKAILSARLSKSRRLENLIAQLPGEKKNGLFGNLIALSLGLTPNFKSNFDLAEDAKLQLSKDTYDDDLDNLLAQIGDQYADLFLAAKNLSDAILLSDILRVNTEITKAPLSASMIKRYDEHHQDLTLLKALVRQQLPEKYKEIFFDQSKNGYAGYIDGGASQEEFYKFIKPILEKMDGTEELLVKLNREDLLRKQRTFDNGSIPHQIHLGELHAILRRQEDFYPFLKDNREKIEKILTFRIPYYVGPLARGNSRFAWMTRKSEETITPWNFEEVVDKGASAQSFIERMTNFDKNLPNEKVLPKHSLLYEYFTVYNELTKVKYVTEGMRKPAFLSGEQKKAIVDLLFKTNRKVTVKQLKEDYFKKIECFDSVEISGVEDRFNASLGTYHDLLKIIKDKDFLDNEENEDILEDIVLTLTLFEDREMIEERLKTYAHLFDDKVMKQLKRRRYTGWGRLSRKLINGIRDKQSGKTILDFLKSDGFANRNFMQLIHDDSLTFKEDIQKAQVSGQGDSLHEHIANLAGSPAIKKGILQTVKVVDELVKVMGRHKPENIVIEMARENQTTQKGQKNSRERMKRIEEGIKELGSQILKEHPVENTQLQNEKLYLYYLQNGRDMYVDQELDINRLSDYDVDHIVPQSFLKDDSIDNKVLTRSDKARGKSDNVPSEEVVKKMKNYWRQLLNAKLITQRKFDNLTKAERGGLSELDKAGFIKRQLVETRQITKHVAQILDSRMNTKYDENDKLIREVKVITLKSKLVSDFRKDFQFYKVREINNYHHAHDAYLNAVVGTALIKKYPKLESEFVYGDYKVYDVRKMIAKSEQEIGKATAKYFFYSNIMNFFKTEITLANGEIRKRPLIETNGETGEIVWDKGRDFATVRKVLSMPQVNIVKKTEVQTGGFSKESILPKRNSDKLIARKKDWDPKKYGGFDSPTVAYSVLVVAKVEKGKSKKLKSVKELLGITIMERSSFEKNPIDFLEAKGYKEVKKDLIIKLPKYSLFELENGRKRMLASAGELQKGNELALPSKYVNFLYLASHYEKLKGSPEDNEQKQLFVEQHKHYLDEIIEQISEFSKRVILADANLDKVLSAYNKHRDKPIREQAENIIHLFTLTNLGAPAAFKYFDTTIDRKRYTSTKEVLDATLIHQSITGLYETRIDLSQLGGDGGEAAAKEAAAKEAAAKEAAAKEAAAKEAAAKGGTLNIEDEYRLHETSKEPDVPLGSTWLSDFPQAWAETGGMGLAVRQAPLIIPLKATSTPVSIKQYPMSQEARLGIKPHIQRLLDQGILVPCQSPWNTPLLPVKKPGTNDYRPVQDLREVNKRVEDIHPTVPNPYNLLSGLPPSHQWYTVLDLKDAFFCLRLHPTSQPLFAFEWRDPEMGISGQLTWTRLPQGFKNSPTLFDEALHRDLADFRIQHPDLILLQYVDDLLLAATSEQDCQRGTRALLQTLGNLGYRASAKKAQICQKQVKYLGYLLKEGQRWLTEARKETVMGQPTPKTPRQLREFLGTAGFCRLWIPGFAEMAAPLYPLTKTGTLFNWGPDQQKAYQEIKQALLTAPALGLPDLTKPFELFVDEKQGYAKGVLTQKLGPWRRPVAYLSKKLDPVAAGWPPCLRMVAAIAVLTKDAGKLTMGQPLVILAPHAVEALVKQPPDRWLSNARMTHYQAMLLDTDRVQFGPVVALNPATLLPLPEKEAPHDCLEILAETHGTRPDLTDQPIPDADYTWYTDGSSFLQEGQRRAGAAVTTETEVIWARALPAGTSAQRAELIALTQALKMAEGKKLNVYTDSRYAFATAHVHGEIYRRRGLLTSEGREIKNKNEILALLKALFLPKRLSIIHCPGHQKGNSAEARGNRMADQAAREAAMKAVLETSTLLAGKRTADGSEFEKRTADGSEFESPKKKAKVE

SEQ ID NO: 6470 - protein, 2115 aa, synthetic construct
MPAAKRVKLDGGDKKYSIGLDIGTNSVGWAVITDEYKVPSKKFKVLGNTDRHSIKKNLIGALLFDSGETAEATRLKRTARRRYTRRKNRICYLQEIFSNEMAKVDDSFFHRLEESFLVEEDKKHERHPIFGNIVDEVAYHEKYPTIYHLRKKLVDSTDKADLRLIYLALAHMIKFRGHFLIEGDLNPDNSDVDKLFIQLVQTYNQLFEENPINASGVDAKAILSARLSKSRRLENLIAQLPGEKKNGLFGNLIALSLGLTPNFKSNFDLAEDAKLQLSKDTYDDDLDNLLAQIGDQYADLFLAAKNLSDAILLSDILRVNTEITKAPLSASMIKRYDEHHQDLTLLKALVRQQLPEKYKEIFFDQSKNGYAGYIDGGASQEEFYKFIKPILEKMDGTEELLVKLNREDLLRKQRTFDNGSIPHQIHLGELHAILRRQEDFYPFLKDNREKIEKILTFRIPYYVGPLARGNSRFAWMTRKSEETITPWNFEEVVDKGASAQSFIERMTNFDKNLPNEKVLPKHSLLYEYFTVYNELTKVKYVTEGMRKPAFLSGEQKKAIVDLLFKTNRKVTVKQLKEDYFKKIECFDSVEISGVEDRFNASLGTYHDLLKIIKDKDFLDNEENEDILEDIVLTLTLFEDREMIEERLKTYAHLFDDKVMKQLKRRRYTGWGRLSRKLINGIRDKQSGKTILDFLKSDGFANRNFMQLIHDDSLTFKEDIQKAQVSGQGDSLHEHIANLAGSPAIKKGILQTVKVVDELVKVMGRHKPENIVIEMARENQTTQKGQKNSRERMKRIEEGIKELGSQILKEHPVENTQLQNEKLYLYYLQNGRDMYVDQELDINRLSDYDVDHIVPQSFLKDDSIDNKVLTRSDKARGKSDNVPSEEVVKKMKNYWRQLLNAKLITQRKFDNLTKAERGGLSELDKAGFIKRQLVETRQITKHVAQILDSRMNTKYDENDKLIREVKVITLKSKLVSDFRKDFQFYKVREINNYHHAHDAYLNAVVGTALIKKYPKLESEFVYGDYKVYDVRKMIAKSEQEIGKATAKYFFYSNIMNFFKTEITLANGEIRKRPLIETNGETGEIVWDKGRDFATVRKVLSMPQVNIVKKTEVQTGGFSKESILPKRNSDKLIARKKDWDPKKYGGFDSPTVAYSVLVVAKVEKGKSKKLKSVKELLGITIMERSSFEKNPIDFLEAKGYKEVKKDLIIKLPKYSLFELENGRKRMLASAGELQKGNELALPSKYVNFLYLASHYEKLKGSPEDNEQKQLFVEQHKHYLDEIIEQISEFSKRVILADANLDKVLSAYNKHRDKPIREQAENIIHLFTLTNLGAPAAFKYFDTTIDRKRYTSTKEVLDATLIHQSITGLYETRIDLSQLGGDGGEAAAKEAAAKEAAAKEAAAKEAAAKEAAAKGGTLNIEDEYRLHETSKEPDVPLGSTWLSDFPQAWAETGGMGLAVRQAPLIIPLKATSTPVSIKQYPMSQEARLGIKPHIQRLLDQGILVPCQSPWNTPLLPVKKPGTNDYRPVQDLREVNKRVEDIHPTVPNPYNLLSGLPPSHQWYTVLDLKDAFFCLRLHPTSQPLFAFEWRDPEMGISGQLTWTRLPQGFKNSPTLFNEALHRDLADFRIQHPDLILLQYVDDLLLAATSEQDCQRGTRALLQTLGNLGYRASAKKAQICQKQVKYLGYLLKEGQRWLTEARKETVMGQPTPKTPRQLREFLGTAGFCRLWIPGFAEMAAPLYPLTKPGTLFNWGPDQQKAYQEIKQALLTAPALGLPDLTKPFELFVDEKQGYAKGVLTQKLGPWRRPVAYLSKKLDPVAAGWPPCLRMVAAIAVLTKDAGKLTMGQPLVILAPHAVEALVKQPPDRWLSNARMTHYQAMLLDTDRVQFGPVVALNPATLLPLPEKEAPHDCLEILAETHGTRPDLTDQPIPDADYTWYTDGSSFLQEGQRRAGAAVTTETEVIWARALPAGTSAQRAELIALTQALKMAEGKKLNVYTDSRYAFATAHVHGEIYRRRGWLTSEGREIKNKNEILALLKALFLPKRLSIIHCPGHQKGNSAEARGNRMADQAAREAAMKAVLETSTLLAGKRTADGSEFEKRTADGSEFESPKKKAKVE

SEQ ID NO: 6471 - protein, 2094 aa, synthetic construct
MPAAKRVKLDGGDKKYSIGLDIGTNSVGWAVITDEYKVPSKKFKVLGNTDRHSIKKNLIGALLFDSGETAEATRLKRTARRRYTRRKNRICYLQEIFSNEMAKVDDSFFHRLEESFLVEEDKKHERHPIFGNIVDEVAYHEKYPTIYHLRKKLVDSTDKADLRLIYLALAHMIKFRGHFLIEGDLNPDNSDVDKLFIQLVQTYNQLFEENPINASGVDAKAILSARLSKSRRLENLIAQLPGEKKNGLFGNLIALSLGLTPNFKSNFDLAEDAKLQLSKDTYDDDLDNLLAQIGDQYADLFLAAKNLSDAILLSDILRVNTEITKAPLSASMIKRYDEHHQDLTLLKALVRQQLPEKYKEIFFDQSKNGYAGYIDGGASQEEFYKFIKPILEKMDGTEELLVKLNREDLLRKQRTFDNGSIPHQIHLGELHAILRRQEDFYPFLKDNREKIEKILTFRIPYYVGPLARGNSRFAWMTRKSEETITPWNFEEVVDKGASAQSFIERMTNFDKNLPNEKVLPKHSLLYEYFTVYNELTKVKYVTEGMRKPAFLSGEQKKAIVDLLFKTNRKVTVKQLKEDYFKKIECFDSVEISGVEDRFNASLGTYHDLLKIIKDKDFLDNEENEDILEDIVLTLTLFEDREMIEERLKTYAHLFDDKVMKQLKRRRYTGWGRLSRKLINGIRDKQSGKTILDFLKSDGFANRNFMQLIHDDSLTFKEDIQKAQVSGQGDSLHEHIANLAGSPAIKKGILQTVKVVDELVKVMGRHKPENIVIEMARENQTTQKGQKNSRERMKRIEEGIKELGSQILKEHPVENTQLQNEKLYLYYLQNGRDMYVDQELDINRLSDYDVDHIVPQSFLKDDSIDNKVLTRSDKARGKSDNVPSEEVVKKMKNYWRQLLNAKLITQRKFDNLTKAERGGLSELDKAGFIKRQLVETRQITKHVAQILDSRMNTKYDENDKLIREVKVITLKSKLVSDFRKDFQFYKVREINNYHHAHDAYLNAVVGTALIKKYPKLESEFVYGDYKVYDVRKMIAKSEQEIGKATAKYFFYSNIMNFFKTEITLANGEIRKRPLIETNGETGEIVWDKGRDFATVRKVLSMPQVNIVKKTEVQTGGFSKESILPKRNSDKLIARKKDWDPKKYGGFDSPTVAYSVLVVAKVEKGKSKKLKSVKELLGITIMERSSFEKNPIDFLEAKGYKEVKKDLIIKLPKYSLFELENGRKRMLASAGELQKGNELALPSKYVNFLYLASHYEKLKGSPEDNEQKQLFVEQHKHYLDEIIEQISEFSKRVILADANLDKVLSAYNKHRDKPIREQAENIIHLFTLTNLGAPAAFKYFDTTIDRKRYTSTKEVLDATLIHQSITGLYETRIDLSQLGGDGGPAPGGTVSLQDEHRLFDIPVTTSLPDVWLQDFPQAWAETGGLGRAKCQAPIIIDLKPTAVPVSIKQYPMSLEAHMGIRQHIIKFLELGVLRPCRSPWNTPLLPVKKPGTQDYRPVQDLREINKRTVDIHPTVPNPYNLLSTLKPDYSWYTVLDLKDAFFCLPLAPQSQELFAFEWKDPERGISGQLTWTRLPQGFKNSPTLFNEALHRDLTDFRTQHPEVTLLQYVDDLLLAAPTKKACTQGTRHLLQELGEKGYRASAKKAQICQTKVTYLGYILSEGKRWLTPGRIETVARIPPPRNPREVREFLGTAGFCRLWIPGFAELAAPLYALTKPSTPFTWQTEHQLAFEALKKALLSAPALGLPDTSKPFTLFLDERQGIAKGVLTQKLGPWKRPVAYLSKKLDPVAAGWPPCLRIMAATAMLVKDSAKLTLGQPLTVITPHTLEAIVRQPPDRWITNARLTHYQALLLDTDRVQFGPPVTLNPATLLPVPENQPSPHDCRQVLAETHGTREDLKDQELPDADHTWYTDGSSYLDSGTRRAGAAVVDGHNTIWAQSLPPGTSAQKAELIALTKALELSKGKKANIYTDSRYAFATAHTHGSIYERRGWLTSEGKEIKNKAEIIALLKALFLPQEVAIIHCPGHQKGQDPVAVGNRQADRVARQAAMAEVLTLATEPDNTSHITAGKRTADGSEFEKRTADGSEFESPKKKAKVE

SEQ ID NO: 6472 - protein, 2088 aa, synthetic construct
MPAAKRVKLDGGDKKYSIGLDIGTNSVGWAVITDEYKVPSKKFKVLGNTDRHSIKKNLIGALLFDSGETAEATRLKRTARRRYTRRKNRICYLQEIFSNEMAKVDDSFFHRLEESFLVEEDKKHERHPIFGNIVDEVAYHEKYPTIYHLRKKLVDSTDKADLRLIYLALAHMIKFRGHFLIEGDLNPDNSDVDKLFIQLVQTYNQLFEENPINASGVDAKAILSARLSKSRRLENLIAQLPGEKKNGLFGNLIALSLGLTPNFKSNFDLAEDAKLQLSKDTYDDDLDNLLAQIGDQYADLFLAAKNLSDAILLSDILRVNTEITKAPLSASMIKRYDEHHQDLTLLKALVRQQLPEKYKEIFFDQSKNGYAGYIDGGASQEEFYKFIKPILEKMDGTEELLVKLNREDLLRKQRTFDNGSIPHQIHLGELHAILRRQEDFYPFLKDNREKIEKILTFRIPYYVGPLARGNSRFAWMTRKSEETITPWNFEEVVDKGASAQSFIERMTNFDKNLPNEKVLPKHSLLYEYFTVYNELTKVKYVTEGMRKPAFLSGEQKKAIVDLLFKTNRKVTVKQLKEDYFKKIECFDSVEISGVEDRFNASLGTYHDLLKIIKDKDFLDNEENEDILEDIVLTLTLFEDREMIEERLKTYAHLFDDKVMKQLKRRRYTGWGRLSRKLINGIRDKQSGKTILDFLKSDGFANRNFMQLIHDDSLTFKEDIQKAQVSGQGDSLHEHIANLAGSPAIKKGILQTVKVVDELVKVMGRHKPENIVIEMARENQTTQKGQKNSRERMKRIEEGIKELGSQILKEHPVENTQLQNEKLYLYYLQNGRDMYVDQELDINRLSDYDVDHIVPQSFLKDDSIDNKVLTRSDKARGKSDNVPSEEVVKKMKNYWRQLLNAKLITQRKFDNLTKAERGGLSELDKAGFIKRQLVETRQITKHVAQILDSRMNTKYDENDKLIREVKVITLKSKLVSDFRKDFQFYKVREINNYHHAHDAYLNAVVGTALIKKYPKLESEFVYGDYKVYDVRKMIAKSEQEIGKATAKYFFYSNIMNFFKTEITLANGEIRKRPLIETNGETGEIVWDKGRDFATVRKVLSMPQVNIVKKTEVQTGGFSKESILPKRNSDKLIARKKDWDPKKYGGFDSPTVAYSVLVVAKVEKGKSKKLKSVKELLGITIMERSSFEKNPIDFLEAKGYKEVKKDLIIKLPKYSLFELENGRKRMLASAGELQKGNELALPSKYVNFLYLASHYEKLKGSPEDNEQKQLFVEQHKHYLDEIIEQISEFSKRVILADANLDKVLSAYNKHRDKPIREQAENIIHLFTLTNLGAPAAFKYFDTTIDRKRYTSTKEVLDATLIHQSITGLYETRIDLSQLGGDGGPAPGGTLNLEDEYRLYETSAEPEVSPGSTWLSDFPQAWAETGGMGLAVRQAPLIIPLKATSTPVSIKQYPMSQEAKLGIKPHIQRLLDQGILVPCQSPWNTPLLPVKKPGTNDYRPVQDLREVNKRVEDIHPTVPNPYNLLSGLPPSHRWYTVLDLKDAFFCLRLHPTSQPLFAFEWRDPGMGISGQLTWTRLPQGFKNSPTLFNEALHRDLADFRIQHPDLILLQYVDDILLAATSELDCQQGTRALLLTLGNLGYRASAKKAQLCQKQVKYLGYLLKEGQRWLTEARKETVMGQPTPKTPRQLREFLGKAGFCRLFIPGFAEMAAPLYPLTKPGTLFNWGPDQQKAYQEIKQALLTAPALGLPDLTKPFELFVDEKQGYAKGVLTQKLGPWRRPVAYLSKKLDPVAAGWPPCLRMVAAIAVLRKDAGKLTMGQPLVILAPHAVEALVKQPPDRWLSNARMTHYQAMLLDTDRVQFGPVVALNPATLLPLPEEGAPHDCLEILAETHGTRPDLTDQPIPDADHTWYTDGSSFLQEGQRKAGAAVTTETEVIWARALPAGTSAQRAELIALTQALKMAEGKRLNVYTDSRYAFATAHIHGEIYRRRGWLTSEGREIKNKSEILALLKALFLPKRLSIIHCLGHQKGDSAEARGNRLADQAAREAAIKTPPDTSTLLAGKRTADGSEFEKRTADGSEFESPKKKAKVE

SEQ ID NO: 6473 - protein, 2088 aa, synthetic construct
MPAAKRVKLDGGDKKYSIGLDIGTNSVGWAVITDEYKVPSKKFKVLGNTDRHSIKKNLIGALLFDSGETAEATRLKRTARRRYTRRKNRICYLQEIFSNEMAKVDDSFFHRLEESFLVEEDKKHERHPIFGNIVDEVAYHEKYPTIYHLRKKLVDSTDKADLRLIYLALAHMIKFRGHFLIEGDLNPDNSDVDKLFIQLVQTYNQLFEENPINASGVDAKAILSARLSKSRRLENLIAQLPGEKKNGLFGNLIALSLGLTPNFKSNFDLAEDAKLQLSKDTYDDDLDNLLAQIGDQYADLFLAAKNLSDAILLSDILRVNTEITKAPLSASMIKRYDEHHQDLTLLKALVRQQLPEKYKEIFFDQSKNGYAGYIDGGASQEEFYKFIKPILEKMDGTEELLVKLNREDLLRKQRTFDNGSIPHQIHLGELHAILRRQEDFYPFLKDNREKIEKILTFRIPYYVGPLARGNSRFAWMTRKSEETITPWNFEEVVDKGASAQSFIERMTNFDKNLPNEKVLPKHSLLYEYFTVYNELTKVKYVTEGMRKPAFLSGEQKKAIVDLLFKTNRKVTVKQLKEDYFKKIECFDSVEISGVEDRFNASLGTYHDLLKIIKDKDFLDNEENEDILEDIVLTLTLFEDREMIEERLKTYAHLFDDKVMKQLKRRRYTGWGRLSRKLINGIRDKQSGKTILDFLKSDGFANRNFMQLIHDDSLTFKEDIQKAQVSGQGDSLHEHIANLAGSPAIKKGILQTVKVVDELVKVMGRHKPENIVIEMARENQTTQKGQKNSRERMKRIEEGIKELGSQILKEHPVENTQLQNEKLYLYYLQNGRDMYVDQELDINRLSDYDVDHIVPQSFLKDDSIDNKVLTRSDKARGKSDNVPSEEVVKKMKNYWRQLLNAKLITQRKFDNLTKAERGGLSELDKAGFIKRQLVETRQITKHVAQILDSRMNTKYDENDKLIREVKVITLKSKLVSDFRKDFQFYKVREINNYHHAHDAYLNAVVGTALIKKYPKLESEFVYGDYKVYDVRKMIAKSEQEIGKATAKYFFYSNIMNFFKTEITLANGEIRKRPLIETNGETGEIVWDKGRDFATVRKVLSMPQVNIVKKTEVQTGGFSKESILPKRNSDKLIARKKDWDPKKYGGFDSPTVAYSVLVVAKVEKGKSKKLKSVKELLGITIMERSSFEKNPIDFLEAKGYKEVKKDLIIKLPKYSLFELENGRKRMLASAGELQKGNELALPSKYVNFLYLASHYEKLKGSPEDNEQKQLFVEQHKHYLDEIIEQISEFSKRVILADANLDKVLSAYNKHRDKPIREQAENIIHLFTLTNLGAPAAFKYFDTTIDRKRYTSTKEVLDATLIHQSITGLYETRIDLSQLGGDGGPAPGGTLGIEDEYRLHETSTEPDVSLGSTWLSDFPQAWAETGGMGLAVRQAPLIIPLKATSTPVSIQQYPMSHEARLGIKPHIQRLLDQGILVPCQSPWNTPLLPVKKPGTNDYRPVQDLREVNKRVEDIHPTVPNPYNLLSGLPPSHQWYTVLDLKDAFFCLRLHPTSQPLFAFEWRDPGMGISGQLTWTRLPQGFKNSPTLFNEALHRDLADFRIQHPDLILLQYVDDILLAATSELDCQQGTRALLQTLGDLGYRASAKKAQICQKQVKYLGYLLREGQRWLTEARKETVMGQPVPKTPRQLREFLGTAGFCRLWIPGFAEMAAPLYPLTKPGTLFSWGPDQQKAYQEIKQALLTAPALGLPDLTKPFELFVDEKQGYAKGVLTQKLGPWRRPVAYLSKKLDPVAAGWPPCLRMVAAIAVLTKDAGKLTMGQPLVILAPHAVEALVKQPPDRWLSNARMTHYQAMLLDTDRVQFGPVVALNPATLLPLPEEGAPHDCLEILAETHGTRPDLTDQPIPDADHTWYTDGSSFLQEGQRKAGAAVTTETEVIWAGALPAGTSAQRAELIALTQALKMAEGKRLNVYTDSRYAFATAHIHGEIYRRRGWLTSEGREIKNKSEILALLKALFLPKRLSIIHCLGHQKGDSAEARGNRLADQAAREAAIKTPPDTSTLLAGKRTADGSEFEKRTADGSEFESPKKKAKVE

SEQ ID NO: 6474 - protein, 2088 aa, synthetic construct
MPAAKRVKLDGGDKKYSIGLDIGTNSVGWAVITDEYKVPSKKFKVLGNTDRHSIKKNLIGALLFDSGETAEATRLKRTARRRYTRRKNRICYLQEIFSNEMAKVDDSFFHRLEESFLVEEDKKHERHPIFGNIVDEVAYHEKYPTIYHLRKKLVDSTDKADLRLIYLALAHMIKFRGHFLIEGDLNPDNSDVDKLFIQLVQTYNQLFEENPINASGVDAKAILSARLSKSRRLENLIAQLPGEKKNGLFGNLIALSLGLTPNFKSNFDLAEDAKLQLSKDTYDDDLDNLLAQIGDQYADLFLAAKNLSDAILLSDILRVNTEITKAPLSASMIKRYDEHHQDLTLLKALVRQQLPEKYKEIFFDQSKNGYAGYIDGGASQEEFYKFIKPILEKMDGTEELLVKLNREDLLRKQRTFDNGSIPHQIHLGELHAILRRQEDFYPFLKDNREKIEKILTFRIPYYVGPLARGNSRFAWMTRKSEETITPWNFEEVVDKGASAQSFIERMTNFDKNLPNEKVLPKHSLLYEYFTVYNELTKVKYVTEGMRKPAFLSGEQKKAIVDLLFKTNRKVTVKQLKEDYFKKIECFDSVEISGVEDRFNASLGTYHDLLKIIKDKDFLDNEENEDILEDIVLTLTLFEDREMIEERLKTYAHLFDDKVMKQLKRRRYTGWGRLSRKLINGIRDKQSGKTILDFLKSDGFANRNFMQLIHDDSLTFKEDIQKAQVSGQGDSLHEHIANLAGSPAIKKGILQTVKVVDELVKVMGRHKPENIVIEMARENQTTQKGQKNSRERMKRIEEGIKELGSQILKEHPVENTQLQNEKLYLYYLQNGRDMYVDQELDINRLSDYDVDHIVPQSFLKDDSIDNKVLTRSDKARGKSDNVPSEEVVKKMKNYWRQLLNAKLITQRKFDNLTKAERGGLSELDKAGFIKRQLVETRQITKHVAQILDSRMNTKYDENDKLIREVKVITLKSKLVSDFRKDFQFYKVREINNYHHAHDAYLNAVVGTALIKKYPKLESEFVYGDYKVYDVRKMIAKSEQEIGKATAKYFFYSNIMNFFKTEITLANGEIRKRPLIETNGETGEIVWDKGRDFATVRKVLSMPQVNIVKKTEVQTGGFSKESILPKRNSDKLIARKKDWDPKKYGGFDSPTVAYSVLVVAKVEKGKSKKLKSVKELLGITIMERSSFEKNPIDFLEAKGYKEVKKDLIIKLPKYSLFELENGRKRMLASAGELQKGNELALPSKYVNFLYLASHYEKLKGSPEDNEQKQLFVEQHKHYLDEIIEQISEFSKRVILADANLDKVLSAYNKHRDKPIREQAENIIHLFTLTNLGAPAAFKYFDTTIDRKRYTSTKEVLDATLIHQSITGLYETRIDLSQLGGDGGPAPGGTLNIEDEYRLHETSKGPDVPLGSTWLSDFPQAWAETGGMGLAVRQAPLIIPLKATSTPVSIKQYPMSQEARLGIKPHIQRLLDQGILVPCQSPWNTPLLPVKKPGTNDYRPVQDLREVNKRVEDIHPTVPNPYNLLSGLPPSHQWYTVLDLKDAFFCLRLHPTSQSLFAFEWRDPEMGISGQLTWTRLPQGFKNSPTLFDEALHRDLADFRIQHPDLILLQYVDDLLLAATSELDCQQGTRALLQTLGDLGYRASAKKAQICQKQVKYLGYLLKEGQRWLTEARKETVMGQPTPKTPRQLREFLGTAGFCRLWIPGFAEMAAPLYPLTKTGTLFEWGPDQQKAYQEIKQALLTAPALGLPDLTKPFELFVDEKQGYAKGVLTQKLGPWRRPVAYLSKKLDPVAAGWPPCLRMVAAIAVLTKDAGKLTMGQPLVILAPHAVEALVKQPPDRWLSNARMTHYQALLLDTDRVQFGPIVALNPATLLPLPEEGLQHDCLDILAEAHGTRPDLTDQPLPDADHTWYTDGSSFLQEGQRKAGAAVTTETEVVWAKALPAGTSAQRAELIALTQALKMAEGKKLNVYTDSRYAFATAHIHGEIYRRRGLLTSEGKEIKNKDEILALLKALFLPKRLSIIHCPGHQKGNRAEARGNRMADQAAREVATRETPETSTLLAGKRTADGSEFEKRTADGSEFESPKKKAKVE

SEQ ID NO: 6475 - protein, 2088 aa, synthetic construct
MPAAKRVKLDGGDKKYSIGLDIGTNSVGWAVITDEYKVPSKKFKVLGNTDRHSIKKNLIGALLFDSGETAEATRLKRTARRRYTRRKNRICYLQEIFSNEMAKVDDSFFHRLEESFLVEEDKKHERHPIFGNIVDEVAYHEKYPTIYHLRKKLVDSTDKADLRLIYLALAHMIKFRGHFLIEGDLNPDNSDVDKLFIQLVQTYNQLFEENPINASGVDAKAILSARLSKSRRLENLIAQLPGEKKNGLFGNLIALSLGLTPNFKSNFDLAEDAKLQLSKDTYDDDLDNLLAQIGDQYADLFLAAKNLSDAILLSDILRVNTEITKAPLSASMIKRYDEHHQDLTLLKALVRQQLPEKYKEIFFDQSKNGYAGYIDGGASQEEFYKFIKPILEKMDGTEELLVKLNREDLLRKQRTFDNGSIPHQIHLGELHAILRRQEDFYPFLKDNREKIEKILTFRIPYYVGPLARGNSRFAWMTRKSEETITPWNFEEVVDKGASAQSFIERMTNFDKNLPNEKVLPKHSLLYEYFTVYNELTKVKYVTEGMRKPAFLSGEQKKAIVDLLFKTNRKVTVKQLKEDYFKKIECFDSVEISGVEDRFNASLGTYHDLLKIIKDKDFLDNEENEDILEDIVLTLTLFEDREMIEERLKTYAHLFDDKVMKQLKRRRYTGWGRLSRKLINGIRDKQSGKTILDFLKSDGFANRNFMQLIHDDSLTFKEDIQKAQVSGQGDSLHEHIANLAGSPAIKKGILQTVKVVDELVKVMGRHKPENIVIEMARENQTTQKGQKNSRERMKRIEEGIKELGSQILKEHPVENTQLQNEKLYLYYLQNGRDMYVDQELDINRLSDYDVDHIVPQSFLKDDSIDNKVLTRSDKARGKSDNVPSEEVVKKMKNYWRQLLNAKLITQRKFDNLTKAERGGLSELDKAGFIKRQLVETRQITKHVAQILDSRMNTKYDENDKLIREVKVITLKSKLVSDFRKDFQFYKVREINNYHHAHDAYLNAVVGTALIKKYPKLESEFVYGDYKVYDVRKMIAKSEQEIGKATAKYFFYSNIMNFFKTEITLANGEIRKRPLIETNGETGEIVWDKGRDFATVRKVLSMPQVNIVKKTEVQTGGFSKESILPKRNSDKLIARKKDWDPKKYGGFDSPTVAYSVLVVAKVEKGKSKKLKSVKELLGITIMERSSFEKNPIDFLEAKGYKEVKKDLIIKLPKYSLFELENGRKRMLASAGELQKGNELALPSKYVNFLYLASHYEKLKGSPEDNEQKQLFVEQHKHYLDEIIEQISEFSKRVILADANLDKVLSAYNKHRDKPIREQAENIIHLFTLTNLGAPAAFKYFDTTIDRKRYTSTKEVLDATLIHQSITGLYETRIDLSQLGGDGGPAPGGTLNIEDEYRLHEISTEPDVSPGSTWLSDFPQAWAETGGMGLAVRQAPLIIPLKATSTPVSIKQYPMSQEAKLGIKPHIQRLLDQGILVPCQSPWNTPLLPVKKPGTNDYRPVQGLREVNKRVEDIHPTVPNPYNLLSGLPTSHRWYTVLDLKDAFFCLRLHPTSQPLFASEWRDPGMGISGQLTWTRLPQGFKNSPTLFNEALHRGLADFRIQHPDLILLQYVDDLLLAATSELDCQQGTRALLKTLGNLGYRASAKKAQICQKQVKYLGYLLREGQRWLTEARKETVMGQPTPKTPRQLREFLGTAGFCRLWIPRFAEMAAPLYPLTKPGTLFNWGPDQQKAYHEIKQALLTAPALGLPDLTKPFELFVDEKQGYAKGVLTQKLGPWRRPVAYLSKKLDPVAAGWPPCLRMVAAIAVLTKDAGKLTMGQPLVILAPHAVEALVKQPPDRWLSNARMTHYQAMLLDTDRVQFGPVVALNPATLLPLPEEGAPHDCLEILAETHGTEPDLTDQPIPDADHTWYTDGSSFLQEGQRKAGAAVTTETEVIWARALPAGTSAQRAELIALTQALKMAEGKRLNVYTDSRYAFATAHIHGEIYKRRGWLTSEGREIKNKSEILALLKALFLPKRLSIIHCLGHQKGDSAEARGNRLADQAAREAAIKTPPDTSTLLAGKRTADGSEFEKRTADGSEFESPKKKAKVE

SEQ ID NO: 6476 - protein, 2082 aa, synthetic construct
MPAAKRVKLDGGDKKYSIGLDIGTNSVGWAVITDEYKVPSKKFKVLGNTDRHSIKKNLIGALLFDSGETAEATRLKRTARRRYTRRKNRICYLQEIFSNEMAKVDDSFFHRLEESFLVEEDKKHERHPIFGNIVDEVAYHEKYPTIYHLRKKLVDSTDKADLRLIYLALAHMIKFRGHFLIEGDLNPDNSDVDKLFIQLVQTYNQLFEENPINASGVDAKAILSARLSKSRRLENLIAQLPGEKKNGLFGNLIALSLGLTPNFKSNFDLAEDAKLQLSKDTYDDDLDNLLAQIGDQYADLFLAAKNLSDAILLSDILRVNTEITKAPLSASMIKRYDEHHQDLTLLKALVRQQLPEKYKEIFFDQSKNGYAGYIDGGASQEEFYKFIKPILEKMDGTEELLVKLNREDLLRKQRTFDNGSIPHQIHLGELHAILRRQEDFYPFLKDNREKIEKILTFRIPYYVGPLARGNSRFAWMTRKSEETITPWNFEEVVDKGASAQSFIERMTNFDKNLPNEKVLPKHSLLYEYFTVYNELTKVKYVTEGMRKPAFLSGEQKKAIVDLLFKTNRKVTVKQLKEDYFKKIECFDSVEISGVEDRFNASLGTYHDLLKIIKDKDFLDNEENEDILEDIVLTLTLFEDREMIEERLKTYAHLFDDKVMKQLKRRRYTGWGRLSRKLINGIRDKQSGKTILDFLKSDGFANRNFMQLIHDDSLTFKEDIQKAQVSGQGDSLHEHIANLAGSPAIKKGILQTVKVVDELVKVMGRHKPENIVIEMARENQTTQKGQKNSRERMKRIEEGIKELGSQILKEHPVENTQLQNEKLYLYYLQNGRDMYVDQELDINRLSDYDVDHIVPQSFLKDDSIDNKVLTRSDKARGKSDNVPSEEVVKKMKNYWRQLLNAKLITQRKFDNLTKAERGGLSELDKAGFIKRQLVETRQITKHVAQILDSRMNTKYDENDKLIREVKVITLKSKLVSDFRKDFQFYKVREINNYHHAHDAYLNAVVGTALIKKYPKLESEFVYGDYKVYDVRKMIAKSEQEIGKATAKYFFYSNIMNFFKTEITLANGEIRKRPLIETNGETGEIVWDKGRDFATVRKVLSMPQVNIVKKTEVQTGGFSKESILPKRNSDKLIARKKDWDPKKYGGFDSPTVAYSVLVVAKVEKGKSKKLKSVKELLGITIMERSSFEKNPIDFLEAKGYKEVKKDLIIKLPKYSLFELENGRKRMLASAGELQKGNELALPSKYVNFLYLASHYEKLKGSPEDNEQKQLFVEQHKHYLDEIIEQISEFSKRVILADANLDKVLSAYNKHRDKPIREQAENIIHLFTLTNLGAPAAFKYFDTTIDRKRYTSTKEVLDATLIHQSITGLYETRIDLSQLGGDGGPAPGGTLQLDDEYRLYSPLVKPDQNIQFWLEQFPQAWAETAGMGLAKQVPPQVIQLKASATPVSVRQYPLSKEAQEGIRPHVQRLIQQGILVPVQSPWNTPLLPVRKPGTNDYRPVQDLREVNKRVQDIHPTVPNPYNLLCALPPQRSWYTVLDLKDAFFCLRLHPTSQPLFAFEWRDPGTGRTGQLTWTRLPQGFKNSPTIFDEALHRDLANFRIQHPQVTLLQYVDDLLLAGATKQDCLEGTKALLLELSDLGYRASAKKAQICRREVTYLGYSLRDGQRWLTEARKKTVVQIPAPTTAKQVREFLGTAGFCRLWIPGFATLAAPLYPLTKEKGEFSWAPEHQKAFDAIKKALLSAPALALPDVTKPFTLYVDERKGVARGVLTQTLGPWRRPVAYLSKKLDPVASGWPVCLKAIAAVAILVKDADKLTLGQNITVIAPHALENIVRQPPDRWMTNARMTHYQSLLLTERVTFAPPAALNPATLLPEETDEPVTHDCHQLLIEETGVRKDLTDIPLTGEVLTWFTDGSSYVVEGKRMAGAAVVDGTRTIWASSLPEGTSAQKAELMALTQALRLAEGKSINIYTDSRYAFATAHVHGAIYKQRGLLTSAGREIKNKEEILSLLEALHLPKRLAIIHCPGHQKAKDPISRGNQMADRVAKQAAQGVNLLAGKRTADGSEFEKRTADGSEFESPKKKAKVE

SEQ ID NO: 6477 - protein, 2168 aa, synthetic construct
MPAAKRVKLDGGDKKYSIGLDIGTNSVGWAVITDEYKVPSKKFKVLGNTDRHSIKKNLIGALLFDSGETAEATRLKRTARRRYTRRKNRICYLQEIFSNEMAKVDDSFFHRLEESFLVEEDKKHERHPIFGNIVDEVAYHEKYPTIYHLRKKLVDSTDKADLRLIYLALAHMIKFRGHFLIEGDLNPDNSDVDKLFIQLVQTYNQLFEENPINASGVDAKAILSARLSKSRRLENLIAQLPGEKKNGLFGNLIALSLGLTPNFKSNFDLAEDAKLQLSKDTYDDDLDNLLAQIGDQYADLFLAAKNLSDAILLSDILRVNTEITKAPLSASMIKRYDEHHQDLTLLKALVRQQLPEKYKEIFFDQSKNGYAGYIDGGASQEEFYKFIKPILEKMDGTEELLVKLNREDLLRKQRTFDNGSIPHQIHLGELHAILRRQEDFYPFLKDNREKIEKILTFRIPYYVGPLARGNSRFAWMTRKSEETITPWNFEEVVDKGASAQSFIERMTNFDKNLPNEKVLPKHSLLYEYFTVYNELTKVKYVTEGMRKPAFLSGEQKKAIVDLLFKTNRKVTVKQLKEDYFKKIECFDSVEISGVEDRFNASLGTYHDLLKIIKDKDFLDNEENEDILEDIVLTLTLFEDREMIEERLKTYAHLFDDKVMKQLKRRRYTGWGRLSRKLINGIRDKQSGKTILDFLKSDGFANRNFMQLIHDDSLTFKEDIQKAQVSGQGDSLHEHIANLAGSPAIKKGILQTVKVVDELVKVMGRHKPENIVIEMARENQTTQKGQKNSRERMKRIEEGIKELGSQILKEHPVENTQLQNEKLYLYYLQNGRDMYVDQELDINRLSDYDVDHIVPQSFLKDDSIDNKVLTRSDKARGKSDNVPSEEVVKKMKNYWRQLLNAKLITQRKFDNLTKAERGGLSELDKAGFIKRQLVETRQITKHVAQILDSRMNTKYDENDKLIREVKVITLKSKLVSDFRKDFQFYKVREINNYHHAHDAYLNAVVGTALIKKYPKLESEFVYGDYKVYDVRKMIAKSEQEIGKATAKYFFYSNIMNFFKTEITLANGEIRKRPLIETNGETGEIVWDKGRDFATVRKVLSMPQVNIVKKTEVQTGGFSKESILPKRNSDKLIARKKDWDPKKYGGFDSPTVAYSVLVVAKVEKGKSKKLKSVKELLGITIMERSSFEKNPIDFLEAKGYKEVKKDLIIKLPKYSLFELENGRKRMLASAGELQKGNELALPSKYVNFLYLASHYEKLKGSPEDNEQKQLFVEQHKHYLDEIIEQISEFSKRVILADANLDKVLSAYNKHRDKPIREQAENIIHLFTLTNLGAPAAFKYFDTTIDRKRYTSTKEVLDATLIHQSITGLYETRIDLSQLGGDGGPAPGGMDPLQLLQPLEAEIKGTKLKAHWNSGATITCVPQAFLEEEVPIKNIWIKTIHGEKEQPVYYLTFKIQGRKVEAEVISSPYDYILVSPSDIPWLMKKPLQLTTLVPLQEYEERLLKQTMLTGSYKEKLQSLFLKYDALWQHWENQVGHRRIKPHHIATGTVNPRPQKQYPINPKAKASIQTVINDLLKQGVLIQQNSIMNTPVYPVPKPDGKWRMVLDYREVNKTIPLIAAQNQHSAGILSSIFRGKYKTTLDLSNGFWAHSITPESYWLTAFTWLGQQYCWTRLPQGFLNSPALFNADVVDLLKEVPNVQVYVDDIYISHDDPREHLEQLEKVFSLLLNAGYVVSLKKSEIAQHEVEFLGFNITKEGRGLTETFKQKLLNITPPRDLKQLQSILGKLNFARNFIPNFSELVKPLYNIIATAPGKYITWTTDNSQQLQNIISMLNSAENLEERNPEVRLIMKVNTSPSAGYIRFYNEFAKRPIMYLNYVYTKAEVKFTNTEKLLTTIHKGLIKALDLGMGQEILVYSPIVSMTKIQKTPLPERKALPIRWITWMSYLEDPRIQFHYDKTLPELQQVPTVTDDIIAKIKHPSEFSMVFYTDGSAIKHPNVNKSHNAGMGIAQVQFKPEFTVINTWSIPLGDHTAQLAEVAAVEFACKKALKIDGPVLIVTDSFYVAESVNKELPYWQSNGFFNNKKKPLKHVSKWKSIADCIQLKPDIIIIHEKGHQPTASTFHTEGNNLADKLATQGSYVVNAGKRTADGSEFEKRTADGSEFESPKKKAKVE

SEQ ID NO: 6478 - protein, 2086 aa, synthetic construct
MPAAKRVKLDGGDKKYSIGLDIGTNSVGWAVITDEYKVPSKKFKVLGNTDRHSIKKNLIGALLFDSGETAEATRLKRTARRRYTRRKNRICYLQEIFSNEMAKVDDSFFHRLEESFLVEEDKKHERHPIFGNIVDEVAYHEKYPTIYHLRKKLVDSTDKADLRLIYLALAHMIKFRGHFLIEGDLNPDNSDVDKLFIQLVQTYNQLFEENPINASGVDAKAILSARLSKSRRLENLIAQLPGEKKNGLFGNLIALSLGLTPNFKSNFDLAEDAKLQLSKDTYDDDLDNLLAQIGDQYADLFLAAKNLSDAILLSDILRVNTEITKAPLSASMIKRYDEHHQDLTLLKALVRQQLPEKYKEIFFDQSKNGYAGYIDGGASQEEFYKFIKPILEKMDGTEELLVKLNREDLLRKQRTFDNGSIPHQIHLGELHAILRRQEDFYPFLKDNREKIEKILTFRIPYYVGPLARGNSRFAWMTRKSEETITPWNFEEVVDKGASAQSFIERMTNFDKNLPNEKVLPKHSLLYEYFTVYNELTKVKYVTEGMRKPAFLSGEQKKAIVDLLFKTNRKVTVKQLKEDYFKKIECFDSVEISGVEDRFNASLGTYHDLLKIIKDKDFLDNEENEDILEDIVLTLTLFEDREMIEERLKTYAHLFDDKVMKQLKRRRYTGWGRLSRKLINGIRDKQSGKTILDFLKSDGFANRNFMQLIHDDSLTFKEDIQKAQVSGQGDSLHEHIANLAGSPAIKKGILQTVKVVDELVKVMGRHKPENIVIEMARENQTTQKGQKNSRERMKRIEEGIKELGSQILKEHPVENTQLQNEKLYLYYLQNGRDMYVDQELDINRLSDYDVDHIVPQSFLKDDSIDNKVLTRSDKARGKSDNVPSEEVVKKMKNYWRQLLNAKLITQRKFDNLTKAERGGLSELDKAGFIKRQLVETRQITKHVAQILDSRMNTKYDENDKLIREVKVITLKSKLVSDFRKDFQFYKVREINNYHHAHDAYLNAVVGTALIKKYPKLESEFVYGDYKVYDVRKMIAKSEQEIGKATAKYFFYSNIMNFFKTEITLANGEIRKRPLIETNGETGEIVWDKGRDFATVRKVLSMPQVNIVKKTEVQTGGFSKESILPKRNSDKLIARKKDWDPKKYGGFDSPTVAYSVLVVAKVEKGKSKKLKSVKELLGITIMERSSFEKNPIDFLEAKGYKEVKKDLIIKLPKYSLFELENGRKRMLASAGELQKGNELALPSKYVNFLYLASHYEKLKGSPEDNEQKQLFVEQHKHYLDEIIEQISEFSKRVILADANLDKVLSAYNKHRDKPIREQAENIIHLFTLTNLGAPAAFKYFDTTIDRKRYTSTKEVLDATLIHQSITGLYETRIDLSQLGGDGGPAPGGVLNLEEEYRLHEKPVPSSIDPSWLQLFPTVWAERAGMGLANQVPPVVVELRSGASPVAVRQYPMSKEAREGIRPHIQRFLDLGVLVPCQSPWNTPLLPVKKPGTNDYRPVQDLREINKRVQDIHPTVPNPYNLLSSLPPSHTWYSVLDLKDAFFCLKLHPNSQPLFAFEWRDPEKGNTGQLTWTRLPQGFKNSPTLFNEALHRDLAPFRALNPQVVLLQYVDDLLVAAPTYRDCKEGTQKLLQELSKLGYRVSAKKAQLCQKEVTYLGYLLKEGKRWLTPARKATVMKIPPPTTPRQVREFLGTAGFCRLWIPGFASLAAPLYPLTKPSIPFIWTEEHQKAFDRIKEALLSAPALALPDLTKPFTLYVDERAGVARGVLTQTLGPWRRPVAYLSKKLDPVASGWPTCLKAVAAVALLLKDADKLTLGQNVTVIASHSLESIVRQPPDRWMTNARMTHYQSLLLNERVSFAPPAVLNPATLLPVESEATPVHRCSEILAEETGTRRDLKDQPLPGVPAWYTDGSSFIAEGKRRAGAAIVDGKRTVWASSLPEGTSAQKAELVALTQALRLAEGKDINIYTDSRYAFATAHIHGAIYKQRGWLTSAGKDIKNKEEILALLEAIHLPKRVAIIHCPGHQKGNDPVATGNRRADEAAKQAALSTRVLAETTKPAGKRTADGSEFEKRTADGSEFESPKKKAKVE

SEQ ID NO: 6479 - protein, 2086 aa, synthetic construct
MPAAKRVKLDGGDKKYSIGLDIGTNSVGWAVITDEYKVPSKKFKVLGNTDRHSIKKNLIGALLFDSGETAEATRLKRTARRRYTRRKNRICYLQEIFSNEMAKVDDSFFHRLEESFLVEEDKKHERHPIFGNIVDEVAYHEKYPTIYHLRKKLVDSTDKADLRLIYLALAHMIKFRGHFLIEGDLNPDNSDVDKLFIQLVQTYNQLFEENPINASGVDAKAILSARLSKSRRLENLIAQLPGEKKNGLFGNLIALSLGLTPNFKSNFDLAEDAKLQLSKDTYDDDLDNLLAQIGDQYADLFLAAKNLSDAILLSDILRVNTEITKAPLSASMIKRYDEHHQDLTLLKALVRQQLPEKYKEIFFDQSKNGYAGYIDGGASQEEFYKFIKPILEKMDGTEELLVKLNREDLLRKQRTFDNGSIPHQIHLGELHAILRRQEDFYPFLKDNREKIEKILTFRIPYYVGPLARGNSRFAWMTRKSEETITPWNFEEVVDKGASAQSFIERMTNFDKNLPNEKVLPKHSLLYEYFTVYNELTKVKYVTEGMRKPAFLSGEQKKAIVDLLFKTNRKVTVKQLKEDYFKKIECFDSVEISGVEDRFNASLGTYHDLLKIIKDKDFLDNEENEDILEDIVLTLTLFEDREMIEERLKTYAHLFDDKVMKQLKRRRYTGWGRLSRKLINGIRDKQSGKTILDFLKSDGFANRNFMQLIHDDSLTFKEDIQKAQVSGQGDSLHEHIANLAGSPAIKKGILQTVKVVDELVKVMGRHKPENIVIEMARENQTTQKGQKNSRERMKRIEEGIKELGSQILKEHPVENTQLQNEKLYLYYLQNGRDMYVDQELDINRLSDYDVDHIVPQSFLKDDSIDNKVLTRSDKARGKSDNVPSEEVVKKMKNYWRQLLNAKLITQRKFDNLTKAERGGLSELDKAGFIKRQLVETRQITKHVAQILDSRMNTKYDENDKLIREVKVITLKSKLVSDFRKDFQFYKVREINNYHHAHDAYLNAVVGTALIKKYPKLESEFVYGDYKVYDVRKMIAKSEQEIGKATAKYFFYSNIMNFFKTEITLANGEIRKRPLIETNGETGEIVWDKGRDFATVRKVLSMPQVNIVKKTEVQTGGFSKESILPKRNSDKLIARKKDWDPKKYGGFDSPTVAYSVLVVAKVEKGKSKKLKSVKELLGITIMERSSFEKNPIDFLEAKGYKEVKKDLIIKLPKYSLFELENGRKRMLASAGELQKGNELALPSKYVNFLYLASHYEKLKGSPEDNEQKQLFVEQHKHYLDEIIEQISEFSKRVILADANLDKVLSAYNKHRDKPIREQAENIIHLFTLTNLGAPAAFKYFDTTIDRKRYTSTKEVLDATLIHQSITGLYETRIDLSQLGGDGGPAPGGVLNLEEEYRLHEKPVPSSIDPSWLQLFPTVWAERAGMGLANQVPPVVVELRSGASPVAVRQYPMSKEAREGIRPHIQRFLDLGVLVPCQSPWNTPLLPVKKPGTNDYRPVQDLREINKRVQDIHPTVPNPYNLLSSLPPSHTWYSVLDLKDAFFCLKLHPNSQPLFAFEWRDPEKGNTGQLTWTRLPQGFKNSPTLFNEALHRDLAPFRALNPQVVLLQYVDDLLVAAPTYRDCKEGTQKLLQELSKLGYRVSAKKAQLCQKEVTYLGYLLKEGKRWLTPARKATVMKIPPPTTPRQVREFLGKAGFCRLFIPGFASLAAPLYPLTKPSIPFIWTEEHQKAFDRIKEALLSAPALALPDLTKPFTLYVDERAGVARGVLTQTLGPWRRPVAYLSKKLDPVASGWPTCLKAVAAVALLLKDADKLTLGQNVTVIASHSLESIVRQPPDRWMTNARMTHYQSLLLNERVSFAPPAVLNPATLLPVESEATPVHRCSEILAEETGTRRDLKDQPLPGVPAWYTDGSSFIAEGKRRAGAAIVDGKRTVWASSLPEGTSAQKAELVALTQALRLAEGKDINIYTDSRYAFATAHIHGAIYKQRGWLTSAGKDIKNKEEILALLEAIHLPKRVAIIHCPGHQKGNDPVATGNRRADEAAKQAALSTRVLAETTKPAGKRTADGSEFEKRTADGSEFESPKKKAKVE

SEQ ID NO: 6480 - protein, 2088 aa, synthetic construct
MPAAKRVKLDGGDKKYSIGLDIGTNSVGWAVITDEYKVPSKKFKVLGNTDRHSIKKNLIGALLFDSGETAEATRLKRTARRRYTRRKNRICYLQEIFSNEMAKVDDSFFHRLEESFLVEEDKKHERHPIFGNIVDEVAYHEKYPTIYHLRKKLVDSTDKADLRLIYLALAHMIKFRGHFLIEGDLNPDNSDVDKLFIQLVQTYNQLFEENPINASGVDAKAILSARLSKSRRLENLIAQLPGEKKNGLFGNLIALSLGLTPNFKSNFDLAEDAKLQLSKDTYDDDLDNLLAQIGDQYADLFLAAKNLSDAILLSDILRVNTEITKAPLSASMIKRYDEHHQDLTLLKALVRQQLPEKYKEIFFDQSKNGYAGYIDGGASQEEFYKFIKPILEKMDGTEELLVKLNREDLLRKQRTFDNGSIPHQIHLGELHAILRRQEDFYPFLKDNREKIEKILTFRIPYYVGPLARGNSRFAWMTRKSEETITPWNFEEVVDKGASAQSFIERMTNFDKNLPNEKVLPKHSLLYEYFTVYNELTKVKYVTEGMRKPAFLSGEQKKAIVDLLFKTNRKVTVKQLKEDYFKKIECFDSVEISGVEDRFNASLGTYHDLLKIIKDKDFLDNEENEDILEDIVLTLTLFEDREMIEERLKTYAHLFDDKVMKQLKRRRYTGWGRLSRKLINGIRDKQSGKTILDFLKSDGFANRNFMQLIHDDSLTFKEDIQKAQVSGQGDSLHEHIANLAGSPAIKKGILQTVKVVDELVKVMGRHKPENIVIEMARENQTTQKGQKNSRERMKRIEEGIKELGSQILKEHPVENTQLQNEKLYLYYLQNGRDMYVDQELDINRLSDYDVDHIVPQSFLKDDSIDNKVLTRSDKARGKSDNVPSEEVVKKMKNYWRQLLNAKLITQRKFDNLTKAERGGLSELDKAGFIKRQLVETRQITKHVAQILDSRMNTKYDENDKLIREVKVITLKSKLVSDFRKDFQFYKVREINNYHHAHDAYLNAVVGTALIKKYPKLESEFVYGDYKVYDVRKMIAKSEQEIGKATAKYFFYSNIMNFFKTEITLANGEIRKRPLIETNGETGEIVWDKGRDFATVRKVLSMPQVNIVKKTEVQTGGFSKESILPKRNSDKLIARKKDWDPKKYGGFDSPTVAYSVLVVAKVEKGKSKKLKSVKELLGITIMERSSFEKNPIDFLEAKGYKEVKKDLIIKLPKYSLFELENGRKRMLASAGELQKGNELALPSKYVNFLYLASHYEKLKGSPEDNEQKQLFVEQHKHYLDEIIEQISEFSKRVILADANLDKVLSAYNKHRDKPIREQAENIIHLFTLTNLGAPAAFKYFDTTIDRKRYTSTKEVLDATLIHQSITGLYETRIDLSQLGGDGGPAPGGTLNIEDEYRLHETSKEPDVPLGSTWLSDFPQAWAETGGMGLAVRQAPLIIPLKATSTPVSIKQYPMSQEARLGIKPHIQRLLDQGILVPCQSPWNTPLLPVKKPGTNDYRPVQDLREVNKRVEDIHPTVPNPYNLLSGLPPSHQWYTVLDLKDAFFCLRLHPTSQPLFAFEWRDPEMGISGQLTWTRLPQGFKNSPTLFNEALHRDLADFRIQHPDLILLQYVDDLLLAATSEQDCQRGTRALLQTLGNLGYRASAKKAQICQKQVKYLGYLLKEGQRWLTEARKETVMGQPTPKTPRQLREFLGKAGFCRLFIPGFAEMAAPLYPLTKPGTLFNWGPDQQKAYQEIKQALLTAPALGLPDLTKPFELFVDEKQGYAKGVLTQKLGPWRRPVAYLSKKLDPVAAGWPPCLRMVAAIAVLTKDAGKLTMGQPLVILAPHAVEALVKQPPDRWLSNARMTHYQAMLLDTDRVQFGPVVALNPATLLPLPEKEAPHDCLEILAETHGTRPDLTDQPIPDADYTWYTDGSSFLQEGQRRAGAAVTTETEVIWARALPAGTSAQRAELIALTQALKMAEGKKLNVYTDSRYAFATAHVHGEIYRRRGWLTSEGREIKNKNEILALLKALFLPKRLSIIHCPGHQKGNSAEARGNRMADQAAREAAMKAVLETSTLLAGKRTADGSEFEKRTADGSEFESPKKKAKVE

SEQ ID NO: 6481 - protein, 2167 aa, synthetic construct
MPAAKRVKLDGGDKKYSIGLDIGTNSVGWAVITDEYKVPSKKFKVLGNTDRHSIKKNLIGALLFDSGETAEATRLKRTARRRYTRRKNRICYLQEIFSNEMAKVDDSFFHRLEESFLVEEDKKHERHPIFGNIVDEVAYHEKYPTIYHLRKKLVDSTDKADLRLIYLALAHMIKFRGHFLIEGDLNPDNSDVDKLFIQLVQTYNQLFEENPINASGVDAKAILSARLSKSRRLENLIAQLPGEKKNGLFGNLIALSLGLTPNFKSNFDLAEDAKLQLSKDTYDDDLDNLLAQIGDQYADLFLAAKNLSDAILLSDILRVNTEITKAPLSASMIKRYDEHHQDLTLLKALVRQQLPEKYKEIFFDQSKNGYAGYIDGGASQEEFYKFIKPILEKMDGTEELLVKLNREDLLRKQRTFDNGSIPHQIHLGELHAILRRQEDFYPFLKDNREKIEKILTFRIPYYVGPLARGNSRFAWMTRKSEETITPWNFEEVVDKGASAQSFIERMTNFDKNLPNEKVLPKHSLLYEYFTVYNELTKVKYVTEGMRKPAFLSGEQKKAIVDLLFKTNRKVTVKQLKEDYFKKIECFDSVEISGVEDRFNASLGTYHDLLKIIKDKDFLDNEENEDILEDIVLTLTLFEDREMIEERLKTYAHLFDDKVMKQLKRRRYTGWGRLSRKLINGIRDKQSGKTILDFLKSDGFANRNFMQLIHDDSLTFKEDIQKAQVSGQGDSLHEHIANLAGSPAIKKGILQTVKVVDELVKVMGRHKPENIVIEMARENQTTQKGQKNSRERMKRIEEGIKELGSQILKEHPVENTQLQNEKLYLYYLQNGRDMYVDQELDINRLSDYDVDHIVPQSFLKDDSIDNKVLTRSDKARGKSDNVPSEEVVKKMKNYWRQLLNAKLITQRKFDNLTKAERGGLSELDKAGFIKRQLVETRQITKHVAQILDSRMNTKYDENDKLIREVKVITLKSKLVSDFRKDFQFYKVREINNYHHAHDAYLNAVVGTALIKKYPKLESEFVYGDYKVYDVRKMIAKSEQEIGKATAKYFFYSNIMNFFKTEITLANGEIRKRPLIETNGETGEIVWDKGRDFATVRKVLSMPQVNIVKKTEVQTGGFSKESILPKRNSDKLIARKKDWDPKKYGGFDSPTVAYSVLVVAKVEKGKSKKLKSVKELLGITIMERSSFEKNPIDFLEAKGYKEVKKDLIIKLPKYSLFELENGRKRMLASAGELQKGNELALPSKYVNFLYLASHYEKLKGSPEDNEQKQLFVEQHKHYLDEIIEQISEFSKRVILADANLDKVLSAYNKHRDKPIREQAENIIHLFTLTNLGAPAAFKYFDTTIDRKRYTSTKEVLDATLIHQSITGLYETRIDLSQLGGDGGPAPAPGGMDLLKPLTVERKGVKIKGYWNSQADITCVPKDLLQGEEPVRQQNVTTIHGTQEGDVYYVNLKIDGRRINTEVIGTTLDYAIITPGDVPWILKKPLELTIKLDLEEQQGTLLNNSILSKKGKEELKQLFEKYSALWQSWENQVGHRRIRPHKIATGTVKPTPQKQYHINPKAKPDIQIVINDLLKQGVLIQKESTMNTPVYPVPKPNGRWRMVLDYRAVNKVTPLIAVQNQHSYGILGSLFKGRYKTTIDLSNGFWAHPIVPEDYWITAFTWQGKQYCWTVLPQGFLNSPGLFNGDVVDLLQGIPNVEVYVDDVYISHDSEKEHLEYLDILFNRLKEAGYIISLKKSNIANSIVDFLGFQITNEGRGLTDTFKEKLENITAPTTLKQLQSILGLLNFARNFIPDFTELIAPLYALIPKSPKNYVPWQIEHSTTLETLITKLNGAEYLQGRKGDKTLIMKVNASYTTGYIRYYNEGEKKPISYVSIVFSKTELKFTELEKLLTTVHKGLLKALDLSMGQNIHVYSPIVSMQNIQKTPQTAKKALASRWLSWLSYLEDPRIRFFYDPQMPALKDLPAVDTGKDNKKHPSNFQHIFYTDGSAITSPTKEGHLNAGMGIVYFINKDGNLQKQQEWSISLGNHTAQFAEIAAFEFALKKCLPLGGNILVVTDSNYVAKAYNEELDVWASNGFVNNRKKPLKHISKWKSVADLKRLRPDVVVTHEPGHQKLDSSPHAYGNNLADQLATQASFKVHAGKRTADGSEFEKRTADGSEFESPKKKAKVE

SEQ ID NO: 6482 - protein, 2089 aa, synthetic construct
MPAAKRVKLDGGDKKYSIGLDIGTNSVGWAVITDEYKVPSKKFKVLGNTDRHSIKKNLIGALLFDSGETAEATRLKRTARRRYTRRKNRICYLQEIFSNEMAKVDDSFFHRLEESFLVEEDKKHERHPIFGNIVDEVAYHEKYPTIYHLRKKLVDSTDKADLRLIYLALAHMIKFRGHFLIEGDLNPDNSDVDKLFIQLVQTYNQLFEENPINASGVDAKAILSARLSKSRRLENLIAQLPGEKKNGLFGNLIALSLGLTPNFKSNFDLAEDAKLQLSKDTYDDDLDNLLAQIGDQYADLFLAAKNLSDAILLSDILRVNTEITKAPLSASMIKRYDEHHQDLTLLKALVRQQLPEKYKEIFFDQSKNGYAGYIDGGASQEEFYKFIKPILEKMDGTEELLVKLNREDLLRKQRTFDNGSIPHQIHLGELHAILRRQEDFYPFLKDNREKIEKILTFRIPYYVGPLARGNSRFAWMTRKSEETITPWNFEEVVDKGASAQSFIERMTNFDKNLPNEKVLPKHSLLYEYFTVYNELTKVKYVTEGMRKPAFLSGEQKKAIVDLLFKTNRKVTVKQLKEDYFKKIECFDSVEISGVEDRFNASLGTYHDLLKIIKDKDFLDNEENEDILEDIVLTLTLFEDREMIEERLKTYAHLFDDKVMKQLKRRRYTGWGRLSRKLINGIRDKQSGKTILDFLKSDGFANRNFMQLIHDDSLTFKEDIQKAQVSGQGDSLHEHIANLAGSPAIKKGILQTVKVVDELVKVMGRHKPENIVIEMARENQTTQKGQKNSRERMKRIEEGIKELGSQILKEHPVENTQLQNEKLYLYYLQNGRDMYVDQELDINRLSDYDVDHIVPQSFLKDDSIDNKVLTRSDKARGKSDNVPSEEVVKKMKNYWRQLLNAKLITQRKFDNLTKAERGGLSELDKAGFIKRQLVETRQITKHVAQILDSRMNTKYDENDKLIREVKVITLKSKLVSDFRKDFQFYKVREINNYHHAHDAYLNAVVGTALIKKYPKLESEFVYGDYKVYDVRKMIAKSEQEIGKATAKYFFYSNIMNFFKTEITLANGEIRKRPLIETNGETGEIVWDKGRDFATVRKVLSMPQVNIVKKTEVQTGGFSKESILPKRNSDKLIARKKDWDPKKYGGFDSPTVAYSVLVVAKVEKGKSKKLKSVKELLGITIMERSSFEKNPIDFLEAKGYKEVKKDLIIKLPKYSLFELENGRKRMLASAGELQKGNELALPSKYVNFLYLASHYEKLKGSPEDNEQKQLFVEQHKHYLDEIIEQISEFSKRVILADANLDKVLSAYNKHRDKPIREQAENIIHLFTLTNLGAPAAFKYFDTTIDRKRYTSTKEVLDATLIHQSITGLYETRIDLSQLGGDGGPAPAPGGTLQLEEEYRLFEPESTQKQEMDIWLKNFPQAWAETGGMGTAHCQAPVLIQLKATATPISIRQYPMPHEAYQGIKPHIRRMLDQGILKPCQSPWNTPLLPVKKPGTEDYRPVQDLREVNKRVEDIHPTVPNPYNLLSTLPPSHPWYTVLDLKDAFFCLRLHSESQLLFAFEWRDPEIGLSGQLTWTRLPQGFKNSPTLFNEALHSDLADFRVRYPALVLLQYVDDLLLAAATRTECLEGTKALLETLGNKGYRASAKKAQICLQEVTYLGYSLKDGQRWLTKARKEAILSIPVPKNSRQVREFLGTAGYCRLWIPGFAELAAPLYPLTRPGTLFQWGTEQQLAFEDIKKALLSSPALGLPDITKPFELFIDENSGFAKGVLVQKLGPWKRPVAYLSKKLDTVASGWPPCLRMVAAIAILVKDAGKLTLGQPLTILTSHPVEALVRQPPNKWLSNARMTHYQAMLLDAERVHFGPTVSLNPATLLPLPSGGNHHDCLQILAETHGTRPDLTDQPLPDADLTWYTDGSSFIRNGEREAGAAVTTESEVIWAAPLPPGTSAQRAELIALTQALKMAEGKKLTVYTDSRYAFATTHVHGEIYRRRGWLTSEGKEIKNKNEILALLEALFLPKRLSIIHCPGHQKGDSPQAKGNRLADDTAKKAATETHSSLTVLPAGKRTADGSEFEKRTADGSEFESPKKKAKVE

SEQ ID NO: 6483 - protein, 2003 aa, synthetic construct
MPAAKRVKLDGGDKKYSIGLDIGTNSVGWAVITDEYKVPSKKFKVLGNTDRHSIKKNLIGALLFDSGETAEATRLKRTARRRYTRRKNRICYLQEIFSNEMAKVDDSFFHRLEESFLVEEDKKHERHPIFGNIVDEVAYHEKYPTIYHLRKKLVDSTDKADLRLIYLALAHMIKFRGHFLIEGDLNPDNSDVDKLFIQLVQTYNQLFEENPINASGVDAKAILSARLSKSRRLENLIAQLPGEKKNGLFGNLIALSLGLTPNFKSNFDLAEDAKLQLSKDTYDDDLDNLLAQIGDQYADLFLAAKNLSDAILLSDILRVNTEITKAPLSASMIKRYDEHHQDLTLLKALVRQQLPEKYKEIFFDQSKNGYAGYIDGGASQEEFYKFIKPILEKMDGTEELLVKLNREDLLRKQRTFDNGSIPHQIHLGELHAILRRQEDFYPFLKDNREKIEKILTFRIPYYVGPLARGNSRFAWMTRKSEETITPWNFEEVVDKGASAQSFIERMTNFDKNLPNEKVLPKHSLLYEYFTVYNELTKVKYVTEGMRKPAFLSGEQKKAIVDLLFKTNRKVTVKQLKEDYFKKIECFDSVEISGVEDRFNASLGTYHDLLKIIKDKDFLDNEENEDILEDIVLTLTLFEDREMIEERLKTYAHLFDDKVMKQLKRRRYTGWGRLSRKLINGIRDKQSGKTILDFLKSDGFANRNFMQLIHDDSLTFKEDIQKAQVSGQGDSLHEHIANLAGSPAIKKGILQTVKVVDELVKVMGRHKPENIVIEMARENQTTQKGQKNSRERMKRIEEGIKELGSQILKEHPVENTQLQNEKLYLYYLQNGRDMYVDQELDINRLSDYDVDHIVPQSFLKDDSIDNKVLTRSDKARGKSDNVPSEEVVKKMKNYWRQLLNAKLITQRKFDNLTKAERGGLSELDKAGFIKRQLVETRQITKHVAQILDSRMNTKYDENDKLIREVKVITLKSKLVSDFRKDFQFYKVREINNYHHAHDAYLNAVVGTALIKKYPKLESEFVYGDYKVYDVRKMIAKSEQEIGKATAKYFFYSNIMNFFKTEITLANGEIRKRPLIETNGETGEIVWDKGRDFATVRKVLSMPQVNIVKKTEVQTGGFSKESILPKRNSDKLIARKKDWDPKKYGGFDSPTVAYSVLVVAKVEKGKSKKLKSVKELLGITIMERSSFEKNPIDFLEAKGYKEVKKDLIIKLPKYSLFELENGRKRMLASAGELQKGNELALPSKYVNFLYLASHYEKLKGSPEDNEQKQLFVEQHKHYLDEIIEQISEFSKRVILADANLDKVLSAYNKHRDKPIREQAENIIHLFTLTNLGAPAAFKYFDTTIDRKRYTSTKEVLDATLIHQSITGLYETRIDLSQLGGDGGPAPAPGGGLEHLPPPPEVSQFPLNPERLQALTDLVSRALEAKHIEPYQGPGNNPIFPVKKPNGKWRFIHDLRATNSLTRDLASPSPGPPDLTSLPQDLPHLRTIDLTDAFFQIPLPAVFQPYFAFTLPQPNNHGPGTRYSWRVLPQGFKNSPTLFQQQLSHILAPVRKAFPNSLIIQYMDDILLASPALRELTALTDKVTNALTKEGLPMSLEKTQATPGSIHFLGQVISPDCITYETLPSIHVKSIWSLAELQSMLGELQWVSKGTPVLRSSLHQLYLALRGHRDPRDTIELTSTQVQALKTIQKALALNCRSRLVSQLPILALIILRPTGTTAVLFQTKQKWPLVWLHTPHPATSLRPWGQLLANAIITLDKYSLQHYGQICKSFHHNISNQALTYYLHTSDQSSVAILLQHSHRFHNLGAQPSGPWRSLLQVPQIFQNIDVLRPPFIISPVVIDHAPCLFSDGATSKAAFILWDKQVIHQQVLPLPSTCSAQAGELFGLLAGLQKSKPWPALNIFLDSKFLIGHLRRMAWGAFLGPSTQCDLHARLFPLLQGKTVYVHHVRSHTLLQDPISRLNEATDALMLAPLLPLAGKRTADGSEFEKRTADGSEFESPKKKAKVE

SEQ ID NO: 6484 - protein, 2090 aa, synthetic construct
MPAAKRVKLDGGDKKYSIGLDIGTNSVGWAVITDEYKVPSKKFKVLGNTDRHSIKKNLIGALLFDSGETAEATRLKRTARRRYTRRKNRICYLQEIFSNEMAKVDDSFFHRLEESFLVEEDKKHERHPIFGNIVDEVAYHEKYPTIYHLRKKLVDSTDKADLRLIYLALAHMIKFRGHFLIEGDLNPDNSDVDKLFIQLVQTYNQLFEENPINASGVDAKAILSARLSKSRRLENLIAQLPGEKKNGLFGNLIALSLGLTPNFKSNFDLAEDAKLQLSKDTYDDDLDNLLAQIGDQYADLFLAAKNLSDAILLSDILRVNTEITKAPLSASMIKRYDEHHQDLTLLKALVRQQLPEKYKEIFFDQSKNGYAGYIDGGASQEEFYKFIKPILEKMDGTEELLVKLNREDLLRKQRTFDNGSIPHQIHLGELHAILRRQEDFYPFLKDNREKIEKILTFRIPYYVGPLARGNSRFAWMTRKSEETITPWNFEEVVDKGASAQSFIERMTNFDKNLPNEKVLPKHSLLYEYFTVYNELTKVKYVTEGMRKPAFLSGEQKKAIVDLLFKTNRKVTVKQLKEDYFKKIECFDSVEISGVEDRFNASLGTYHDLLKIIKDKDFLDNEENEDILEDIVLTLTLFEDREMIEERLKTYAHLFDDKVMKQLKRRRYTGWGRLSRKLINGIRDKQSGKTILDFLKSDGFANRNFMQLIHDDSLTFKEDIQKAQVSGQGDSLHEHIANLAGSPAIKKGILQTVKVVDELVKVMGRHKPENIVIEMARENQTTQKGQKNSRERMKRIEEGIKELGSQILKEHPVENTQLQNEKLYLYYLQNGRDMYVDQELDINRLSDYDVDHIVPQSFLKDDSIDNKVLTRSDKARGKSDNVPSEEVVKKMKNYWRQLLNAKLITQRKFDNLTKAERGGLSELDKAGFIKRQLVETRQITKHVAQILDSRMNTKYDENDKLIREVKVITLKSKLVSDFRKDFQFYKVREINNYHHAHDAYLNAVVGTALIKKYPKLESEFVYGDYKVYDVRKMIAKSEQEIGKATAKYFFYSNIMNFFKTEITLANGEIRKRPLIETNGETGEIVWDKGRDFATVRKVLSMPQVNIVKKTEVQTGGFSKESILPKRNSDKLIARKKDWDPKKYGGFDSPTVAYSVLVVAKVEKGKSKKLKSVKELLGITIMERSSFEKNPIDFLEAKGYKEVKKDLIIKLPKYSLFELENGRKRMLASAGELQKGNELALPSKYVNFLYLASHYEKLKGSPEDNEQKQLFVEQHKHYLDEIIEQISEFSKRVILADANLDKVLSAYNKHRDKPIREQAENIIHLFTLTNLGAPAAFKYFDTTIDRKRYTSTKEVLDATLIHQSITGLYETRIDLSQLGGDGGPAPAPGGTLNLEDEYRLYETSAEPEVSPGSTWLSDFPQAWAETGGMGLAVRQAPLIIPLKATSTPVSIKQYPMSQEAKLGIKPHIQRLLDQGILVPCQSPWNTPLLPVKKPGTNDYRPVQDLREVNKRVEDIHPTVPNPYNLLSGLPPSHRWYTVLDLKDAFFCLRLHPTSQPLFAFEWRDPGMGISGQLTWTRLPQGFKNSPTLFNEALHRDLADFRIQHPDLILLQYVDDILLAATSELDCQQGTRALLLTLGNLGYRASAKKAQLCQKQVKYLGYLLKEGQRWLTEARKETVMGQPTPKTPRQLREFLGKAGFCRLFIPGFAEMAAPLYPLTKPGTLFNWGPDQQKAYQEIKQALLTAPALGLPDLTKPFELFVDEKQGYAKGVLTQKLGPWRRPVAYLSKKLDPVAAGWPPCLRMVAAIAVLRKDAGKLTMGQPLVILAPHAVEALVKQPPDRWLSNARMTHYQAMLLDTDRVQFGPVVALNPATLLPLPEEGAPHDCLEILAETHGTRPDLTDQPIPDADHTWYTDGSSFLQEGQRKAGAAVTTETEVIWARALPAGTSAQRAELIALTQALKMAEGKRLNVYTDSRYAFATAHIHGEIYRRRGWLTSEGREIKNKSEILALLKALFLPKRLSIIHCLGHQKGDSAEARGNRLADQAAREAAIKTPPDTSTLLAGKRTADGSEFEKRTADGSEFESPKKKAKVE

SEQ ID NO: 6485 - protein, 2110 aa, synthetic construct
MPAAKRVKLDGGDKKYSIGLDIGTNSVGWAVITDEYKVPSKKFKVLGNTDRHSIKKNLIGALLFDSGETAEATRLKRTARRRYTRRKNRICYLQEIFSNEMAKVDDSFFHRLEESFLVEEDKKHERHPIFGNIVDEVAYHEKYPTIYHLRKKLVDSTDKADLRLIYLALAHMIKFRGHFLIEGDLNPDNSDVDKLFIQLVQTYNQLFEENPINASGVDAKAILSARLSKSRRLENLIAQLPGEKKNGLFGNLIALSLGLTPNFKSNFDLAEDAKLQLSKDTYDDDLDNLLAQIGDQYADLFLAAKNLSDAILLSDILRVNTEITKAPLSASMIKRYDEHHQDLTLLKALVRQQLPEKYKEIFFDQSKNGYAGYIDGGASQEEFYKFIKPILEKMDGTEELLVKLNREDLLRKQRTFDNGSIPHQIHLGELHAILRRQEDFYPFLKDNREKIEKILTFRIPYYVGPLARGNSRFAWMTRKSEETITPWNFEEVVDKGASAQSFIERMTNFDKNLPNEKVLPKHSLLYEYFTVYNELTKVKYVTEGMRKPAFLSGEQKKAIVDLLFKTNRKVTVKQLKEDYFKKIECFDSVEISGVEDRFNASLGTYHDLLKIIKDKDFLDNEENEDILEDIVLTLTLFEDREMIEERLKTYAHLFDDKVMKQLKRRRYTGWGRLSRKLINGIRDKQSGKTILDFLKSDGFANRNFMQLIHDDSLTFKEDIQKAQVSGQGDSLHEHIANLAGSPAIKKGILQTVKVVDELVKVMGRHKPENIVIEMARENQTTQKGQKNSRERMKRIEEGIKELGSQILKEHPVENTQLQNEKLYLYYLQNGRDMYVDQELDINRLSDYDVDHIVPQSFLKDDSIDNKVLTRSDKARGKSDNVPSEEVVKKMKNYWRQLLNAKLITQRKFDNLTKAERGGLSELDKAGFIKRQLVETRQITKHVAQILDSRMNTKYDENDKLIREVKVITLKSKLVSDFRKDFQFYKVREINNYHHAHDAYLNAVVGTALIKKYPKLESEFVYGDYKVYDVRKMIAKSEQEIGKATAKYFFYSNIMNFFKTEITLANGEIRKRPLIETNGETGEIVWDKGRDFATVRKVLSMPQVNIVKKTEVQTGGFSKESILPKRNSDKLIARKKDWDPKKYGGFDSPTVAYSVLVVAKVEKGKSKKLKSVKELLGITIMERSSFEKNPIDFLEAKGYKEVKKDLIIKLPKYSLFELENGRKRMLASAGELQKGNELALPSKYVNFLYLASHYEKLKGSPEDNEQKQLFVEQHKHYLDEIIEQISEFSKRVILADANLDKVLSAYNKHRDKPIREQAENIIHLFTLTNLGAPAAFKYFDTTIDRKRYTSTKEVLDATLIHQSITGLYETRIDLSQLGGDGGPAPAPGGTLNIEDEYRLHETSKEPDVSLGSTWLSDFPQAWAETGGMGLAVRQAPLIIPLKATSTPVSIKQYPMSQEARLGIKPHIQRLLDQGILVPCQSPWNTPLLPVKKPGTNDYRPVQDLREVNKRVEDIHPTVPNPYNLLSGLPPSHQWYTVLDLKDAFFCLRLHPTSQPLFAFEWRDPEMGISGQLTWTRLPQGFKNSPTLFNEALHRDLADFRIQHPDLILLQYVDDLLLAATSELDCQQGTRALLQTLGNLGYRASAKKAQICQKQVKYLGYLLKEGQRWLTEARKETVMGQPTPKTPRQLREFLGKAGFCRLFIPGFAEMAAPLYPLTKPGTLFNWGPDQQKAYQEIKQALLTAPALGLPDLTKPFELFVDEKQGYAKGVLTQKLGPWRRPVAYLSKKLDPVAAGWPPCLRMVAAIAVLTKDAGKLTMGQPLVILAPHAVEALVKQPPDRWLSNARMTHYQALLLDTDRVQFGPVVALNPATLLPLPEEGLQHNCLDILAEAHGTRPDLTDQPLPDADHTWYTDGSSLLQEGQRKAGAAVTTETEVIWAKALPAGTSAQRAELIALTQALKMAEGKKLNVYTDSRYAFATAHIHGEIYRRRGWLTSEGKEIKNKDEILALLKALFLPKRLSIIHCPGHQKGHSAEARGNRMADQAARKAAITETPDTSTLLIENSSPSGGSKRTADGSEFEAGKRTADGSEFEKRTADGSEFESPKKKAKVE

SEQ ID NO: 6486 - protein, 2110 aa, synthetic construct; identical to SEQ ID NO: 6485

SEQ ID NO: 6487 - protein, 2110 aa, synthetic construct
MPAAKRVKLDGGDKKYSIGLDIGTNSVGWAVITDEYKVPSKKFKVLGNTDRHSIKKNLIGALLFDSGETAEATRLKRTARRRYTRRKNRICYLQEIFSNEMAKVDDSFFHRLEESFLVEEDKKHERHPIFGNIVDEVAYHEKYPTIYHLRKKLVDSTDKADLRLIYLALAHMIKFRGHFLIEGDLNPDNSDVDKLFIQLVQTYNQLFEENPINASGVDAKAILSARLSKSRRLENLIAQLPGEKKNGLFGNLIALSLGLTPNFKSNFDLAEDAKLQLSKDTYDDDLDNLLAQIGDQYADLFLAAKNLSDAILLSDILRVNTEITKAPLSASMIKRYDEHHQDLTLLKALVRQQLPEKYKEIFFDQSKNGYAGYIDGGASQEEFYKFIKPILEKMDGTEELLVKLNREDLLRKQRTFDNGSIPHQIHLGELHAILRRQEDFYPFLKDNREKIEKILTFRIPYYVGPLARGNSRFAWMTRKSEETITPWNFEEVVDKGASAQSFIERMTNFDKNLPNEKVLPKHSLLYEYFTVYNELTKVKYVTEGMRKPAFLSGEQKKAIVDLLFKTNRKVTVKQLKEDYFKKIECFDSVEISGVEDRFNASLGTYHDLLKIIKDKDFLDNEENEDILEDIVLTLTLFEDREMIEERLKTYAHLFDDKVMKQLKRRRYTGWGRLSRKLINGIRDKQSGKTILDFLKSDGFANRNFMQLIHDDSLTFKEDIQKAQVSGQGDSLHEHIANLAGSPAIKKGILQTVKVVDELVKVMGRHKPENIVIEMARENQTTQKGQKNSRERMKRIEEGIKELGSQILKEHPVENTQLQNEKLYLYYLQNGRDMYVDQELDINRLSDYDVDHIVPQSFLKDDSIDNKVLTRSDKARGKSDNVPSEEVVKKMKNYWRQLLNAKLITQRKFDNLTKAERGGLSELDKAGFIKRQLVETRQITKHVAQILDSRMNTKYDENDKLIREVKVITLKSKLVSDFRKDFQFYKVREINNYHHAHDAYLNAVVGTALIKKYPKLESEFVYGDYKVYDVRKMIAKSEQEIGKATAKYFFYSNIMNFFKTEITLANGEIRKRPLIETNGETGEIVWDKGRDFATVRKVLSMPQVNIVKKTEVQTGGFSKESILPKRNSDKLIARKKDWDPKKYGGFDSPTVAYSVLVVAKVEKGKSKKLKSVKELLGITIMERSSFEKNPIDFLEAKGYKEVKKDLIIKLPKYSLFELENGRKRMLASAGELQKGNELALPSKYVNFLYLASHYEKLKGSPEDNEQKQLFVEQHKHYLDEIIEQISEFSKRVILADANLDKVLSAYNKHRDKPIREQAENIIHLFTLTNLGAPAAFKYFDTTIDRKRYTSTKEVLDATLIHQSITGLYETRIDLSQLGGDGGPAPAPGGVQEISDSRPMLHIYLNGRRFLGLLDTGADKTCIAGRDWPANWPIHQTESSLQGLGMACGVARSSQPLRWQHEDKSGIIHPFVIPTLPFTLWGRDIMKDIKVRLMTDSPDDSQDLMIGAIESNLFADQISWKSDQPVWLNQWPLKQEKLQALQQLVTEQLQLGHLEESNSPWNTPVFVIKKKSGKWRLLQDLRAVNATMHDMGALQPGLPSPVAVPKGWEIIIIDLQDCFFNIKLHPEDCKRFAFSVPSPNFKRPYQRFQWKVLPQGMKNSPTLCQKFVDKAILTVRDKYQDSYIVHYMDDILLAHPSRSIVDEILTSMIQALNKHGLVVSTEKIQKYDNLKYLGTHIQGDSVSYQKLQIRTDKLRTLNDFQKLLGNINWIRPFLKLTTGELKPLFEILNGDSNPISTRKLTPEACKALQLMNERLSTARVKRLDLSQPWSLCILKTEYTPTACLWQDGVVEWIHLPHISPKVITPYDIFCTQLIIKGRHRSKELFSKDPDYIVVPYTKVQFDLLLQEKEDWPISLLGFLGEVHFHLPKDPLLTFTLQTAIIFPHMTSTTPLEKGIVIFTDGSANGRSVTYIQGREPIIKENTQNTAQQAEIVAVITAFEEVSQPFNLYTDSKYVTGLFPEIETATLSPRTKIYTELKHLQRLIHKRQEKFYIGHIRGHTGLPGPLAQGNAYADSLTRILTAAGKRTADGSEFEKRTADGSEFESPKKKAKVE

SEQ ID NO: 6488 - protein, 2084 aa, synthetic construct
MPAAKRVKLDGGDKKYSIGLDIGTNSVGWAVITDEYKVPSKKFKVLGNTDRHSIKKNLIGALLFDSGETAEATRLKRTARRRYTRRKNRICYLQEIFSNEMAKVDDSFFHRLEESFLVEEDKKHERHPIFGNIVDEVAYHEKYPTIYHLRKKLVDSTDKADLRLIYLALAHMIKFRGHFLIEGDLNPDNSDVDKLFIQLVQTYNQLFEENPINASGVDAKAILSARLSKSRRLENLIAQLPGEKKNGLFGNLIALSLGLTPNFKSNFDLAEDAKLQLSKDTYDDDLDNLLAQIGDQYADLFLAAKNLSDAILLSDILRVNTEITKAPLSASMIKRYDEHHQDLTLLKALVRQQLPEKYKEIFFDQSKNGYAGYIDGGASQEEFYKFIKPILEKMDGTEELLVKLNREDLLRKQRTFDNGSIPHQIHLGELHAILRRQEDFYPFLKDNREKIEKILTFRIPYYVGPLARGNSRFAWMTRKSEETITPWNFEEVVDKGASAQSFIERMTNFDKNLPNEKVLPKHSLLYEYFTVYNELTKVKYVTEGMRKPAFLSGEQKKAIVDLLFKTNRKVTVKQLKEDYFKKIECFDSVEISGVEDRFNASLGTYHDLLKIIKDKDFLDNEENEDILEDIVLTLTLFEDREMIEERLKTYAHLFDDKVMKQLKRRRYTGWGRLSRKLINGIRDKQSGKTILDFLKSDGFANRNFMQLIHDDSLTFKEDIQKAQVSGQGDSLHEHIANLAGSPAIKKGILQTVKVVDELVKVMGRHKPENIVIEMARENQTTQKGQKNSRERMKRIEEGIKELGSQILKEHPVENTQLQNEKLYLYYLQNGRDMYVDQELDINRLSDYDVDHIVPQSFLKDDSIDNKVLTRSDKARGKSDNVPSEEVVKKMKNYWRQLLNAKLITQRKFDNLTKAERGGLSELDKAGFIKRQLVETRQITKHVAQILDSRMNTKYDENDKLIREVKVITLKSKLVSDFRKDFQFYKVREINNYHHAHDAYLNAVVGTALIKKYPKLESEFVYGDYKVYDVRKMIAKSEQEIGKATAKYFFYSNIMNFFKTEITLANGEIRKRPLIETNGETGEIVWDKGRDFATVRKVLSMPQVNIVKKTEVQTGGFSKESILPKRNSDKLIARKKDWDPKKYGGFDSPTVAYSVLVVAKVEKGKSKKLKSVKELLGITIMERSSFEKNPIDFLEAKGYKEVKKDLIIKLPKYSLFELENGRKRMLASAGELQKGNELALPSKYVNFLYLASHYEKLKGSPEDNEQKQLFVEQHKHYLDEIIEQISEFSKRVILADANLDKVLSAYNKHRDKPIREQAENIIHLFTLTNLGAPAAFKYFDTTIDRKRYTSTKEVLDATLIHQSITGLYETRIDLSQLGGDGGPAPAPGGTLQLDDEYRLYSPLVKPDQNIQFWLEQFPQAWAETAGMGLAKQVPPQVIQLKASATPVSVRQYPLSKEAQEGIRPHVQRLIQQGILVPVQSPWNTPLLPVRKPGTNDYRPVQDLREVNKRVQDIHPTVPNPYNLLCALPPQRSWYTVLDLKDAFFCLRLHPTSQPLFAFEWRDPGTGRTGQLTWTRLPQGFKNSPTIFDEALHRDLANFRIQHPQVTLLQYVDDLLLAGATKQDCLEGTKALLLELSDLGYRASAKKAQICRREVTYLGYSLRDGQRWLTEARKKTVVQIPAPTTAKQVREFLGTAGFCRLWIPGFATLAAPLYPLTKEKGEFSWAPEHQKAFDAIKKALLSAPALALPDVTKPFTLYVDERKGVARGVLTQTLGPWRRPVAYLSKKLDPVASGWPVCLKAIAAVAILVKDADKLTLGQNITVIAPHALENIVRQPPDRWMTNARMTHYQSLLLTERVTFAPPAALNPATLLPEETDEPVTHDCHQLLIEETGVRKDLTDIPLTGEVLTWFTDGSSYVVEGKRMAGAAVVDGTRTIWASSLPEGTSAQKAELMALTQALRLAEGKSINIYTDSRYAFATAHVHGAIYKQRGLLTSAGREIKNKEEILSLLEALHLPKRLAIIHCPGHQKAKDPISRGNQMADRVAKQAAQGVNLLAGKRTADGSEFEKRTADGSEFESPKKKAKVE

SEQ ID NO: 6489 - protein, 2081 aa, synthetic construct
MPAAKRVKLDGGDKKYSIGLDIGTNSVGWAVITDEYKVPSKKFKVLGNTDRHSIKKNLIGALLFDSGETAEATRLKRTARRRYTRRKNRICYLQEIFSNEMAKVDDSFFHRLEESFLVEEDKKHERHPIFGNIVDEVAYHEKYPTIYHLRKKLVDSTDKADLRLIYLALAHMIKFRGHFLIEGDLNPDNSDVDKLFIQLVQTYNQLFEENPINASGVDAKAILSARLSKSRRLENLIAQLPGEKKNGLFGNLIALSLGLTPNFKSNFDLAEDAKLQLSKDTYDDDLDNLLAQIGDQYADLFLAAKNLSDAILLSDILRVNTEITKAPLSASMIKRYDEHHQDLTLLKALVRQQLPEKYKEIFFDQSKNGYAGYIDGGASQEEFYKFIKPILEKMDGTEELLVKLNREDLLRKQRTFDNGSIPHQIHLGELHAILRRQEDFYPFLKDNREKIEKILTFRIPYYVGPLARGNSRFAWMTRKSEETITPWNFEEVVDKGASAQSFIERMTNFDKNLPNEKVLPKHSLLYEYFTVYNELTKVKYVTEGMRKPAFLSGEQKKAIVDLLFKTNRKVTVKQLKEDYFKKIECFDSVEISGVEDRFNASLGTYHDLLKIIKDKDFLDNEENEDILEDIVLTLTLFEDREMIEERLKTYAHLFDDKVMKQLKRRRYTGWGRLSRKLINGIRDKQSGKTILDFLKSDGFANRNFMQLIHDDSLTFKEDIQKAQVSGQGDSLHEHIANLAGSPAIKKGILQTVKVVDELVKVMGRHKPENIVIEMARENQTTQKGQKNSRERMKRIEEGIKELGSQILKEHPVENTQLQNEKLYLYYLQNGRDMYVDQELDINRLSDYDVDHIVPQSFLKDDSIDNKVLTRSDKARGKSDNVPSEEVVKKMKNYWRQLLNAKLITQRKFDNLTKAERGGLSELDKAGFIKRQLVETRQITKHVAQILDSRMNTKYDENDKLIREVKVITLKSKLVSDFRKDFQFYKVREINNYHHAHDAYLNAVVGTALIKKYPKLESEFVYGDYKVYDVRKMIAKSEQEIGKATAKYFFYSNIMNFFKTEITLANGEIRKRPLIETNGETGEIVWDKGRDFATVRKVLSMPQVNIVKKTEVQTGGFSKESILPKRNSDKLIARKKDWDPKKYGGFDSPTVAYSVLVVAKVEKGKSKKLKSVKELLGITIMERSSFEKNPIDFLEAKGYKEVKKDLIIKLPKYSLFELENGRKRMLASAGELQKGNELALPSKYVNFLYLASHYEKLKGSPEDNEQKQLFVEQHKHYLDEIIEQISEFSKRVILADANLDKVLSAYNKHRDKPIREQAENIIHLFTLTNLGAPAAFKYFDTTIDRKRYTSTKEVLDATLIHQSITGLYETRIDLSQLGGDGGPAPAPGGIPWLMKKPLQLTTLVPLQEYEERLLKQTMLTGSYKEKLQSLFLKYDALWQHWENQVGHRRIKPHHIATGTVNPRPQKQYPINPKAKASIQTVINDLLKQGVLIQQNSIMNTPVYPVPKPDGKWRMVLDYREVNKTIPLIAAQNQHSAGILSSIFRGKYKTTLDLSNGFWAHSITPESYWLTAFTWLGQQYCWTRLPQGFLNSPALFNADVVDLLKEVPNVQVYVDDIYISHDDPREHLEQLEKVFSLLLNAGYVVSLKKSEIAQHEVEFLGFNITKEGRGLTETFKQKLLNITPPRDLKQLQSILGKLNFARNFIPNFSELVKPLYNIIATAPGKYITWTTDNSQQLQNIISMLNSAENLEERNPEVRLIMKVNTSPSAGYIRFYNEFAKRPIMYLNYVYTKAEVKFTNTEKLLTTIHKGLIKALDLGMGQEILVYSPIVSMTKIQKTPLPERKALPIRWITWMSYLEDPRIQFHYDKTLPELQQVPTVTDDIIAKIKHPSEFSMVFYTDGSAIKHPNVNKSHNAGMGIAQVQFKPEFTVINTWSIPLGDHTAQLAEVAAVEFACKKALKIDGPVLIVTDSFYVAESVNKELPYWQSNGFFNNKKKPLKHVSKWKSIADCIQLKPDIIIIHEKGHQPTASTFHTEGNNLADKLATQGSYVVNAGKRTADGSEFEKRTADGSEFESPKKKAKVE

SEQ ID NO: 6490 - protein, 2170 aa, synthetic construct
MPAAKRVKLDGGDKKYSIGLDIGTNSVGWAVITDEYKVPSKKFKVLGNTDRHSIKKNLIGALLFDSGETAEATRLKRTARRRYTRRKNRICYLQEIFSNEMAKVDDSFFHRLEESFLVEEDKKHERHPIFGNIVDEVAYHEKYPTIYHLRKKLVDSTDKADLRLIYLALAHMIKFRGHFLIEGDLNPDNSDVDKLFIQLVQTYNQLFEENPINASGVDAKAILSARLSKSRRLENLIAQLPGEKKNGLFGNLIALSLGLTPNFKSNFDLAEDAKLQLSKDTYDDDLDNLLAQIGDQYADLFLAAKNLSDAILLSDILRVNTEITKAPLSASMIKRYDEHHQDLTLLKALVRQQLPEKYKEIFFDQSKNGYAGYIDGGASQEEFYKFIKPILEKMDGTEELLVKLNREDLLRKQRTFDNGSIPHQIHLGELHAILRRQEDFYPFLKDNREKIEKILTFRIPYYVGPLARGNSRFAWMTRKSEETITPWNFEEVVDKGASAQSFIERMTNFDKNLPNEKVLPKHSLLYEYFTVYNELTKVKYVTEGMRKPAFLSGEQKKAIVDLLFKTNRKVTVKQLKEDYFKKIECFDSVEISGVEDRFNASLGTYHDLLKIIKDKDFLDNEENEDILEDIVLTLTLFEDREMIEERLKTYAHLFDDKVMKQLKRRRYTGWGRLSRKLINGIRDKQSGKTILDFLKSDGFANRNFMQLIHDDSLTFKEDIQKAQVSGQGDSLHEHIANLAGSPAIKKGILQTVKVVDELVKVMGRHKPENIVIEMARENQTTQKGQKNSRERMKRIEEGIKELGSQILKEHPVENTQLQNEKLYLYYLQNGRDMYVDQELDINRLSDYDVDHIVPQSFLKDDSIDNKVLTRSDKARGKSDNVPSEEVVKKMKNYWRQLLNAKLITQRKFDNLTKAERGGLSELDKAGFIKRQLVETRQITKHVAQILDSRMNTKYDENDKLIREVKVITLKSKLVSDFRKDFQFYKVREINNYHHAHDAYLNAVVGTALIKKYPKLESEFVYGDYKVYDVRKMIAKSEQEIGKATAKYFFYSNIMNFFKTEITLANGEIRKRPLIETNGETGEIVWDKGRDFATVRKVLSMPQVNIVKKTEVQTGGFSKESILPKRNSDKLIARKKDWDPKKYGGFDSPTVAYSVLVVAKVEKGKSKKLKSVKELLGITIMERSSFEKNPIDFLEAKGYKEVKKDLIIKLPKYSLFELENGRKRMLASAGELQKGNELALPSKYVNFLYLASHYEKLKGSPEDNEQKQLFVEQHKHYLDEIIEQISEFSKRVILADANLDKVLSAYNKHRDKPIREQAENIIHLFTLTNLGAPAAFKYFDTTIDRKRYTSTKEVLDATLIHQSITGLYETRIDLSQLGGDGGPAPAPGGMDPLQLLQPLEAEIKGTKLKAHWNSGATITCVPQAFLEEEVPIKNIWIKTIHGEKEQPVYYLTFKIQGRKVEAEVISSPYDYILVSPSDIPWLMKKPLQLTTLVPLQEYEERLLKQTMLTGSYKEKLQSLFLKYDALWQHWENQVGHRRIKPHHIATGTVNPRPQKQYPINPKAKASIQTVINDLLKQGVLIQQNSIMNTPVYPVPKPDGKWRMVLDYREVNKTIPLIAAQNQHSAGILSSIFRGKYKTTLDLSNGFWAHSITPESYWLTAFTWLGQQYCWTRLPQGFLNSPALFNADVVDLLKEVPNVQVYVDDIYISHDDPREHLEQLEKVFSLLLNAGYVVSLKKSEIAQHEVEFLGFNITKEGRGLTETFKQKLLNITPPRDLKQLQSILGKLNFARNFIPNFSELVKPLYNIIATAPGKYITWTTDNSQQLQNIISMLNSAENLEERNPEVRLIMKVNTSPSAGYIRFYNEFAKRPIMYLNYVYTKAEVKFTNTEKLLTTIHKGLIKALDLGMGQEILVYSPIVSMTKIQKTPLPERKALPIRWITWMSYLEDPRIQFHYDKTLPELQQVPTVTDDIIAKIKHPSEFSMVFYTDGSAIKHPNVNKSHNAGMGIAQVQFKPEFTVINTWSIPLGDHTAQLAEVAAVEFACKKALKIDGPVLIVTDSFYVAESVNKELPYWQSNGFFNNKKKPLKHVSKWKSIADCIQLKPDIIIIHEKGHQPTASTFHTEGNNLADKLATQGSYVVNAGKRTADGSEFEKRTADGSEFESPKKKAKVE

SEQ ID NO: 6491 - protein, 2090 aa, synthetic construct
MPAAKRVKLDGGDKKYSIGLDIGTNSVGWAVITDEYKVPSKKFKVLGNTDRHSIKKNLIGALLFDSGETAEATRLKRTARRRYTRRKNRICYLQEIFSNEMAKVDDSFFHRLEESFLVEEDKKHERHPIFGNIVDEVAYHEKYPTIYHLRKKLVDSTDKADLRLIYLALAHMIKFRGHFLIEGDLNPDNSDVDKLFIQLVQTYNQLFEENPINASGVDAKAILSARLSKSRRLENLIAQLPGEKKNGLFGNLIALSLGLTPNFKSNFDLAEDAKLQLSKDTYDDDLDNLLAQIGDQYADLFLAAKNLSDAILLSDILRVNTEITKAPLSASMIKRYDEHHQDLTLLKALVRQQLPEKYKEIFFDQSKNGYAGYIDGGASQEEFYKFIKPILEKMDGTEELLVKLNREDLLRKQRTFDNGSIPHQIHLGELHAILRRQEDFYPFLKDNREKIEKILTFRIPYYVGPLARGNSRFAWMTRKSEETITPWNFEEVVDKGASAQSFIERMTNFDKNLPNEKVLPKHSLLYEYFTVYNELTKVKYVTEGMRKPAFLSGEQKKAIVDLLFKTNRKVTVKQLKEDYFKKIECFDSVEISGVEDRFNASLGTYHDLLKIIKDKDFLDNEENEDILEDIVLTLTLFEDREMIEERLKTYAHLFDDKVMKQLKRRRYTGWGRLSRKLINGIRDKQSGKTILDFLKSDGFANRNFMQLIHDDSLTFKEDIQKAQVSGQGDSLHEHIANLAGSPAIKKGILQTVKVVDELVKVMGRHKPENIVIEMARENQTTQKGQKNSRERMKRIEEGIKELGSQILKEHPVENTQLQNEKLYLYYLQNGRDMYVDQELDINRLSDYDVDHIVPQSFLKDDSIDNKVLTRSDKARGKSDNVPSEEVVKKMKNYWRQLLNAKLITQRKFDNLTKAERGGLSELDKAGFIKRQLVETRQITKHVAQILDSRMNTKYDENDKLIREVKVITLKSKLVSDFRKDFQFYKVREINNYHHAHDAYLNAVVGTALIKKYPKLESEFVYGDYKVYDVRKMIAKSEQEIGKATAKYFFYSNIMNFFKTEITLANGEIRKRPLIETNGETGEIVWDKGRDFATVRKVLSMPQVNIVKKTEVQTGGFSKESILPKRNSDKLIARKKDWDPKKYGGFDSPTVAYSVLVVAKVEKGKSKKLKSVKELLGITIMERSSFEKNPIDFLEAKGYKEVKKDLIIKLPKYSLFELENGRKRMLASAGELQKGNELALPSKYVNFLYLASHYEKLKGSPEDNEQKQLFVEQHKHYLDEIIEQISEFSKRVILADANLDKVLSAYNKHRDKPIREQAENIIHLFTLTNLGAPAAFKYFDTTIDRKRYTSTKEVLDATLIHQSITGLYETRIDLSQLGGDGGPAPAPGGTLNIEDEYRLHETSKEPDVPLGSTWLSDFPQAWAETGGMGLAVRQAPLIIPLKATSTPVSIKQYPMSQEARLGIKPHIQRLLDQGILVPCQSPWNTPLLPVKKPGTNDYRPVQDLREVNKRVEDIHPTVPNPYNLLSGLPPSHQWYTVLDLKDAFFCLRLHPTSQPLFAFEWRDPEMGISGQLTWTRLPQGFKNSPTLFNEALHRDLADFRIQHPDLILLQYVDDLLLAATSEQDCQRGTRALLQTLGNLGYRASAKKAQICQKQVKYLGYLLKEGQRWLTEARKETVMGQPTPKTPRQLREFLGKAGFCRLFIPGFAEMAAPLYPLTKPGTLFNWGPDQQKAYQEIKQALLTAPALGLPDLTKPFELFVDEKQGYAKGVLTQKLGPWRRPVAYLSKKLDPVAAGWPPCLRMVAAIAVLTKDAGKLTMGQPLVILAPHAVEALVKQPPDRWLSNARMTHYQAMLLDTDRVQFGPVVALNPATLLPLPEKEAPHDCLEILAETHGTRPDLTDQPIPDADYTWYTDGSSFLQEGQRRAGAAVTTETEVIWARALPAGTSAQRAELIALTQALKMAEGKKLNVYTDSRYAFATAHVHGEIYRRRGWLTSEGREIKNKNEILALLKALFLPKRLSIIHCPGHQKGNSAEARGNRMADQAAREAAMKAVLETSTLLAGKRTADGSEFEKRTADGSEFESPKKKAKVE

SEQ ID NO: 6492 - protein, 2094 aa, synthetic construct
MPAAKRVKLDGGDKKYSIGLDIGTNSVGWAVITDEYKVPSKKFKVLGNTDRHSIKKNLIGALLFDSGETAEATRLKRTARRRYTRRKNRICYLQEIFSNEMAKVDDSFFHRLEESFLVEEDKKHERHPIFGNIVDEVAYHEKYPTIYHLRKKLVDSTDKADLRLIYLALAHMIKFRGHFLIEGDLNPDNSDVDKLFIQLVQTYNQLFEENPINASGVDAKAILSARLSKSRRLENLIAQLPGEKKNGLFGNLIALSLGLTPNFKSNFDLAEDAKLQLSKDTYDDDLDNLLAQIGDQYADLFLAAKNLSDAILLSDILRVNTEITKAPLSASMIKRYDEHHQDLTLLKALVRQQLPEKYKEIFFDQSKNGYAGYIDGGASQEEFYKFIKPILEKMDGTEELLVKLNREDLLRKQRTFDNGSIPHQIHLGELHAILRRQEDFYPFLKDNREKIEKILTFRIPYYVGPLARGNSRFAWMTRKSEETITPWNFEEVVDKGASAQSFIERMTNFDKNLPNEKVLPKHSLLYEYFTVYNELTKVKYVTEGMRKPAFLSGEQKKAIVDLLFKTNRKVTVKQLKEDYFKKIECFDSVEISGVEDRFNASLGTYHDLLKIIKDKDFLDNEENEDILEDIVLTLTLFEDREMIEERLKTYAHLFDDKVMKQLKRRRYTGWGRLSRKLINGIRDKQSGKTILDFLKSDGFANRNFMQLIHDDSLTFKEDIQKAQVSGQGDSLHEHIANLAGSPAIKKGILQTVKVVDELVKVMGRHKPENIVIEMARENQTTQKGQKNSRERMKRIEEGIKELGSQILKEHPVENTQLQNEKLYLYYLQNGRDMYVDQELDINRLSDYDVDHIVPQSFLKDDSIDNKVLTRSDKARGKSDNVPSEEVVKKMKNYWRQLLNAKLITQRKFDNLTKAERGGLSELDKAGFIKRQLVETRQITKHVAQILDSRMNTKYDENDKLIREVKVITLKSKLVSDFRKDFQFYKVREINNYHHAHDAYLNAVVGTALIKKYPKLESEFVYGDYKVYDVRKMIAKSEQEIGKATAKYFFYSNIMNFFKTEITLANGEIRKRPLIETNGETGEIVWDKGRDFATVRKVLSMPQVNIVKKTEVQTGGFSKESILPKRNSDKLIARKKDWDPKKYGGFDSPTVAYSVLVVAKVEKGKSKKLKSVKELLGITIMERSSFEKNPIDFLEAKGYKEVKKDLIIKLPKYSLFELENGRKRMLASAGELQKGNELALPSKYVNFLYLASHYEKLKGSPEDNEQKQLFVEQHKHYLDEIIEQISEFSKRVILADANLDKVLSAYNKHRDKPIREQAENIIHLFTLTNLGAPAAFKYFDTTIDRKRYTSTKEVLDATLIHQSITGLYETRIDLSQLGGDGGPAPAPAPGGTAPLEEEYRLFLEAPIQNVTLLEQWKREIPKVWAEINPPGLASTQAPIHVQLLSTALPVRVRQYPITLEAKRSLRETIRKFRAAGILRPVHSPWNTPLLPVRKSGTSEYRMVQDLREVNKRVETIHPTVPNPYTLLSLLPPDRIWYSVLDLKDAFFCIPLAPESQLIFAFEWADAEEGESGQLTWTRLPQGFKNSPTLFNEALNRDLQGFRLDHPSVSLLQYVDDLLIAADTQAACLSATRDLLMTLAELGYRVSGKKAQLCQEEVTYLGFKIHKGSRSLSNSRTQAILQIPVPKTKRQVREFLGTIGYCRLWIPGFAELAQPLYAATRPGNDPLVWGEKEEEAFQSLKLALTQPPALALPSLDKPFQLFVEETSGAAKGVLTQALGPWKRPVAYLSKRLDPVAAGWPRCLRAIAAAALLTREASKLTFGQDIEITSSHNLESLLRSPPDKWLTNARITQYQVLLLDPPRVRFKQTAALNPATLLPETDDTLPIHHCLDTLDSLTSTRPDLTDQPLAQAEATLFTDGSSYIRDGKRYAGAAVVTLDSVIWAEPLPIGTSAQKAELIALTKALEWSKDKSVNIYTDSRYAFATLHVHGMIYRERGWLTAGGKAIKNAPEILALLTAVWLPKRVAVMHCKGHQKDDAPTSTGNRRADEVAREVAIRPLSTQATISAGKRTADGSEFEKRTADGSEFESPKKKAKVE

SEQ ID NO: 6493 - protein, 2098 aa, synthetic construct
MPAAKRVKLDGGDKKYSIGLDIGTNSVGWAVITDEYKVPSKKFKVLGNTDRHSIKKNLIGALLFDSGETAEATRLKRTARRRYTRRKNRICYLQEIFSNEMAKVDDSFFHRLEESFLVEEDKKHERHPIFGNIVDEVAYHEKYPTIYHLRKKLVDSTDKADLRLIYLALAHMIKFRGHFLIEGDLNPDNSDVDKLFIQLVQTYNQLFEENPINASGVDAKAILSARLSKSRRLENLIAQLPGEKKNGLFGNLIALSLGLTPNFKSNFDLAEDAKLQLSKDTYDDDLDNLLAQIGDQYADLFLAAKNLSDAILLSDILRVNTEITKAPLSASMIKRYDEHHQDLTLLKALVRQQLPEKYKEIFFDQSKNGYAGYIDGGASQEEFYKFIKPILEKMDGTEELLVKLNREDLLRKQRTFDNGSIPHQIHLGELHAILRRQEDFYPFLKDNREKIEKILTFRIPYYVGPLARGNSRFAWMTRKSEETITPWNFEEVVDKGASAQSFIERMTNFDKNLPNEKVLPKHSLLYEYFTVYNELTKVKYVTEGMRKPAFLSGEQKKAIVDLLFKTNRKVTVKQLKEDYFKKIECFDSVEISGVEDRFNASLGTYHDLLKIIKDKDFLDNEENEDILEDIVLTLTLFEDREMIEERLKTYAHLFDDKVMKQLKRRRYTGWGRLSRKLINGIRDKQSGKTILDFLKSDGFANRNFMQLIHDDSLTFKEDIQKAQVSGQGDSLHEHIANLAGSPAIKKGILQTVKVVDELVKVMGRHKPENIVIEMARENQTTQKGQKNSRERMKRIEEGIKELGSQILKEHPVENTQLQNEKLYLYYLQNGRDMYVDQELDINRLSDYDVDHIVPQSFLKDDSIDNKVLTRSDKARGKSDNVPSEEVVKKMKNYWRQLLNAKLITQRKFDNLTKAERGGLSELDKAGFIKRQLVETRQITKHVAQILDSRMNTKYDENDKLIREVKVITLKSKLVSDFRKDFQFYKVREINNYHHAHDAYLNAVVGTALIKKYPKLESEFVYGDYKVYDVRKMIAKSEQEIGKATAKYFFYSNIMNFFKTEITLANGEIRKRPLIETNGETGEIVWDKGRDFATVRKVLSMPQVNIVKKTEVQTGGFSKESILPKRNSDKLIARKKDWDPKKYGGFDSPTVAYSVLVVAKVEKGKSKKLKSVKELLGITIMERSSFEKNPIDFLEAKGYKEVKKDLIIKLPKYSLFELENGRKRMLASAGELQKGNELALPSKYVNFLYLASHYEKLKGSPEDNEQKQLFVEQHKHYLDEIIEQISEFSKRVILADANLDKVLSAYNKHRDKPIREQAENIIHLFTLTNLGAPAAFKYFDTTIDRKRYTSTKEVLDATLIHQSITGLYETRIDLSQLGGDGGPAPAPAPGGTVSLQDEHRLFDIPVTTSLPDVWLQDFPQAWAETGGLGRAKCQAPIIIDLKPTAVPVSIKQYPMSLEAHMGIRQHIIKFLELGVLRPCRSPWNTPLLPVKKPGTQDYRPVQDLREINKRTVDIHPTVPNPYNLLSTLKPDYSWYTVLDLKDAFFCLPLAPQSQELFAFEWKDPERGISGQLTWTRLPQGFKNSPTLFNEALHRDLTDFRTQHPEVTLLQYVDDLLLAAPTKKACTQGTRHLLQELGEKGYRASAKKAQICQTKVTYLGYILSEGKRWLTPGRIETVARIPPPRNPREVREFLGTAGFCRLWIPGFAELAAPLYALTKPSTPFTWQTEHQLAFEALKKALLSAPALGLPDTSKPFTLFLDERQGIAKGVLTQKLGPWKRPVAYLSKKLDPVAAGWPPCLRIMAATAMLVKDSAKLTLGQPLTVITPHTLEAIVRQPPDRWITNARLTHYQALLLDTDRVQFGPPVTLNPATLLPVPENQPSPHDCRQVLAETHGTREDLKDQELPDADHTWYTDGSSYLDSGTRRAGAAVVDGHNTIWAQSLPPGTSAQKAELIALTKALELSKGKKANIYTDSRYAFATAHTHGSIYERRGWLTSEGKEIKNKAEIIALLKALFLPQEVAIIHCPGHQKGQDPVAVGNRQADRVARQAAMAEVLTLATEPDNTSHITAGKRTADGSEFEKRTADGSEFESPKKKAKVE

SEQ ID NO: 6494 - protein, 2169 aa, synthetic construct
MPAAKRVKLDGGDKKYSIGLDIGTNSVGWAVITDEYKVPSKKFKVLGNTDRHSIKKNLIGALLFDSGETAEATRLKRTARRRYTRRKNRICYLQEIFSNEMAKVDDSFFHRLEESFLVEEDKKHERHPIFGNIVDEVAYHEKYPTIYHLRKKLVDSTDKADLRLIYLALAHMIKFRGHFLIEGDLNPDNSDVDKLFIQLVQTYNQLFEENPINASGVDAKAILSARLSKSRRLENLIAQLPGEKKNGLFGNLIALSLGLTPNFKSNFDLAEDAKLQLSKDTYDDDLDNLLAQIGDQYADLFLAAKNLSDAILLSDILRVNTEITKAPLSASMIKRYDEHHQDLTLLKALVRQQLPEKYKEIFFDQSKNGYAGYIDGGASQEEFYKFIKPILEKMDGTEELLVKLNREDLLRKQRTFDNGSIPHQIHLGELHAILRRQEDFYPFLKDNREKIEKILTFRIPYYVGPLARGNSRFAWMTRKSEETITPWNFEEVVDKGASAQSFIERMTNFDKNLPNEKVLPKHSLLYEYFTVYNELTKVKYVTEGMRKPAFLSGEQKKAIVDLLFKTNRKVTVKQLKEDYFKKIECFDSVEISGVEDRFNASLGTYHDLLKIIKDKDFLDNEENEDILEDIVLTLTLFEDREMIEERLKTYAHLFDDKVMKQLKRRRYTGWGRLSRKLINGIRDKQSGKTILDFLKSDGFANRNFMQLIHDDSLTFKEDIQKAQVSGQGDSLHEHIANLAGSPAIKKGILQTVKVVDELVKVMGRHKPENIVIEMARENQTTQKGQKNSRERMKRIEEGIKELGSQILKEHPVENTQLQNEKLYLYYLQNGRDMYVDQELDINRLSDYDVDHIVPQSFLKDDSIDNKVLTRSDKARGKSDNVPSEEVVKKMKNYWRQLLNAKLITQRKFDNLTKAERGGLSELDKAGFIKRQLVETRQITKHVAQILDSRMNTKYDENDKLIREVKVITLKSKLVSDFRKDFQFYKVREINNYHHAHDAYLNAVVGTALIKKYPKLESEFVYGDYKVYDVRKMIAKSEQEIGKATAKYFFYSNIMNFFKTEITLANGEIRKRPLIETNGETGEIVWDKGRDFATVRKVLSMPQVNIVKKTEVQTGGFSKESILPKRNSDKLIARKKDWDPKKYGGFDSPTVAYSVLVVAKVEKGKSKKLKSVKELLGITIMERSSFEKNPIDFLEAKGYKEVKKDLIIKLPKYSLFELENGRKRMLASAGELQKGNELALPSKYVNFLYLASHYEKLKGSPEDNEQKQLFVEQHKHYLDEIIEQISEFSKRVILADANLDKVLSAYNKHRDKPIREQAENIIHLFTLTNLGAPAAFKYFDTTIDRKRYTSTKEVLDATLIHQSITGLYETRIDLSQLGGDGGPAPAPAPGGMDLLKPLTVERKGVKIKGYWNSQADITCVPKDLLQGEEPVRQQNVTTIHGTQEGDVYYVNLKIDGRRINTEVIGTTLDYAIITPGDVPWILKKPLELTIKLDLEEQQGTLLNNSILSKKGKEELKQLFEKYSALWQSWENQVGHRRIRPHKIATGTVKPTPQKQYHINPKAKPDIQIVINDLLKQGVLIQKESTMNTPVYPVPKPNGRWRMVLDYRAVNKVTPLIAVQNQHSYGILGSLFKGRYKTTIDLSNGFWAHPIVPEDYWITAFTWQGKQYCWTVLPQGFLNSPGLFNGDVVDLLQGIPNVEVYVDDVYISHDSEKEHLEYLDILFNRLKEAGYIISLKKSNIANSIVDFLGFQITNEGRGLTDTFKEKLENITAPTTLKQLQSILGLLNFARNFIPDFTELIAPLYALIPKSPKNYVPWQIEHSTTLETLITKLNGAEYLQGRKGDKTLIMKVNASYTTGYIRYYNEGEKKPISYVSIVFSKTELKFTELEKLLTTVHKGLLKALDLSMGQNIHVYSPIVSMQNIQKTPQTAKKALASRWLSWLSYLEDPRIRFFYDPQMPALKDLPAVDTGKDNKKHPSNFQHIFYTDGSAITSPTKEGHLNAGMGIVYFINKDGNLQKQQEWSISLGNHTAQFAEIAAFEFALKKCLPLGGNILVVTDSNYVAKAYNEELDVWASNGFVNNRKKPLKHISKWKSVADLKRLRPDVVVTHEPGHQKLDSSPHAYGNNLADQLATQASFKVHAGKRTADGSEFEKRTADGSEFESPKKKAKVE

SEQ ID NO: 6495 - protein, 2091 aa, synthetic construct
MPAAKRVKLDGGDKKYSIGLDIGTNSVGWAVITDEYKVPSKKFKVLGNTDRHSIKKNLIGALLFDSGETAEATRLKRTARRRYTRRKNRICYLQEIFSNEMAKVDDSFFHRLEESFLVEEDKKHERHPIFGNIVDEVAYHEKYPTIYHLRKKLVDSTDKADLRLIYLALAHMIKFRGHFLIEGDLNPDNSDVDKLFIQLVQTYNQLFEENPINASGVDAKAILSARLSKSRRLENLIAQLPGEKKNGLFGNLIALSLGLTPNFKSNFDLAEDAKLQLSKDTYDDDLDNLLAQIGDQYADLFLAAKNLSDAILLSDILRVNTEITKAPLSASMIKRYDEHHQDLTLLKALVRQQLPEKYKEIFFDQSKNGYAGYIDGGASQEEFYKFIKPILEKMDGTEELLVKLNREDLLRKQRTFDNGSIPHQIHLGELHAILRRQEDFYPFLKDNREKIEKILTFRIPYYVGPLARGNSRFAWMTRKSEETITPWNFEEVVDKGASAQSFIERMTNFDKNLPNEKVLPKHSLLYEYFTVYNELTKVKYVTEGMRKPAFLSGEQKKAIVDLLFKTNRKVTVKQLKEDYFKKIECFDSVEISGVEDRFNASLGTYHDLLKIIKDKDFLDNEENEDILEDIVLTLTLFEDREMIEERLKTYAHLFDDKVMKQLKRRRYTGWGRLSRKLINGIRDKQSGKTILDFLKSDGFANRNFMQLIHDDSLTFKEDIQKAQVSGQGDSLHEHIANLAGSPAIKKGILQTVKVVDELVKVMGRHKPENIVIEMARENQTTQKGQKNSRERMKRIEEGIKELGSQILKEHPVENTQLQNEKLYLYYLQNGRDMYVDQELDINRLSDYDVDHIVPQSFLKDDSIDNKVLTRSDKARGKSDNVPSEEVVKKMKNYWRQLLNAKLITQRKFDNLTKAERGGLSELDKAGFIKRQLVETRQITKHVAQILDSRMNTKYDENDKLIREVKVITLKSKLVSDFRKDFQFYKVREINNYHHAHDAYLNAVVGTALIKKYPKLESEFVYGDYKVYDVRKMIAKSEQEIGKATAKYFFYSNIMNFFKTEITLANGEIRKRPLIETNGETGEIVWDKGRDFATVRKVLSMPQVNIVKKTEVQTGGFSKESILPKRNSDKLIARKKDWDPKKYGGFDSPTVAYSVLVVAKVEKGKSKKLKSVKELLGITIMERSSFEKNPIDFLEAKGYKEVKKDLIIKLPKYSLFELENGRKRMLASAGELQKGNELALPSKYVNFLYLASHYEKLKGSPEDNEQKQLFVEQHKHYLDEIIEQISEFSKRVILADANLDKVLSAYNKHRDKPIREQAENIIHLFTLTNLGAPAAFKYFDTTIDRKRYTSTKEVLDATLIHQSITGLYETRIDLSQLGGDGGPAPAPAPGGTLQLEEEYRLFEPESTQKQEMDIWLKNFPQAWAETGGMGTAHCQAPVLIQLKATATPISIRQYPMPHEAYQGIKPHIRRMLDQGILKPCQSPWNTPLLPVKKPGTEDYRPVQDLREVNKRVEDIHPTVPNPYNLLSTLPPSHPWYTVLDLKDAFFCLRLHSESQLLFAFEWRDPEIGLSGQLTWTRLPQGFKNSPTLFNEALHSDLADFRVRYPALVLLQYVDDLLLAAATRTECLEGTKALLETLGNKGYRASAKKAQICLQEVTYLGYSLKDGQRWLTKARKEAILSIPVPKNSRQVREFLGTAGYCRLWIPGFAELAAPLYPLTRPGTLFQWGTEQQLAFEDIKKALLSSPALGLPDITKPFELFIDENSGFAKGVLVQKLGPWKRPVAYLSKKLDTVASGWPPCLRMVAAIAILVKDAGKLTLGQPLTILTSHPVEALVRQPPNKWLSNARMTHYQAMLLDAERVHFGPTVSLNPATLLPLPSGGNHHDCLQILAETHGTRPDLTDQPLPDADLTWYTDGSSFIRNGEREAGAAVTTESEVIWAAPLPPGTSAQRAELIALTQALKMAEGKKLTVYTDSRYAFATTHVHGEIYRRRGWLTSEGKEIKNKNEILALLEALFLPKRLSIIHCPGHQKGDSPQAKGNRLADDTAKKAATETHSSLTVLPAGKRTADGSEFEKRTADGSEFESPKKKAKVE

SEQ ID NO: 6496 - protein, 2091 aa, synthetic construct
MPAAKRVKLDGGDKKYSIGLDIGTNSVGWAVITDEYKVPSKKFKVLGNTDRHSIKKNLIGALLFDSGETAEATRLKRTARRRYTRRKNRICYLQEIFSNEMAKVDDSFFHRLEESFLVEEDKKHERHPIFGNIVDEVAYHEKYPTIYHLRKKLVDSTDKADLRLIYLALAHMIKFRGHFLIEGDLNPDNSDVDKLFIQLVQTYNQLFEENPINASGVDAKAILSARLSKSRRLENLIAQLPGEKKNGLFGNLIALSLGLTPNFKSNFDLAEDAKLQLSKDTYDDDLDNLLAQIGDQYADLFLAAKNLSDAILLSDILRVNTEITKAPLSASMIKRYDEHHQDLTLLKALVRQQLPEKYKEIFFDQSKNGYAGYIDGGASQEEFYKFIKPILEKMDGTEELLVKLNREDLLRKQRTFDNGSIPHQIHLGELHAILRRQEDFYPFLKDNREKIEKILTFRIPYYVGPLARGNSRFAWMTRKSEETITPWNFEEVVDKGASAQSFIERMTNFDKNLPNEKVLPKHSLLYEYFTVYNELTKVKYVTEGMRKPAFLSGEQKKAIVDLLFKTNRKVTVKQLKEDYFKKIECFDSVEISGVEDRFNASLGTYHDLLKIIKDKDFLDNEENEDILEDIVLTLTLFEDREMIEERLKTYAHLFDDKVMKQLKRRRYTGWGRLSRKLINGIRDKQSGKTILDFLKSDGFANRNFMQLIHDDSLTFKEDIQKAQVSGQGDSLHEHIANLAGSPAIKKGILQTVKVVDELVKVMGRHKPENIVIEMARENQTTQKGQKNSRERMKRIEEGIKELGSQILKEHPVENTQLQNEKLYLYYLQNGRDMYVDQELDINRLSDYDVDHIVPQSFLKDDSIDNKVLTRSDKARGKSDNVPSEEVVKKMKNYWRQLLNAKLITQRKFDNLTKAERGGLSELDKAGFIKRQLVETRQITKHVAQILDSRMNTKYDENDKLIREVKVITLKSKLVSDFRKDFQFYKVREINNYHHAHDAYLNAVVGTALIKKYPKLESEFVYGDYKVYDVRKMIAKSEQEIGKATAKYFFYSNIMNFFKTEITLANGEIRKRPLIETNGETGEIVWDKGRDFATVRKVLSMPQVNIVKKTEVQTGGFSKESILPKRNSDKLIARKKDWDPKKYGGFDSPTVAYSVLVVAKVEKGKSKKLKSVKELLGITIMERSSFEKNPIDFLEAKGYKEVKKDLIIKLPKYSLFELENGRKRMLASAGELQKGNELALPSKYVNFLYLASHYEKLKGSPEDNEQKQLFVEQHKHYLDEIIEQISEFSKRVILADANLDKVLSAYNKHRDKPIREQAENIIHLFTLTNLGAPAAFKYFDTTIDRKRYTSTKEVLDATLIHQSITGLYETRIDLSQLGGDGGPAPAPAPGGTLQLEEEYRLFEPESTQKQEMDIWLKNFPQAWAETGGMGTAHCQAPVLIQLKATATPISIRQYPMPHEAYQGIKPHIRRMLDQGILKPCQSPWNTPLLPVKKPGTEDYRPVQDLREVNKRVEDIHPTVPNPYNLLSTLPPSHPWYTVLDLKDAFFCLRLHSESQLLFAFEWRDPEIGLSGQLTWTRLPQGFKNSPTLFNEALHSDLADFRVRYPALVLLQYVDDLLLAAATRTECLEGTKALLETLGNKGYRASAKKAQICLQEVTYLGYSLKDGQRWLTKARKEAILSIPVPKNSRQVREFLGKAGYCRLFIPGFAELAAPLYPLTRPGTLFQWGTEQQLAFEDIKKALLSSPALGLPDITKPFELFIDENSGFAKGVLVQKLGPWKRPVAYLSKKLDTVASGWPPCLRMVAAIAILVKDAGKLTLGQPLTILTSHPVEALVRQPPNKWLSNARMTHYQAMLLDAERVHFGPTVSLNPATLLPLPSGGNHHDCLQILAETHGTRPDLTDQPLPDADLTWYTDGSSFIRNGEREAGAAVTTESEVIWAAPLPPGTSAQRAELIALTQALKMAEGKKLTVYTDSRYAFATTHVHGEIYRRRGWLTSEGKEIKNKNEILALLEALFLPKRLSIIHCPGHQKGDSPQAKGNRLADDTAKKAATETHSSLTVLPAGKRTADGSEFEKRTADGSEFESPKKKAKVE

SEQ ID NO: 6497 - protein, 2090 aa, synthetic construct
MPAAKRVKLDGGDKKYSIGLDIGTNSVGWAVITDEYKVPSKKFKVLGNTDRHSIKKNLIGALLFDSGETAEATRLKRTARRRYTRRKNRICYLQEIFSNEMAKVDDSFFHRLEESFLVEEDKKHERHPIFGNIVDEVAYHEKYPTIYHLRKKLVDSTDKADLRLIYLALAHMIKFRGHFLIEGDLNPDNSDVDKLFIQLVQTYNQLFEENPINASGVDAKAILSARLSKSRRLENLIAQLPGEKKNGLFGNLIALSLGLTPNFKSNFDLAEDAKLQLSKDTYDDDLDNLLAQIGDQYADLFLAAKNLSDAILLSDILRVNTEITKAPLSASMIKRYDEHHQDLTLLKALVRQQLPEKYKEIFFDQSKNGYAGYIDGGASQEEFYKFIKPILEKMDGTEELLVKLNREDLLRKQRTFDNGSIPHQIHLGELHAILRRQEDFYPFLKDNREKIEKILTFRIPYYVGPLARGNSRFAWMTRKSEETITPWNFEEVVDKGASAQSFIERMTNFDKNLPNEKVLPKHSLLYEYFTVYNELTKVKYVTEGMRKPAFLSGEQKKAIVDLLFKTNRKVTVKQLKEDYFKKIECFDSVEISGVEDRFNASLGTYHDLLKIIKDKDFLDNEENEDILEDIVLTLTLFEDREMIEERLKTYAHLFDDKVMKQLKRRRYTGWGRLSRKLINGIRDKQSGKTILDFLKSDGFANRNFMQLIHDDSLTFKEDIQKAQVSGQGDSLHEHIANLAGSPAIKKGILQTVKVVDELVKVMGRHKPENIVIEMARENQTTQKGQKNSRERMKRIEEGIKELGSQILKEHPVENTQLQNEKLYLYYLQNGRDMYVDQELDINRLSDYDVDHIVPQSFLKDDSIDNKVLTRSDKARGKSDNVPSEEVVKKMKNYWRQLLNAKLITQRKFDNLTKAERGGLSELDKAGFIKRQLVETRQITKHVAQILDSRMNTKYDENDKLIREVKVITLKSKLVSDFRKDFQFYKVREINNYHHAHDAYLNAVVGTALIKKYPKLESEFVYGDYKVYDVRKMIAKSEQEIGKATAKYFFYSNIMNFFKTEITLANGEIRKRPLIETNGETGEIVWDKGRDFATVRKVLSMPQVNIVKKTEVQTGGFSKESILPKRNSDKLIARKKDWDPKKYGGFDSPTVAYSVLVVAKVEKGKSKKLKSVKELLGITIMERSSFEKNPIDFLEAKGYKEVKKDLIIKLPKYSLFELENGRKRMLASAGELQKGNELALPSKYVNFLYLASHYEKLKGSPEDNEQKQLFVEQHKHYLDEIIEQISEFSKRVILADANLDKVLSAYNKHRDKPIREQAENIIHLFTLTNLGAPAAFKYFDTTIDRKRYTSTKEVLDATLIHQSITGLYETRIDLSQLGGDGGPAPAPAPGGVLNLEEEYRLHEKPVPSSIDPSWLQLFPTVWAERAGMGLANQVPPVVVELRSGASPVAVRQYPMSKEAREGIRPHIQKFLDLGVLVPCRSPWNTPLLPVKKPGTNDYRPVQDLREINKRVQDIHPTVPNPYNLLSSLPPSYTWYSVLDLKDAFFCLRLHPNSQPLFAFEWKDPEKGNTGQLTWTRLPQGFKNSPTLFNEALHRDLAPFRALNPQVVLLQYVDDLLVAAPTYEDCKKGTQKLLQELSKLGYRVSAKKAQLCQREVTYLGYLLKEGKRWLTPARKATVMKIPVPTTPRQVREFLGKAGFCRLFIPGFASLAAPLYPLTKPSIPFIWTEEHQQAFDHIKKALLSAPALALPDLTKPFTLYIDERAGVARGVLTQTLGPWRRPVAYLSKKLDPVASGWPTCLKAVAAVALLLKDADKLTLGQNVTVIASHSLESIVRQPPDRWMTNARMTHYQSLLLNERVSFAPPAVLNPATLLPVESEATPVHRCSEILAEETGTRRDLEDQPLPGVPTWYTDGSSFITEGKRRAGAPIVDGKRTVWASSLPEGTSAQKAELVALTQALRLAEGKNINIYTDSRYAFATAHIHGAIYKQRGWLTSAGKDIKNKEEILALLEAIHLPRRVAIIHCPGHQRGSNPVATGNRRADEAAKQAALSTRVLAGTTKPAGKRTADGSEFEKRTADGSEFESPKKKAKVE

SEQ ID NO: 6498 - protein, 2005 aa, synthetic construct
MPAAKRVKLDGGDKKYSIGLDIGTNSVGWAVITDEYKVPSKKFKVLGNTDRHSIKKNLIGALLFDSGETAEATRLKRTARRRYTRRKNRICYLQEIFSNEMAKVDDSFFHRLEESFLVEEDKKHERHPIFGNIVDEVAYHEKYPTIYHLRKKLVDSTDKADLRLIYLALAHMIKFRGHFLIEGDLNPDNSDVDKLFIQLVQTYNQLFEENPINASGVDAKAILSARLSKSRRLENLIAQLPGEKKNGLFGNLIALSLGLTPNFKSNFDLAEDAKLQLSKDTYDDDLDNLLAQIGDQYADLFLAAKNLSDAILLSDILRVNTEITKAPLSASMIKRYDEHHQDLTLLKALVRQQLPEKYKEIFFDQSKNGYAGYIDGGASQEEFYKFIKPILEKMDGTEELLVKLNREDLLRKQRTFDNGSIPHQIHLGELHAILRRQEDFYPFLKDNREKIEKILTFRIPYYVGPLARGNSRFAWMTRKSEETITPWNFEEVVDKGASAQSFIERMTNFDKNLPNEKVLPKHSLLYEYFTVYNELTKVKYVTEGMRKPAFLSGEQKKAIVDLLFKTNRKVTVKQLKEDYFKKIECFDSVEISGVEDRFNASLGTYHDLLKIIKDKDFLDNEENEDILEDIVLTLTLFEDREMIEERLKTYAHLFDDKVMKQLKRRRYTGWGRLSRKLINGIRDKQSGKTILDFLKSDGFANRNFMQLIHDDSLTFKEDIQKAQVSGQGDSLHEHIANLAGSPAIKKGILQTVKVVDELVKVMGRHKPENIVIEMARENQTTQKGQKNSRERMKRIEEGIKELGSQILKEHPVENTQLQNEKLYLYYLQNGRDMYVDQELDINRLSDYDVDHIVPQSFLKDDSIDNKVLTRSDKARGKSDNVPSEEVVKKMKNYWRQLLNAKLITQRKFDNLTKAERGGLSELDKAGFIKRQLVETRQITKHVAQILDSRMNTKYDENDKLIREVKVITLKSKLVSDFRKDFQFYKVREINNYHHAHDAYLNAVVGTALIKKYPKLESEFVYGDYKVYDVRKMIAKSEQEIGKATAKYFFYSNIMNFFKTEITLANGEIRKRPLIETNGETGEIVWDKGRDFATVRKVLSMPQVNIVKKTEVQTGGFSKESILPKRNSDKLIARKKDWDPKKYGGFDSPTVAYSVLVVAKVEKGKSKKLKSVKELLGITIMERSSFEKNPIDFLEAKGYKEVKKDLIIKLPKYSLFELENGRKRMLASAGELQKGNELALPSKYVNFLYLASHYEKLKGSPEDNEQKQLFVEQHKHYLDEIIEQISEFSKRVILADANLDKVLSAYNKHRDKPIREQAENIIHLFTLTNLGAPAAFKYFDTTIDRKRYTSTKEVLDATLIHQSITGLYETRIDLSQLGGDGGPAPAPAPGGHLPPPPQVDQFPLNLPERLQALNDLVSKALEAGHIEPYSGPGNNPVFPVKKPNGKWRFIHDLRATNAITTTLTSPSPGPPDLTSLPTALPHLQTIDLTDAFFQIPLPKQYQPYFAFTIPQPCNYGPGTRYAWTVLPQGFKNSPTLFQQQLAAVLNPMRKMFPTSTIVQYMDDILLASPTNEELQQLSQLTLQALTTHGLPISQEKTQQTPGQIRFLGQVISPNHITYESTPTIPIKSQWTLTELQVILGEIQWVSKGTPILRKHLQSLYSALHPYRDPRACITLTPQQLHALHAIQQALQHNCRGRLNPALPLLGLISLSTSGTTSVIFQPKQNWPLAWLHTPHPPTSLCPWGHLLACTILTLDKYTLQHYGQLCQSFHHNMSKQALCDFLRNSPHPSVGILIHHMGRFHNLGSQPSGPWKTLLHLPTLLQEPRLLRPIFTLSPVVLDTAPCLFSDGSPQKAAYVLWDQTILQQDITPLPSHETHSAQKGELLALICGLRAAKPWPSLNIFLDSKYLIKYLHSLAIGAFLGTSAHQTLQAALPPLLQGKTIYLHHVRSHTNLPDPISTFNEYTDSLILAPLVPLAGKRTADGSEFEKRTADGSEFESPKKKAKVE

SEQ ID NO: 6499 - protein, 2214 aa, synthetic construct
MPAAKRVKLDGGDKKYSIGLDIGTNSVGWAVITDEYKVPSKKFKVLGNTDRHSIKKNLIGALLFDSGETAEATRLKRTARRRYTRRKNRICYLQEIFSNEMAKVDDSFFHRLEESFLVEEDKKHERHPIFGNIVDEVAYHEKYPTIYHLRKKLVDSTDKADLRLIYLALAHMIKFRGHFLIEGDLNPDNSDVDKLFIQLVQTYNQLFEENPINASGVDAKAILSARLSKSRRLENLIAQLPGEKKNGLFGNLIALSLGLTPNFKSNFDLAEDAKLQLSKDTYDDDLDNLLAQIGDQYADLFLAAKNLSDAILLSDILRVNTEITKAPLSASMIKRYDEHHQDLTLLKALVRQQLPEKYKEIFFDQSKNGYAGYIDGGASQEEFYKFIKPILEKMDGTEELLVKLNREDLLRKQRTFDNGSIPHQIHLGELHAILRRQEDFYPFLKDNREKIEKILTFRIPYYVGPLARGNSRFAWMTRKSEETITPWNFEEVVDKGASAQSFIERMTNFDKNLPNEKVLPKHSLLYEYFTVYNELTKVKYVTEGMRKPAFLSGEQKKAIVDLLFKTNRKVTVKQLKEDYFKKIECFDSVEISGVEDRFNASLGTYHDLLKIIKDKDFLDNEENEDILEDIVLTLTLFEDREMIEERLKTYAHLFDDKVMKQLKRRRYTGWGRLSRKLINGIRDKQSGKTILDFLKSDGFANRNFMQLIHDDSLTFKEDIQKAQVSGQGDSLHEHIANLAGSPAIKKGILQTVKVVDELVKVMGRHKPENIVIEMARENQTTQKGQKNSRERMKRIEEGIKELGSQILKEHPVENTQLQNEKLYLYYLQNGRDMYVDQELDINRLSDYDVDHIVPQSFLKDDSIDNKVLTRSDKARGKSDNVPSEEVVKKMKNYWRQLLNAKLITQRKFDNLTKAERGGLSELDKAGFIKRQLVETRQITKHVAQILDSRMNTKYDENDKLIREVKVITLKSKLVSDFRKDFQFYKVREINNYHHAHDAYLNAVVGTALIKKYPKLESEFVYGDYKVYDVRKMIAKSEQEIGKATAKYFFYSNIMNFFKTEITLANGEIRKRPLIETNGETGEIVWDKGRDFATVRKVLSMPQVNIVKKTEVQTGGFSKESILPKRNSDKLIARKKDWDPKKYGGFDSPTVAYSVLVVAKVEKGKSKKLKSVKELLGITIMERSSFEKNPIDFLEAKGYKEVKKDLIIKLPKYSLFELENGRKRMLASAGELQKGNELALPSKYVNFLYLASHYEKLKGSPEDNEQKQLFVEQHKHYLDEIIEQISEFSKRVILADANLDKVLSAYNKHRDKPIREQAENIIHLFTLTNLGAPAAFKYFDTTIDRKRYTSTKEVLDATLIHQSITGLYETRIDLSQLGGDGGPAPAPAPGGTLGDQGSRGSDPLPEPRVTLTVEGIPTEFLVNTGAEHSVLTKPMGKMGSKRTVVAGATGSKVYPWTTKRLLKIGQKQVTHSFLVIPECPAPLLGRDLLTKLKAQIQFSTEGPQVTWEDRPAMCLVLNLEEEYRLHEKPVPPSIDPSWLQLFPMVWAEKAGMGLANQVPPVVVELKSDASPVAVRQYPMSKEAREGIRPHIQRFLDLGILVPCQSPWNTPLLPVKKPGTNDYRPVQDLREVNKRVQDIHPTVPNPYNLLSSLPPSHTWYSVLDLKDAFFCLKLHPNSQPLFAFEWRDPEKGNTGQLTWTRLPQGFKNSPTLFNEALHRDLASFRALNPQVVMLQYVDDLLVAAPTYRDCKEGTRRLLQELSKLGYRVSAKKAQLCREEVTYLGYLLKGGKRWLTPARKATVMKIPTPTTPRQVREFLGKAGFCRLFIPGFASLAAPLYPLTRPKVPFTWTEAHQEAFGRIKEALLSAPALALPDLTKPFALYVDEKEGVARGVLTQTLGPWRRPVAYLSKKLDPVASGWPTCLKAIAAVALLLKDADKLTLGQNVLVIAPHNLESIVRQPPDRWMTNARMTHYQSLLLNERVSFAPPAILNPATLLPVESDDTPIHICSEILAEETGTRPDLRDQPLPGVPAWYTDGSSFIMDGRRQAGAAIVDNKRTVWASNLPEGTSAQKAELIALTQALRLAEGKSINIYTDSRYAFATAHVHGAIYKQRGWLTSAGKDIKNKEEILALLEAIHLPKRVAIIHCPGHQRGTDPVATGNRKADEAAKQAAQSTRILTETTKNAGKRTADGSEFEKRTADGSEFESPKKKAKVE

SEQ ID NO: 6500 - protein, 2092 aa, synthetic construct
MPAAKRVKLDGGDKKYSIGLDIGTNSVGWAVITDEYKVPSKKFKVLGNTDRHSIKKNLIGALLFDSGETAEATRLKRTARRRYTRRKNRICYLQEIFSNEMAKVDDSFFHRLEESFLVEEDKKHERHPIFGNIVDEVAYHEKYPTIYHLRKKLVDSTDKADLRLIYLALAHMIKFRGHFLIEGDLNPDNSDVDKLFIQLVQTYNQLFEENPINASGVDAKAILSARLSKSRRLENLIAQLPGEKKNGLFGNLIALSLGLTPNFKSNFDLAEDAKLQLSKDTYDDDLDNLLAQIGDQYADLFLAAKNLSDAILLSDILRVNTEITKAPLSASMIKRYDEHHQDLTLLKALVRQQLPEKYKEIFFDQSKNGYAGYIDGGASQEEFYKFIKPILEKMDGTEELLVKLNREDLLRKQRTFDNGSIPHQIHLGELHAILRRQEDFYPFLKDNREKIEKILTFRIPYYVGPLARGNSRFAWMTRKSEETITPWNFEEVVDKGASAQSFIERMTNFDKNLPNEKVLPKHSLLYEYFTVYNELTKVKYVTEGMRKPAFLSGEQKKAIVDLLFKTNRKVTVKQLKEDYFKKIECFDSVEISGVEDRFNASLGTYHDLLKIIKDKDFLDNEENEDILEDIVLTLTLFEDREMIEERLKTYAHLFDDKVMKQLKRRRYTGWGRLSRKLINGIRDKQSGKTILDFLKSDGFANRNFMQLIHDDSLTFKEDIQKAQVSGQGDSLHEHIANLAGSPAIKKGILQTVKVVDELVKVMGRHKPENIVIEMARENQTTQKGQKNSRERMKRIEEGIKELGSQILKEHPVENTQLQNEKLYLYYLQNGRDMYVDQELDINRLSDYDVDHIVPQSFLKDDSIDNKVLTRSDKARGKSDNVPSEEVVKKMKNYWRQLLNAKLITQRKFDNLTKAERGGLSELDKAGFIKRQLVETRQITKHVAQILDSRMNTKYDENDKLIREVKVITLKSKLVSDFRKDFQFYKVREINNYHHAHDAYLNAVVGTALIKKYPKLESEFVYGDYKVYDVRKMIAKSEQEIGKATAKYFFYSNIMNFFKTEITLANGEIRKRPLIETNGETGEIVWDKGRDFATVRKVLSMPQVNIVKKTEVQTGGFSKESILPKRNSDKLIARKKDWDPKKYGGFDSPTVAYSVLVVAKVEKGKSKKLKSVKELLGITIMERSSFEKNPIDFLEAKGYKEVKKDLIIKLPKYSLFELENGRKRMLASAGELQKGNELALPSKYVNFLYLASHYEKLKGSPEDNEQKQLFVEQHKHYLDEIIEQISEFSKRVILADANLDKVLSAYNKHRDKPIREQAENIIHLFTLTNLGAPAAFKYFDTTIDRKRYTSTKEVLDATLIHQSITGLYETRIDLSQLGGDGGPAPAPAPGGTLNLEDEYRLYETSAEPEVSPGSTWLSDFPQAWAETGGMGLAVRQAPLIIPLKATSTPVSIKQYPMSQEAKLGIKPHIQRLLDQGILVPCQSPWNTPLLPVKKPGTNDYRPVQDLREVNKRVEDIHPTVPNPYNLLSGLPPSHRWYTVLDLKDAFFCLRLHPTSQPLFAFEWRDPGMGISGQLTWTRLPQGFKNSPTLFNEALHRDLADFRIQHPDLILLQYVDDILLAATSELDCQQGTRALLLTLGNLGYRASAKKAQLCQKQVKYLGYLLKEGQRWLTEARKETVMGQPTPKTPRQLREFLGTAGFCRLWIPGFAEMAAPLYPLTKPGTLFNWGPDQQKAYQEIKQALLTAPALGLPDLTKPFELFVDEKQGYAKGVLTQKLGPWRRPVAYLSKKLDPVAAGWPPCLRMVAAIAVLRKDAGKLTMGQPLVILAPHAVEALVKQPPDRWLSNARMTHYQAMLLDTDRVQFGPVVALNPATLLPLPEEGAPHDCLEILAETHGTRPDLTDQPIPDADHTWYTDGSSFLQEGQRKAGAAVTTETEVIWARALPAGTSAQRAELIALTQALKMAEGKRLNVYTDSRYAFATAHIHGEIYRRRGWLTSEGREIKNKSEILALLKALFLPKRLSIIHCLGHQKGDSAEARGNRLADQAAREAAIKTPPDTSTLLAGKRTADGSEFEKRTADGSEFESPKKKAKVE

SEQ ID NO: 6501 - protein, 2092 aa, synthetic construct
MPAAKRVKLDGGDKKYSIGLDIGTNSVGWAVITDEYKVPSKKFKVLGNTDRHSIKKNLIGALLFDSGETAEATRLKRTARRRYTRRKNRICYLQEIFSNEMAKVDDSFFHRLEESFLVEEDKKHERHPIFGNIVDEVAYHEKYPTIYHLRKKLVDSTDKADLRLIYLALAHMIKFRGHFLIEGDLNPDNSDVDKLFIQLVQTYNQLFEENPINASGVDAKAILSARLSKSRRLENLIAQLPGEKKNGLFGNLIALSLGLTPNFKSNFDLAEDAKLQLSKDTYDDDLDNLLAQIGDQYADLFLAAKNLSDAILLSDILRVNTEITKAPLSASMIKRYDEHHQDLTLLKALVRQQLPEKYKEIFFDQSKNGYAGYIDGGASQEEFYKFIKPILEKMDGTEELLVKLNREDLLRKQRTFDNGSIPHQIHLGELHAILRRQEDFYPFLKDNREKIEKILTFRIPYYVGPLARGNSRFAWMTRKSEETITPWNFEEVVDKGASAQSFIERMTNFDKNLPNEKVLPKHSLLYEYFTVYNELTKVKYVTEGMRKPAFLSGEQKKAIVDLLFKTNRKVTVKQLKEDYFKKIECFDSVEISGVEDRFNASLGTYHDLLKIIKDKDFLDNEENEDILEDIVLTLTLFEDREMIEERLKTYAHLFDDKVMKQLKRRRYTGWGRLSRKLINGIRDKQSGKTILDFLKSDGFANRNFMQLIHDDSLTFKEDIQKAQVSGQGDSLHEHIANLAGSPAIKKGILQTVKVVDELVKVMGRHKPENIVIEMARENQTTQKGQKNSRERMKRIEEGIKELGSQILKEHPVENTQLQNEKLYLYYLQNGRDMYVDQELDINRLSDYDVDHIVPQSFLKDDSIDNKVLTRSDKARGKSDNVPSEEVVKKMKNYWRQLLNAKLITQRKFDNLTKAERGGLSELDKAGFIKRQLVETRQITKHVAQILDSRMNTKYDENDKLIREVKVITLKSKLVSDFRKDFQFYKVREINNYHHAHDAYLNAVVGTALIKKYPKLESEFVYGDYKVYDVRKMIAKSEQEIGKATAKYFFYSNIMNFFKTEITLANGEIRKRPLIETNGETGEIVWDKGRDFATVRKVLSMPQVNIVKKTEVQTGGFSKESILPKRNSDKLIARKKDWDPKKYGGFDSPTVAYSVLVVAKVEKGKSKKLKSVKELLGITIMERSSFEKNPIDFLEAKGYKEVKKDLIIKLPKYSLFELENGRKRMLASAGELQKGNELALPSKYVNFLYLASHYEKLKGSPEDNEQKQLFVEQHKHYLDEIIEQISEFSKRVILADANLDKVLSAYNKHRDKPIREQAENIIHLFTLTNLGAPAAFKYFDTTIDRKRYTSTKEVLDATLIHQSITGLYETRIDLSQLGGDGGPAPAPAPGGTLGIEDEYRLHETSTEPDVSLGSTWLSDFPQAWAETGGMGLAVRQAPLIIPLKATSTPVSIQQYPMSHEARLGIKPHIQRLLDQGILVPCQSPWNTPLLPVKKPGTNDYRPVQDLREVNKRVEDIHPTVPNPYNLLSGLPPSHQWYTVLDLKDAFFCLRLHPTSQPLFAFEWRDPGMGISGQLTWTRLPQGFKNSPTLFNEALHRDLADFRIQHPDLILLQYVDDILLAATSELDCQQGTRALLQTLGDLGYRASAKKAQICQKQVKYLGYLLREGQRWLTEARKETVMGQPVPKTPRQLREFLGTAGFCRLWIPGFAEMAAPLYPLTKPGTLFSWGPDQQKAYQEIKQALLTAPALGLPDLTKPFELFVDEKQGYAKGVLTQKLGPWRRPVAYLSKKLDPVAAGWPPCLRMVAAIAVLTKDAGKLTMGQPLVILAPHAVEALVKQPPDRWLSNARMTHYQAMLLDTDRVQFGPVVALNPATLLPLPEEGAPHDCLEILAETHGTRPDLTDQPIPDADHTWYTDGSSFLQEGQRKAGAAVTTETEVIWAGALPAGTSAQRAELIALTQALKMAEGKRLNVYTDSRYAFATAHIHGEIYRRRGWLTSEGREIKNKSEILALLKALFLPKRLSIIHCLGHQKGDSAEARGNRLADQAAREAAIKTPPDTSTLLAGKRTADGSEFEKRTADGSEFESPKKKAKVE

SEQ ID NO: 6502 - protein, 2092 aa, synthetic construct
MPAAKRVKLDGGDKKYSIGLDIGTNSVGWAVITDEYKVPSKKFKVLGNTDRHSIKKNLIGALLFDSGETAEATRLKRTARRRYTRRKNRICYLQEIFSNEMAKVDDSFFHRLEESFLVEEDKKHERHPIFGNIVDEVAYHEKYPTIYHLRKKLVDSTDKADLRLIYLALAHMIKFRGHFLIEGDLNPDNSDVDKLFIQLVQTYNQLFEENPINASGVDAKAILSARLSKSRRLENLIAQLPGEKKNGLFGNLIALSLGLTPNFKSNFDLAEDAKLQLSKDTYDDDLDNLLAQIGDQYADLFLAAKNLSDAILLSDILRVNTEITKAPLSASMIKRYDEHHQDLTLLKALVRQQLPEKYKEIFFDQSKNGYAGYIDGGASQEEFYKFIKPILEKMDGTEELLVKLNREDLLRKQRTFDNGSIPHQIHLGELHAILRRQEDFYPFLKDNREKIEKILTFRIPYYVGPLARGNSRFAWMTRKSEETITPWNFEEVVDKGASAQSFIERMTNFDKNLPNEKVLPKHSLLYEYFTVYNELTKVKYVTEGMRKPAFLSGEQKKAIVDLLFKTNRKVTVKQLKEDYFKKIECFDSVEISGVEDRFNASLGTYHDLLKIIKDKDFLDNEENEDILEDIVLTLTLFEDREMIEERLKTYAHLFDDKVMKQLKRRRYTGWGRLSRKLINGIRDKQSGKTILDFLKSDGFANRNFMQLIHDDSLTFKEDIQKAQVSGQGDSLHEHIANLAGSPAIKKGILQTVKVVDELVKVMGRHKPENIVIEMARENQTTQKGQKNSRERMKRIEEGIKELGSQILKEHPVENTQLQNEKLYLYYLQNGRDMYVDQELDINRLSDYDVDHIVPQSFLKDDSIDNKVLTRSDKARGKSDNVPSEEVVKKMKNYWRQLLNAKLITQRKFDNLTKAERGGLSELDKAGFIKRQLVETRQITKHVAQILDSRMNTKYDENDKLIREVKVITLKSKLVSDFRKDFQFYKVREINNYHHAHDAYLNAVVGTALIKKYPKLESEFVYGDYKVYDVRKMIAKSEQEIGKATAKYFFYSNIMNFFKTEITLANGEIRKRPLIETNGETGEIVWDKGRDFATVRKVLSMPQVNIVKKTEVQTGGFSKESILPKRNSDKLIARKKDWDPKKYGGFDSPTVAYSVLVVAKVEKGKSKKLKSVKELLGITIMERSSFEKNPIDFLEAKGYKEVKKDLIIKLPKYSLFELENGRKRMLASAGELQKGNELALPSKYVNFLYLASHYEKLKGSPEDNEQKQLFVEQHKHYLDEIIEQISEFSKRVILADANLDKVLSAYNKHRDKPIREQAENIIHLFTLTNLGAPAAFKYFDTTIDRKRYTSTKEVLDATLIHQSITGLYETRIDLSQLGGDGGPAPAPAPGGTLNIEDEYRLHETSKGPDVPLGSTWLSDFPQAWAETGGMGLAVRQAPLIIPLKATSTPVSIKQYPMSQEARLGIKPHIQRLLDQGILVPCQSPWNTPLLPVKKPGTNDYRPVQDLREVNKRVEDIHPTVPNPYNLLSGLPPSHQWYTVLDLKDAFFCLRLHPTSQSLFAFEWRDPEMGISGQLTWTRLPQGFKNSPTLFNEALHRDLADFRIQHPDLILLQYVDDLLLAATSELDCQQGTRALLQTLGDLGYRASAKKAQICQKQVKYLGYLLKEGQRWLTEARKETVMGQPTPKTPRQLREFLGTAGFCRLWIPGFAEMAAPLYPLTKPGTLFEWGPDQQKAYQEIKQALLTAPALGLPDLTKPFELFVDEKQGYAKGVLTQKLGPWRRPVAYLSKKLDPVAAGWPPCLRMVAAIAVLTKDAGKLTMGQPLVILAPHAVEALVKQPPDRWLSNARMTHYQALLLDTDRVQFGPIVALNPATLLPLPEEGLQHDCLDILAEAHGTRPDLTDQPLPDADHTWYTDGSSFLQEGQRKAGAAVTTETEVVWAKALPAGTSAQRAELIALTQALKMAEGKKLNVYTDSRYAFATAHIHGEIYRRRGWLTSEGKEIKNKDEILALLKALFLPKRLSIIHCPGHQKGNRAEARGNRMADQAAREVATRETPETSTLLAGKRTADGSEFEKRTADGSEFESPKKKAKVE

SEQ ID NO: 6503 - protein, 2092 aa, synthetic construct
MPAAKRVKLDGGDKKYSIGLDIGTNSVGWAVITDEYKVPSKKFKVLGNTDRHSIKKNLIGALLFDSGETAEATRLKRTARRRYTRRKNRICYLQEIFSNEMAKVDDSFFHRLEESFLVEEDKKHERHPIFGNIVDEVAYHEKYPTIYHLRKKLVDSTDKADLRLIYLALAHMIKFRGHFLIEGDLNPDNSDVDKLFIQLVQTYNQLFEENPINASGVDAKAILSARLSKSRRLENLIAQLPGEKKNGLFGNLIALSLGLTPNFKSNFDLAEDAKLQLSKDTYDDDLDNLLAQIGDQYADLFLAAKNLSDAILLSDILRVNTEITKAPLSASMIKRYDEHHQDLTLLKALVRQQLPEKYKEIFFDQSKNGYAGYIDGGASQEEFYKFIKPILEKMDGTEELLVKLNREDLLRKQRTFDNGSIPHQIHLGELHAILRRQEDFYPFLKDNREKIEKILTFRIPYYVGPLARGNSRFAWMTRKSEETITPWNFEEVVDKGASAQSFIERMTNFDKNLPNEKVLPKHSLLYEYFTVYNELTKVKYVTEGMRKPAFLSGEQKKAIVDLLFKTNRKVTVKQLKEDYFKKIECFDSVEISGVEDRFNASLGTYHDLLKIIKDKDFLDNEENEDILEDIVLTLTLFEDREMIEERLKTYAHLFDDKVMKQLKRRRYTGWGRLSRKLINGIRDKQSGKTILDFLKSDGFANRNFMQLIHDDSLTFKEDIQKAQVSGQGDSLHEHIANLAGSPAIKKGILQTVKVVDELVKVMGRHKPENIVIEMARENQTTQKGQKNSRERMKRIEEGIKELGSQILKEHPVENTQLQNEKLYLYYLQNGRDMYVDQELDINRLSDYDVDHIVPQSFLKDDSIDNKVLTRSDKARGKSDNVPSEEVVKKMKNYWRQLLNAKLITQRKFDNLTKAERGGLSELDKAGFIKRQLVETRQITKHVAQILDSRMNTKYDENDKLIREVKVITLKSKLVSDFRKDFQFYKVREINNYHHAHDAYLNAVVGTALIKKYPKLESEFVYGDYKVYDVRKMIAKSEQEIGKATAKYFFYSNIMNFFKTEITLANGEIRKRPLIETNGETGEIVWDKGRDFATVRKVLSMPQVNIVKKTEVQTGGFSKESILPKRNSDKLIARKKDWDPKKYGGFDSPTVAYSVLVVAKVEKGKSKKLKSVKELLGITIMERSSFEKNPIDFLEAKGYKEVKKDLIIKLPKYSLFELENGRKRMLASAGELQKGNELALPSKYVNFLYLASHYEKLKGSPEDNEQKQLFVEQHKHYLDEIIEQISEFSKRVILADANLDKVLSAYNKHRDKPIREQAENIIHLFTLTNLGAPAAFKYFDTTIDRKRYTSTKEVLDATLIHQSITGLYETRIDLSQLGGDGGPAPAPAPGGTLNIEDEYRLHETSKGPDVPLGSTWLSDFPQAWAETGGMGLAVRQAPLIIPLKATSTPVSIKQYPMSQEARLGIKPHIQRLLDQGILVPCQSPWNTPLLPVKKPGTNDYRPVQDLREVNKRVEDIHPTVPNPYNLLSGLPPSHQWYTVLDLKDAFFCLRLHPTSQSLFAFEWRDPEMGISGQLTWTRLPQGFKNSPTLFNEALHRDLADFRIQHPDLILLQYVDDLLLAATSELDCQQGTRALLQTLGDLGYRASAKKAQICQKQVKYLGYLLKEGQRWLTEARKETVMGQPTPKTPRQLREFLGKAGFCRLFIPGFAEMAAPLYPLTKPGTLFEWGPDQQKAYQEIKQALLTAPALGLPDLTKPFELFVDEKQGYAKGVLTQKLGPWRRPVAYLSKKLDPVAAGWPPCLRMVAAIAVLTKDAGKLTMGQPLVILAPHAVEALVKQPPDRWLSNARMTHYQALLLDTDRVQFGPIVALNPATLLPLPEEGLQHDCLDILAEAHGTRPDLTDQPLPDADHTWYTDGSSFLQEGQRKAGAAVTTETEVVWAKALPAGTSAQRAELIALTQALKMAEGKKLNVYTDSRYAFATAHIHGEIYRRRGWLTSEGKEIKNKDEILALLKALFLPKRLSIIHCPGHQKGNRAEARGNRMADQAAREVATRETPETSTLLAGKRTADGSEFEKRTADGSEFESPKKKAKVE

SEQ ID NO: 6504 - protein, 2112 aa, synthetic construct; identical to SEQ ID NO: 4508

SEQ ID NO: 6505 - protein, 2112 aa, synthetic construct; identical to SEQ ID NO: 4508

SEQ ID NO: 6506 - protein, 2092 aa, synthetic construct
MPAAKRVKLDGGDKKYSIGLDIGTNSVGWAVITDEYKVPSKKFKVLGNTDRHSIKKNLIGALLFDSGETAEATRLKRTARRRYTRRKNRICYLQEIFSNEMAKVDDSFFHRLEESFLVEEDKKHERHPIFGNIVDEVAYHEKYPTIYHLRKKLVDSTDKADLRLIYLALAHMIKFRGHFLIEGDLNPDNSDVDKLFIQLVQTYNQLFEENPINASGVDAKAILSARLSKSRRLENLIAQLPGEKKNGLFGNLIALSLGLTPNFKSNFDLAEDAKLQLSKDTYDDDLDNLLAQIGDQYADLFLAAKNLSDAILLSDILRVNTEITKAPLSASMIKRYDEHHQDLTLLKALVRQQLPEKYKEIFFDQSKNGYAGYIDGGASQEEFYKFIKPILEKMDGTEELLVKLNREDLLRKQRTFDNGSIPHQIHLGELHAILRRQEDFYPFLKDNREKIEKILTFRIPYYVGPLARGNSRFAWMTRKSEETITPWNFEEVVDKGASAQSFIERMTNFDKNLPNEKVLPKHSLLYEYFTVYNELTKVKYVTEGMRKPAFLSGEQKKAIVDLLFKTNRKVTVKQLKEDYFKKIECFDSVEISGVEDRFNASLGTYHDLLKIIKDKDFLDNEENEDILEDIVLTLTLFEDREMIEERLKTYAHLFDDKVMKQLKRRRYTGWGRLSRKLINGIRDKQSGKTILDFLKSDGFANRNFMQLIHDDSLTFKEDIQKAQVSGQGDSLHEHIANLAGSPAIKKGILQTVKVVDELVKVMGRHKPENIVIEMARENQTTQKGQKNSRERMKRIEEGIKELGSQILKEHPVENTQLQNEKLYLYYLQNGRDMYVDQELDINRLSDYDVDHIVPQSFLKDDSIDNKVLTRSDKARGKSDNVPSEEVVKKMKNYWRQLLNAKLITQRKFDNLTKAERGGLSELDKAGFIKRQLVETRQITKHVAQILDSRMNTKYDENDKLIREVKVITLKSKLVSDFRKDFQFYKVREINNYHHAHDAYLNAVVGTALIKKYPKLESEFVYGDYKVYDVRKMIAKSEQEIGKATAKYFFYSNIMNFFKTEITLANGEIRKRPLIETNGETGEIVWDKGRDFATVRKVLSMPQVNIVKKTEVQTGGFSKESILPKRNSDKLIARKKDWDPKKYGGFDSPTVAYSVLVVAKVEKGKSKKLKSVKELLGITIMERSSFEKNPIDFLEAKGYKEVKKDLIIKLPKYSLFELENGRKRMLASAGELQKGNELALPSKYVNFLYLASHYEKLKGSPEDNEQKQLFVEQHKHYLDEIIEQISEFSKRVILADANLDKVLSAYNKHRDKPIREQAENIIHLFTLTNLGAPAAFKYFDTTIDRKRYTSTKEVLDATLIHQSITGLYETRIDLSQLGGDGGPAPAPAPGGTLNIEDEYRLHEISTEPDVSPGSTWLSDFPQAWAETGGMGLAVRQAPLIIPLKATSTPVSIKQYPMSQEAKLGIKPHIQRLLDQGILVPCQSPWNTPLLPVKKPGTNDYRPVQGLREVNKRVEDIHPTVPNPYNLLSGLPTSHRWYTVLDLKDAFFCLRLHPTSQPLFASEWRDPGMGISGQLTWTRLPQGFKNSPTLFNEALHRGLADFRIQHPDLILLQYVDDLLLAATSELDCQQGTRALLKTLGNLGYRASAKKAQICQKQVKYLGYLLREGQRWLTEARKETVMGQPTPKTPRQLREFLGTAGFCRLWIPRFAEMAAPLYPLTKPGTLFNWGPDQQKAYHEIKQALLTAPALGLPDLTKPFELFVDEKQGYAKGVLTQKLGPWRRPVAYLSKKLDPVAAGWPPCLRMVAAIAVLTKDAGKLTMGQPLVILAPHAVEALVKQPPDRWLSNARMTHYQAMLLDTDRVQFGPVVALNPATLLPLPEEGAPHDCLEILAETHGTEPDLTDQPIPDADHTWYTDGSSFLQEGQRKAGAAVTTETEVIWARALPAGTSAQRAELIALTQALKMAEGKRLNVYTDSRYAFATAHIHGEIYKRRGWLTSEGREIKNKSEILALLKALFLPKRLSIIHCLGHQKGDSAEARGNRLADQAAREAAIKTPPDTSTLLAGKRTADGSEFEKRTADGSEFESPKKKAKVE

SEQ ID NO: 6507 - protein, 2006 aa, synthetic construct
MPAAKRVKLDGGDKKYSIGLDIGTNSVGWAVITDEYKVPSKKFKVLGNTDRHSIKKNLIGALLFDSGETAEATRLKRTARRRYTRRKNRICYLQEIFSNEMAKVDDSFFHRLEESFLVEEDKKHERHPIFGNIVDEVAYHEKYPTIYHLRKKLVDSTDKADLRLIYLALAHMIKFRGHFLIEGDLNPDNSDVDKLFIQLVQTYNQLFEENPINASGVDAKAILSARLSKSRRLENLIAQLPGEKKNGLFGNLIALSLGLTPNFKSNFDLAEDAKLQLSKDTYDDDLDNLLAQIGDQYADLFLAAKNLSDAILLSDILRVNTEITKAPLSASMIKRYDEHHQDLTLLKALVRQQLPEKYKEIFFDQSKNGYAGYIDGGASQEEFYKFIKPILEKMDGTEELLVKLNREDLLRKQRTFDNGSIPHQIHLGELHAILRRQEDFYPFLKDNREKIEKILTFRIPYYVGPLARGNSRFAWMTRKSEETITPWNFEEVVDKGASAQSFIERMTNFDKNLPNEKVLPKHSLLYEYFTVYNELTKVKYVTEGMRKPAFLSGEQKKAIVDLLFKTNRKVTVKQLKEDYFKKIECFDSVEISGVEDRFNASLGTYHDLLKIIKDKDFLDNEENEDILEDIVLTLTLFEDREMIEERLKTYAHLFDDKVMKQLKRRRYTGWGRLSRKLINGIRDKQSGKTILDFLKSDGFANRNFMQLIHDDSLTFKEDIQKAQVSGQGDSLHEHIANLAGSPAIKKGILQTVKVVDELVKVMGRHKPENIVIEMARENQTTQKGQKNSRERMKRIEEGIKELGSQILKEHPVENTQLQNEKLYLYYLQNGRDMYVDQELDINRLSDYDVDHIVPQSFLKDDSIDNKVLTRSDKARGKSDNVPSEEVVKKMKNYWRQLLNAKLITQRKFDNLTKAERGGLSELDKAGFIKRQLVETRQITKHVAQILDSRMNTKYDENDKLIREVKVITLKSKLVSDFRKDFQFYKVREINNYHHAHDAYLNAVVGTALIKKYPKLESEFVYGDYKVYDVRKMIAKSEQEIGKATAKYFFYSNIMNFFKTEITLANGEIRKRPLIETNGETGEIVWDKGRDFATVRKVLSMPQVNIVKKTEVQTGGFSKESILPKRNSDKLIARKKDWDPKKYGGFDSPTVAYSVLVVAKVEKGKSKKLKSVKELLGITIMERSSFEKNPIDFLEAKGYKEVKKDLIIKLPKYSLFELENGRKRMLASAGELQKGNELALPSKYVNFLYLASHYEKLKGSPEDNEQKQLFVEQHKHYLDEIIEQISEFSKRVILADANLDKVLSAYNKHRDKPIREQAENIIHLFTLTNLGAPAAFKYFDTTIDRKRYTSTKEVLDATLIHQSITGLYETRIDLSQLGGDGGPAPAPAPGGLTAAIDILAPQQCAEPITWKSDEPVWVDQWPLTNDKLAAAQQLVQEQLEAGHITESSSPWNTPIFVIKKKSGKWRLLQDLRAVNATMVLMGALQPGLPSPVAIPQGYLKIIIDLKDCFFSIPLHPSDQKRFAFSLPSTNFKEPMQRFQWKVLPQGMANSPTLCQKYVATAIHKVRHAWKQMYIIHYMDDILIAGKDGQQVLQCFDQLKQELTAAGLHIAPEKVQLQDPYTYLGFELNGPKITNQKAVIRKDKLQTLNDFQKLLGDINWLRPYLKLTTGDLKPLFDTLKGDSDPNSHRSLSKEALASLEKVETAIAEQFVTHINYSLPLIFLIFNTALTPTGLFWQDNPIMWIHLPASPKKVLLPYYDAIADLIILGRDHSKKYFGIEPSTIIQPYSKSQIDWLMQNTEMWPIACASFVGILDNHYPPNKLIQFCKLHTFVFPQIISKTPLNNALLVFTDGSSTGMAAYTLTDTTIKFQTNLNSAQLVELQALIAVLSAFPNQPLNIYTDSAYLAHSIPLLETVAQIKHISETAKLFLQCQQLIYNRSIPFYIGHVRAHSGLPGPIAQGNQRADLATKIVASNINTAGKRTADGSEFEKRTADGSEFESPKKKAKVE

SEQ ID NO: 6508 - protein, 2086 aa, synthetic construct
MPAAKRVKLDGGDKKYSIGLDIGTNSVGWAVITDEYKVPSKKFKVLGNTDRHSIKKNLIGALLFDSGETAEATRLKRTARRRYTRRKNRICYLQEIFSNEMAKVDDSFFHRLEESFLVEEDKKHERHPIFGNIVDEVAYHEKYPTIYHLRKKLVDSTDKADLRLIYLALAHMIKFRGHFLIEGDLNPDNSDVDKLFIQLVQTYNQLFEENPINASGVDAKAILSARLSKSRRLENLIAQLPGEKKNGLFGNLIALSLGLTPNFKSNFDLAEDAKLQLSKDTYDDDLDNLLAQIGDQYADLFLAAKNLSDAILLSDILRVNTEITKAPLSASMIKRYDEHHQDLTLLKALVRQQLPEKYKEIFFDQSKNGYAGYIDGGASQEEFYKFIKPILEKMDGTEELLVKLNREDLLRKQRTFDNGSIPHQIHLGELHAILRRQEDFYPFLKDNREKIEKILTFRIPYYVGPLARGNSRFAWMTRKSEETITPWNFEEVVDKGASAQSFIERMTNFDKNLPNEKVLPKHSLLYEYFTVYNELTKVKYVTEGMRKPAFLSGEQKKAIVDLLFKTNRKVTVKQLKEDYFKKIECFDSVEISGVEDRFNASLGTYHDLLKIIKDKDFLDNEENEDILEDIVLTLTLFEDREMIEERLKTYAHLFDDKVMKQLKRRRYTGWGRLSRKLINGIRDKQSGKTILDFLKSDGFANRNFMQLIHDDSLTFKEDIQKAQVSGQGDSLHEHIANLAGSPAIKKGILQTVKVVDELVKVMGRHKPENIVIEMARENQTTQKGQKNSRERMKRIEEGIKELGSQILKEHPVENTQLQNEKLYLYYLQNGRDMYVDQELDINRLSDYDVDHIVPQSFLKDDSIDNKVLTRSDKARGKSDNVPSEEVVKKMKNYWRQLLNAKLITQRKFDNLTKAERGGLSELDKAGFIKRQLVETRQITKHVAQILDSRMNTKYDENDKLIREVKVITLKSKLVSDFRKDFQFYKVREINNYHHAHDAYLNAVVGTALIKKYPKLESEFVYGDYKVYDVRKMIAKSEQEIGKATAKYFFYSNIMNFFKTEITLANGEIRKRPLIETNGETGEIVWDKGRDFATVRKVLSMPQVNIVKKTEVQTGGFSKESILPKRNSDKLIARKKDWDPKKYGGFDSPTVAYSVLVVAKVEKGKSKKLKSVKELLGITIMERSSFEKNPIDFLEAKGYKEVKKDLIIKLPKYSLFELENGRKRMLASAGELQKGNELALPSKYVNFLYLASHYEKLKGSPEDNEQKQLFVEQHKHYLDEIIEQISEFSKRVILADANLDKVLSAYNKHRDKPIREQAENIIHLFTLTNLGAPAAFKYFDTTIDRKRYTSTKEVLDATLIHQSITGLYETRIDLSQLGGDGGPAPAPAPGGTLQLDDEYRLYSPLVKPDQNIQFWLEQFPQAWAETAGMGLAKQVPPQVIQLKASATPVSVRQYPLSKEAQEGIRPHVQRLIQQGILVPVQSPWNTPLLPVRKPGTNDYRPVQDLREVNKRVQDIHPTVPNPYNLLCALPPQRSWYTVLDLKDAFFCLRLHPTSQPLFAFEWRDPGTGRTGQLTWTRLPQGFKNSPTIFNEALHRDLANFRIQHPQVTLLQYVDDLLLAGATKQDCLEGTKALLLELSDLGYRASAKKAQICRREVTYLGYSLRDGQRWLTEARKKTVVQIPAPTTAKQVREFLGTAGFCRLWIPGFATLAAPLYPLTKPKGEFSWAPEHQKAFDAIKKALLSAPALALPDVTKPFTLYVDERKGVARGVLTQTLGPWRRPVAYLSKKLDPVASGWPVCLKAIAAVAILVKDADKLTLGQNITVIAPHALENIVRQPPDRWMTNARMTHYQSLLLTERVTFAPPAALNPATLLPEETDEPVTHDCHQLLIEETGVRKDLTDIPLTGEVLTWFTDGSSYVVEGKRMAGAAVVDGTRTIWASSLPEGTSAQKAELMALTQALRLAEGKSINIYTDSRYAFATAHVHGAIYKQRGWLTSAGREIKNKEEILSLLEALHLPKRLAIIHCPGHQKAKDPISRGNQMADRVAKQAAQGVNLLAGKRTADGSEFEKRTADGSEFESPKKKAKVE

SEQ ID NO: 6509 - protein, 2086 aa, synthetic construct; identical to SEQ ID NO: 6508

SEQ ID NO: 6510 - protein, 2083 aa, synthetic construct
MPAAKRVKLDGGDKKYSIGLDIGTNSVGWAVITDEYKVPSKKFKVLGNTDRHSIKKNLIGALLFDSGETAEATRLKRTARRRYTRRKNRICYLQEIFSNEMAKVDDSFFHRLEESFLVEEDKKHERHPIFGNIVDEVAYHEKYPTIYHLRKKLVDSTDKADLRLIYLALAHMIKFRGHFLIEGDLNPDNSDVDKLFIQLVQTYNQLFEENPINASGVDAKAILSARLSKSRRLENLIAQLPGEKKNGLFGNLIALSLGLTPNFKSNFDLAEDAKLQLSKDTYDDDLDNLLAQIGDQYADLFLAAKNLSDAILLSDILRVNTEITKAPLSASMIKRYDEHHQDLTLLKALVRQQLPEKYKEIFFDQSKNGYAGYIDGGASQEEFYKFIKPILEKMDGTEELLVKLNREDLLRKQRTFDNGSIPHQIHLGELHAILRRQEDFYPFLKDNREKIEKILTFRIPYYVGPLARGNSRFAWMTRKSEETITPWNFEEVVDKGASAQSFIERMTNFDKNLPNEKVLPKHSLLYEYFTVYNELTKVKYVTEGMRKPAFLSGEQKKAIVDLLFKTNRKVTVKQLKEDYFKKIECFDSVEISGVEDRFNASLGTYHDLLKIIKDKDFLDNEENEDILEDIVLTLTLFEDREMIEERLKTYAHLFDDKVMKQLKRRRYTGWGRLSRKLINGIRDKQSGKTILDFLKSDGFANRNFMQLIHDDSLTFKEDIQKAQVSGQGDSLHEHIANLAGSPAIKKGILQTVKVVDELVKVMGRHKPENIVIEMARENQTTQKGQKNSRERMKRIEEGIKELGSQILKEHPVENTQLQNEKLYLYYLQNGRDMYVDQELDINRLSDYDVDHIVPQSFLKDDSIDNKVLTRSDKARGKSDNVPSEEVVKKMKNYWRQLLNAKLITQRKFDNLTKAERGGLSELDKAGFIKRQLVETRQITKHVAQILDSRMNTKYDENDKLIREVKVITLKSKLVSDFRKDFQFYKVREINNYHHAHDAYLNAVVGTALIKKYPKLESEFVYGDYKVYDVRKMIAKSEQEIGKATAKYFFYSNIMNFFKTEITLANGEIRKRPLIETNGETGEIVWDKGRDFATVRKVLSMPQVNIVKKTEVQTGGFSKESILPKRNSDKLIARKKDWDPKKYGGFDSPTVAYSVLVVAKVEKGKSKKLKSVKELLGITIMERSSFEKNPIDFLEAKGYKEVKKDLIIKLPKYSLFELENGRKRMLASAGELQKGNELALPSKYVNFLYLASHYEKLKGSPEDNEQKQLFVEQHKHYLDEIIEQISEFSKRVILADANLDKVLSAYNKHRDKPIREQAENIIHLFTLTNLGAPAAFKYFDTTIDRKRYTSTKEVLDATLIHQSITGLYETRIDLSQLGGDGGPAPAPAPGGVPWLMKKPLQLTVLVPLHEYQERLLQQTALPKEQKELLQKLFLKYDALWQHWENQVGHRRIKPHNIATGTLAPRPQKQYPINPKAKPSIQIVIDDLLKQGVLIQQNSTMNTPVYPVPKPDGKWRMVLDYREVNKTIPLIAAQNQHSAGILSSIYRGKYKTTLDLTNGFWAHPITPESYWLTAFTWQGKQYCWTRLPQGFLNSPALFNADVVDLLKEIPNVQAYVDDIYISHDDPQEHLEQLEKIFSILLNAGYVVSLKKSEIAQREVEFLGFNITKEGRGLTDTFKQKLLNITPPKDLKQLQSILGLLNFARNFIPNYSELVKPLYTIVAPANGKFISWTEDNSNQLQHIISVLNQADNLEERNPETRLIIKVNSSPSAGYIRYYNEGSKRPIMYVNYIFSKAEAKFTQTEKLLTTMHKGLIKAMDLAMGQEILVYSPIVSMTKIQRTPLPERKALPVRWITWMTYLEDPRIQFHYDKSLPELQQIPNVTEDVIAKTKHPSEFAMVFYTDGSAIKHPDVNKSHSAGMGIAQVQFIPEYKIVHQWSIPLGDHTAQLAEIAAVEFACKKALKISGPVLIVTDSFYVAESANKELPYWKSNGFLNNKKKPLRHVSKWKSIAECLQLKPDIIIMHEKGHQQPMTTLHTEGNNLADKLATQGSYVVHAGKRTADGSEFEKRTADGSEFESPKKKAKVE

SEQ ID NO: 6511 - protein, 2172 aa, synthetic construct
MPAAKRVKLDGGDKKYSIGLDIGTNSVGWAVITDEYKVPSKKFKVLGNTDRHSIKKNLIGALLFDSGETAEATRLKRTARRRYTRRKNRICYLQEIFSNEMAKVDDSFFHRLEESFLVEEDKKHERHPIFGNIVDEVAYHEKYPTIYHLRKKLVDSTDKADLRLIYLALAHMIKFRGHFLIEGDLNPDNSDVDKLFIQLVQTYNQLFEENPINASGVDAKAILSARLSKSRRLENLIAQLPGEKKNGLFGNLIALSLGLTPNFKSNFDLAEDAKLQLSKDTYDDDLDNLLAQIGDQYADLFLAAKNLSDAILLSDILRVNTEITKAPLSASMIKRYDEHHQDLTLLKALVRQQLPEKYKEIFFDQSKNGYAGYIDGGASQEEFYKFIKPILEKMDGTEELLVKLNREDLLRKQRTFDNGSIPHQIHLGELHAILRRQEDFYPFLKDNREKIEKILTFRIPYYVGPLARGNSRFAWMTRKSEETITPWNFEEVVDKGASAQSFIERMTNFDKNLPNEKVLPKHSLLYEYFTVYNELTKVKYVTEGMRKPAFLSGEQKKAIVDLLFKTNRKVTVKQLKEDYFKKIECFDSVEISGVEDRFNASLGTYHDLLKIIKDKDFLDNEENEDILEDIVLTLTLFEDREMIEERLKTYAHLFDDKVMKQLKRRRYTGWGRLSRKLINGIRDKQSGKTILDFLKSDGFANRNFMQLIHDDSLTFKEDIQKAQVSGQGDSLHEHIANLAGSPAIKKGILQTVKVVDELVKVMGRHKPENIVIEMARENQTTQKGQKNSRERMKRIEEGIKELGSQILKEHPVENTQLQNEKLYLYYLQNGRDMYVDQELDINRLSDYDVDHIVPQSFLKDDSIDNKVLTRSDKARGKSDNVPSEEVVKKMKNYWRQLLNAKLITQRKFDNLTKAERGGLSELDKAGFIKRQLVETRQITKHVAQILDSRMNTKYDENDKLIREVKVITLKSKLVSDFRKDFQFYKVREINNYHHAHDAYLNAVVGTALIKKYPKLESEFVYGDYKVYDVRKMIAKSEQEIGKATAKYFFYSNIMNFFKTEITLANGEIRKRPLIETNGETGEIVWDKGRDFATVRKVLSMPQVNIVKKTEVQTGGFSKESILPKRNSDKLIARKKDWDPKKYGGFDSPTVAYSVLVVAKVEKGKSKKLKSVKELLGITIMERSSFEKNPIDFLEAKGYKEVKKDLIIKLPKYSLFELENGRKRMLASAGELQKGNELALPSKYVNFLYLASHYEKLKGSPEDNEQKQLFVEQHKHYLDEIIEQISEFSKRVILADANLDKVLSAYNKHRDKPIREQAENIIHLFTLTNLGAPAAFKYFDTTIDRKRYTSTKEVLDATLIHQSITGLYETRIDLSQLGGDGGPAPAPAPGGMDPLQLLQPLEAEIKGTKLKAHWNSGATITCVPQAFLEEEVPIKNIWIKTIHGEKEQPVYYLTFKIQGRKVEAEVISSPYDYILVSPSDIPWLMKKPLQLTTLVPLQEYEERLLKQTMLTGSYKEKLQSLFLKYDALWQHWENQVGHRRIKPHHIATGTVNPRPQKQYPINPKAKASIQTVINDLLKQGVLIQQNSIMNTPVYPVPKPDGKWRMVLDYREVNKTIPLIAAQNQHSAGILSSIFRGKYKTTLDLSNGFWAHSITPESYWLTAFTWLGQQYCWTRLPQGFLNSPALFNADVVDLLKEVPNVQVYVDDIYISHDDPREHLEQLEKVFSLLLNAGYVVSLKKSEIAQHEVEFLGFNITKEGRGLTETFKQKLLNITPPRDLKQLQSILGKLNFARNFIPNFSELVKPLYNIIATAPGKYITWTTDNSQQLQNIISMLNSAENLEERNPEVRLIMKVNTSPSAGYIRFYNEFAKRPIMYLNYVYTKAEVKFTNTEKLLTTIHKGLIKALDLGMGQEILVYSPIVSMTKIQKTPLPERKALPIRWITWMSYLEDPRIQFHYDKTLPELQQVPTVTDDIIAKIKHPSEFSMVFYTDGSAIKHPNVNKSHNAGMGIAQVQFKPEFTVINTWSIPLGDHTAQLAEVAAVEFACKKALKIDGPVLIVTDSFYVAESVNKELPYWQSNGFFNNKKKPLKHVSKWKSIADCIQLKPDIIIIHEKGHQPTASTFHTEGNNLADKLATQGSYVVNAGKRTADGSEFEKRTADGSEFESPKKKAKVE

SEQ ID NO: 6512 - protein, 2092 aa, synthetic construct
MPAAKRVKLDGGDKKYSIGLDIGTNSVGWAVITDEYKVPSKKFKVLGNTDRHSIKKNLIGALLFDSGETAEATRLKRTARRRYTRRKNRICYLQEIFSNEMAKVDDSFFHRLEESFLVEEDKKHERHPIFGNIVDEVAYHEKYPTIYHLRKKLVDSTDKADLRLIYLALAHMIKFRGHFLIEGDLNPDNSDVDKLFIQLVQTYNQLFEENPINASGVDAKAILSARLSKSRRLENLIAQLPGEKKNGLFGNLIALSLGLTPNFKSNFDLAEDAKLQLSKDTYDDDLDNLLAQIGDQYADLFLAAKNLSDAILLSDILRVNTEITKAPLSASMIKRYDEHHQDLTLLKALVRQQLPEKYKEIFFDQSKNGYAGYIDGGASQEEFYKFIKPILEKMDGTEELLVKLNREDLLRKQRTFDNGSIPHQIHLGELHAILRRQEDFYPFLKDNREKIEKILTFRIPYYVGPLARGNSRFAWMTRKSEETITPWNFEEVVDKGASAQSFIERMTNFDKNLPNEKVLPKHSLLYEYFTVYNELTKVKYVTEGMRKPAFLSGEQKKAIVDLLFKTNRKVTVKQLKEDYFKKIECFDSVEISGVEDRFNASLGTYHDLLKIIKDKDFLDNEENEDILEDIVLTLTLFEDREMIEERLKTYAHLFDDKVMKQLKRRRYTGWGRLSRKLINGIRDKQSGKTILDFLKSDGFANRNFMQLIHDDSLTFKEDIQKAQVSGQGDSLHEHIANLAGSPAIKKGILQTVKVVDELVKVMGRHKPENIVIEMARENQTTQKGQKNSRERMKRIEEGIKELGSQILKEHPVENTQLQNEKLYLYYLQNGRDMYVDQELDINRLSDYDVDHIVPQSFLKDDSIDNKVLTRSDKARGKSDNVPSEEVVKKMKNYWRQLLNAKLITQRKFDNLTKAERGGLSELDKAGFIKRQLVETRQITKHVAQILDSRMNTKYDENDKLIREVKVITLKSKLVSDFRKDFQFYKVREINNYHHAHDAYLNAVVGTALIKKYPKLESEFVYGDYKVYDVRKMIAKSEQEIGKATAKYFFYSNIMNFFKTEITLANGEIRKRPLIETNGETGEIVWDKGRDFATVRKVLSMPQVNIVKKTEVQTGGFSKESILPKRNSDKLIARKKDWDPKKYGGFDSPTVAYSVLVVAKVEKGKSKKLKSVKELLGITIMERSSFEKNPIDFLEAKGYKEVKKDLIIKLPKYSLFELENGRKRMLASAGELQKGNELALPSKYVNFLYLASHYEKLKGSPEDNEQKQLFVEQHKHYLDEIIEQISEFSKRVILADANLDKVLSAYNKHRDKPIREQAENIIHLFTLTNLGAPAAFKYFDTTIDRKRYTSTKEVLDATLIHQSITGLYETRIDLSQLGGDGGPAPAPAPGGTLNIEDEYRLHETSKEPDVPLGSTWLSDFPQAWAETGGMGLAVRQAPLIIPLKATSTPVSIKQYPMSQEARLGIKPHIQRLLDQGILVPCQSPWNTPLLPVKKPGTNDYRPVQDLREVNKRVEDIHPTVPNPYNLLSGLPPSHQWYTVLDLKDAFFCLRLHPTSQPLFAFEWRDPEMGISGQLTWTRLPQGFKNSPTLFNEALHRDLADFRIQHPDLILLQYVDDLLLAATSEQDCQRGTRALLQTLGNLGYRASAKKAQICQKQVKYLGYLLKEGQRWLTEARKETVMGQPTPKTPRQLREFLGKAGFCRLFIPGFAEMAAPLYPLTKPGTLFNWGPDQQKAYQEIKQALLTAPALGLPDLTKPFELFVDEKQGYAKGVLTQKLGPWRRPVAYLSKKLDPVAAGWPPCLRMVAAIAVLTKDAGKLTMGQPLVILAPHAVEALVKQPPDRWLSNARMTHYQAMLLDTDRVQFGPVVALNPATLLPLPEKEAPHDCLEILAETHGTRPDLTDQPIPDADYTWYTDGSSFLQEGQRRAGAAVTTETEVIWARALPAGTSAQRAELIALTQALKMAEGKKLNVYTDSRYAFATAHVHGEIYRRRGWLTSEGREIKNKNEILALLKALFLPKRLSIIHCPGHQKGNSAEARGNRMADQAAREAAMKAVLETSTLLAGKRTADGSEFEKRTADGSEFESPKKKAKVE

SEQ ID NO: 6513 - protein, 2096 aa, synthetic construct
MPAAKRVKLDGGDKKYSIGLDIGTNSVGWAVITDEYKVPSKKFKVLGNTDRHSIKKNLIGALLFDSGETAEATRLKRTARRRYTRRKNRICYLQEIFSNEMAKVDDSFFHRLEESFLVEEDKKHERHPIFGNIVDEVAYHEKYPTIYHLRKKLVDSTDKADLRLIYLALAHMIKFRGHFLIEGDLNPDNSDVDKLFIQLVQTYNQLFEENPINASGVDAKAILSARLSKSRRLENLIAQLPGEKKNGLFGNLIALSLGLTPNFKSNFDLAEDAKLQLSKDTYDDDLDNLLAQIGDQYADLFLAAKNLSDAILLSDILRVNTEITKAPLSASMIKRYDEHHQDLTLLKALVRQQLPEKYKEIFFDQSKNGYAGYIDGGASQEEFYKFIKPILEKMDGTEELLVKLNREDLLRKQRTFDNGSIPHQIHLGELHAILRRQEDFYPFLKDNREKIEKILTFRIPYYVGPLARGNSRFAWMTRKSEETITPWNFEEVVDKGASAQSFIERMTNFDKNLPNEKVLPKHSLLYEYFTVYNELTKVKYVTEGMRKPAFLSGEQKKAIVDLLFKTNRKVTVKQLKEDYFKKIECFDSVEISGVEDRFNASLGTYHDLLKIIKDKDFLDNEENEDILEDIVLTLTLFEDREMIEERLKTYAHLFDDKVMKQLKRRRYTGWGRLSRKLINGIRDKQSGKTILDFLKSDGFANRNFMQLIHDDSLTFKEDIQKAQVSGQGDSLHEHIANLAGSPAIKKGILQTVKVVDELVKVMGRHKPENIVIEMARENQTTQKGQKNSRERMKRIEEGIKELGSQILKEHPVENTQLQNEKLYLYYLQNGRDMYVDQELDINRLSDYDVDHIVPQSFLKDDSIDNKVLTRSDKARGKSDNVPSEEVVKKMKNYWRQLLNAKLITQRKFDNLTKAERGGLSELDKAGFIKRQLVETRQITKHVAQILDSRMNTKYDENDKLIREVKVITLKSKLVSDFRKDFQFYKVREINNYHHAHDAYLNAVVGTALIKKYPKLESEFVYGDYKVYDVRKMIAKSEQEIGKATAKYFFYSNIMNFFKTEITLANGEIRKRPLIETNGETGEIVWDKGRDFATVRKVLSMPQVNIVKKTEVQTGGFSKESILPKRNSDKLIARKKDWDPKKYGGFDSPTVAYSVLVVAKVEKGKSKKLKSVKELLGITIMERSSFEKNPIDFLEAKGYKEVKKDLIIKLPKYSLFELENGRKRMLASAGELQKGNELALPSKYVNFLYLASHYEKLKGSPEDNEQKQLFVEQHKHYLDEIIEQISEFSKRVILADANLDKVLSAYNKHRDKPIREQAENIIHLFTLTNLGAPAAFKYFDTTIDRKRYTSTKEVLDATLIHQSITGLYETRIDLSQLGGDGGPAPAPAPAPGGTAPLEEEYRLFLEAPIQNVTLLEQWKREIPKVWAEINPPGLASTQAPIHVQLLSTALPVRVRQYPITLEAKRSLRETIRKFRAAGILRPVHSPWNTPLLPVRKSGTSEYRMVQDLREVNKRVETIHPTVPNPYTLLSLLPPDRIWYSVLDLKDAFFCIPLAPESQLIFAFEWADAEEGESGQLTWTRLPQGFKNSPTLFDEALNRDLQGFRLDHPSVSLLQYVDDLLIAADTQAACLSATRDLLMTLAELGYRVSGKKAQLCQEEVTYLGFKIHKGSRSLSNSRTQAILQIPVPKTKRQVREFLGTIGYCRLWIPGFAELAQPLYAATRGGNDPLVWGEKEEEAFQSLKLALTQPPALALPSLDKPFQLFVEETSGAAKGVLTQALGPWKRPVAYLSKRLDPVAAGWPRCLRAIAAAALLTREASKLTFGQDIEITSSHNLESLLRSPPDKWLTNARITQYQVLLLDPPRVRFKQTAALNPATLLPETDDTLPIHHCLDTLDSLTSTRPDLTDQPLAQAEATLFTDGSSYIRDGKRYAGAAVVTLDSVIWAEPLPIGTSAQKAELIALTKALEWSKDKSVNIYTDSRYAFATLHVHGMIYRERGLLTAGGKAIKNAPEILALLTAVWLPKRVAVMHCKGHQKDDAPTSTGNRRADEVAREVAIRPLSTQATISAGKRTADGSEFEKRTADGSEFESPKKKAKVE

SEQ ID NO: 6514 - protein, 2096 aa, synthetic construct
MPAAKRVKLDGGDKKYSIGLDIGTNSVGWAVITDEYKVPSKKFKVLGNTDRHSIKKNLIGALLFDSGETAEATRLKRTARRRYTRRKNRICYLQEIFSNEMAKVDDSFFHRLEESFLVEEDKKHERHPIFGNIVDEVAYHEKYPTIYHLRKKLVDSTDKADLRLIYLALAHMIKFRGHFLIEGDLNPDNSDVDKLFIQLVQTYNQLFEENPINASGVDAKAILSARLSKSRRLENLIAQLPGEKKNGLFGNLIALSLGLTPNFKSNFDLAEDAKLQLSKDTYDDDLDNLLAQIGDQYADLFLAAKNLSDAILLSDILRVNTEITKAPLSASMIKRYDEHHQDLTLLKALVRQQLPEKYKEIFFDQSKNGYAGYIDGGASQEEFYKFIKPILEKMDGTEELLVKLNREDLLRKQRTFDNGSIPHQIHLGELHAILRRQEDFYPFLKDNREKIEKILTFRIPYYVGPLARGNSRFAWMTRKSEETITPWNFEEVVDKGASAQSFIERMTNFDKNLPNEKVLPKHSLLYEYFTVYNELTKVKYVTEGMRKPAFLSGEQKKAIVDLLFKTNRKVTVKQLKEDYFKKIECFDSVEISGVEDRFNASLGTYHDLLKIIKDKDFLDNEENEDILEDIVLTLTLFEDREMIEERLKTYAHLFDDKVMKQLKRRRYTGWGRLSRKLINGIRDKQSGKTILDFLKSDGFANRNFMQLIHDDSLTFKEDIQKAQVSGQGDSLHEHIANLAGSPAIKKGILQTVKVVDELVKVMGRHKPENIVIEMARENQTTQKGQKNSRERMKRIEEGIKELGSQILKEHPVENTQLQNEKLYLYYLQNGRDMYVDQELDINRLSDYDVDHIVPQSFLKDDSIDNKVLTRSDKARGKSDNVPSEEVVKKMKNYWRQLLNAKLITQRKFDNLTKAERGGLSELDKAGFIKRQLVETRQITKHVAQILDSRMNTKYDENDKLIREVKVITLKSKLVSDFRKDFQFYKVREINNYHHAHDAYLNAVVGTALIKKYPKLESEFVYGDYKVYDVRKMIAKSEQEIGKATAKYFFYSNIMNFFKTEITLANGEIRKRPLIETNGETGEIVWDKGRDFATVRKVLSMPQVNIVKKTEVQTGGFSKESILPKRNSDKLIARKKDWDPKKYGGFDSPTVAYSVLVVAKVEKGKSKKLKSVKELLGITIMERSSFEKNPIDFLEAKGYKEVKKDLIIKLPKYSLFELENGRKRMLASAGELQKGNELALPSKYVNFLYLASHYEKLKGSPEDNEQKQLFVEQHKHYLDEIIEQISEFSKRVILADANLDKVLSAYNKHRDKPIREQAENIIHLFTLTNLGAPAAFKYFDTTIDRKRYTSTKEVLDATLIHQSITGLYETRIDLSQLGGDGGPAPAPAPAPGGTAPLEEEYRLFLEAPIQNVTLLEQWKREIPKVWAEINPPGLASTQAPIHVQLLSTALPVRVRQYPITLEAKRSLRETIRKFRAAGILRPVHSPWNTPLLPVRKSGTSEYRMVQDLREVNKRVETIHPTVPNPYTLLSLLPPDRIWYSVLDLKDAFFCIPLAPESQLIFAFEWADAEEGESGQLTWTRLPQGFKNSPTLFNEALNRDLQGFRLDHPSVSLLQYVDDLLIAADTQAACLSATRDLLMTLAELGYRVSGKKAQLCQEEVTYLGFKIHKGSRSLSNSRTQAILQIPVPKTKRQVREFLGTIGYCRLWIPGFAELAQPLYAATRPGNDPLVWGEKEEEAFQSLKLALTQPPALALPSLDKPFQLFVEETSGAAKGVLTQALGPWKRPVAYLSKRLDPVAAGWPRCLRAIAAAALLTREASKLTFGQDIEITSSHNLESLLRSPPDKWLTNARITQYQVLLLDPPRVRFKQTAALNPATLLPETDDTLPIHHCLDTLDSLTSTRPDLTDQPLAQAEATLFTDGSSYIRDGKRYAGAAVVTLDSVIWAEPLPIGTSAQKAELIALTKALEWSKDKSVNIYTDSRYAFATLHVHGMIYRERGWLTAGGKAIKNAPEILALLTAVWLPKRVAVMHCKGHQKDDAPTSTGNRRADEVAREVAIRPLSTQATISAGKRTADGSEFEKRTADGSEFESPKKKAKVE

SEQ ID NO: 6515 - protein, 2100 aa, synthetic construct
MPAAKRVKLDGGDKKYSIGLDIGTNSVGWAVITDEYKVPSKKFKVLGNTDRHSIKKNLIGALLFDSGETAEATRLKRTARRRYTRRKNRICYLQEIFSNEMAKVDDSFFHRLEESFLVEEDKKHERHPIFGNIVDEVAYHEKYPTIYHLRKKLVDSTDKADLRLIYLALAHMIKFRGHFLIEGDLNPDNSDVDKLFIQLVQTYNQLFEENPINASGVDAKAILSARLSKSRRLENLIAQLPGEKKNGLFGNLIALSLGLTPNFKSNFDLAEDAKLQLSKDTYDDDLDNLLAQIGDQYADLFLAAKNLSDAILLSDILRVNTEITKAPLSASMIKRYDEHHQDLTLLKALVRQQLPEKYKEIFFDQSKNGYAGYIDGGASQEEFYKFIKPILEKMDGTEELLVKLNREDLLRKQRTFDNGSIPHQIHLGELHAILRRQEDFYPFLKDNREKIEKILTFRIPYYVGPLARGNSRFAWMTRKSEETITPWNFEEVVDKGASAQSFIERMTNFDKNLPNEKVLPKHSLLYEYFTVYNELTKVKYVTEGMRKPAFLSGEQKKAIVDLLFKTNRKVTVKQLKEDYFKKIECFDSVEISGVEDRFNASLGTYHDLLKIIKDKDFLDNEENEDILEDIVLTLTLFEDREMIEERLKTYAHLFDDKVMKQLKRRRYTGWGRLSRKLINGIRDKQSGKTILDFLKSDGFANRNFMQLIHDDSLTFKEDIQKAQVSGQGDSLHEHIANLAGSPAIKKGILQTVKVVDELVKVMGRHKPENIVIEMARENQTTQKGQKNSRERMKRIEEGIKELGSQILKEHPVENTQLQNEKLYLYYLQNGRDMYVDQELDINRLSDYDVDHIVPQSFLKDDSIDNKVLTRSDKARGKSDNVPSEEVVKKMKNYWRQLLNAKLITQRKFDNLTKAERGGLSELDKAGFIKRQLVETRQITKHVAQILDSRMNTKYDENDKLIREVKVITLKSKLVSDFRKDFQFYKVREINNYHHAHDAYLNAVVGTALIKKYPKLESEFVYGDYKVYDVRKMIAKSEQEIGKATAKYFFYSNIMNFFKTEITLANGEIRKRPLIETNGETGEIVWDKGRDFATVRKVLSMPQVNIVKKTEVQTGGFSKESILPKRNSDKLIARKKDWDPKKYGGFDSPTVAYSVLVVAKVEKGKSKKLKSVKELLGITIMERSSFEKNPIDFLEAKGYKEVKKDLIIKLPKYSLFELENGRKRMLASAGELQKGNELALPSKYVNFLYLASHYEKLKGSPEDNEQKQLFVEQHKHYLDEIIEQISEFSKRVILADANLDKVLSAYNKHRDKPIREQAENIIHLFTLTNLGAPAAFKYFDTTIDRKRYTSTKEVLDATLIHQSITGLYETRIDLSQLGGDGGPAPAPAPAPGGTVSLQDEHRLFDIPVTTSLPDVWLQDFPQAWAETGGLGRAKCQAPIIIDLKPTAVPVSIKQYPMSLEAHMGIRQHIIKFLELGVLRPCRSPWNTPLLPVKKPGTQDYRPVQDLREINKRTVDIHPTVPNPYNLLSTLKPDYSWYTVLDLKDAFFCLPLAPQSQELFAFEWKDPERGISGQLTWTRLPQGFKNSPTLFNEALHRDLTDFRTQHPEVTLLQYVDDLLLAAPTKKACTQGTRHLLQELGEKGYRASAKKAQICQTKVTYLGYILSEGKRWLTPGRIETVARIPPPRNPREVREFLGTAGFCRLWIPGFAELAAPLYALTKPSTPFTWQTEHQLAFEALKKALLSAPALGLPDTSKPFTLFLDERQGIAKGVLTQKLGPWKRPVAYLSKKLDPVAAGWPPCLRIMAATAMLVKDSAKLTLGQPLTVITPHTLEAIVRQPPDRWITNARLTHYQALLLDTDRVQFGPPVTLNPATLLPVPENQPSPHDCRQVLAETHGTREDLKDQELPDADHTWYTDGSSYLDSGTRRAGAAVVDGHNTIWAQSLPPGTSAQKAELIALTKALELSKGKKANIYTDSRYAFATAHTHGSIYERRGWLTSEGKEIKNKAEIIALLKALFLPQEVAIIHCPGHQKGQDPVAVGNRQADRVARQAAMAEVLTLATEPDNTSHITAGKRTADGSEFEKRTADGSEFESPKKKAKVE

SEQ ID NO: 6516 - protein, 2085 aa, synthetic construct
MPAAKRVKLDGGDKKYSIGLDIGTNSVGWAVITDEYKVPSKKFKVLGNTDRHSIKKNLIGALLFDSGETAEATRLKRTARRRYTRRKNRICYLQEIFSNEMAKVDDSFFHRLEESFLVEEDKKHERHPIFGNIVDEVAYHEKYPTIYHLRKKLVDSTDKADLRLIYLALAHMIKFRGHFLIEGDLNPDNSDVDKLFIQLVQTYNQLFEENPINASGVDAKAILSARLSKSRRLENLIAQLPGEKKNGLFGNLIALSLGLTPNFKSNFDLAEDAKLQLSKDTYDDDLDNLLAQIGDQYADLFLAAKNLSDAILLSDILRVNTEITKAPLSASMIKRYDEHHQDLTLLKALVRQQLPEKYKEIFFDQSKNGYAGYIDGGASQEEFYKFIKPILEKMDGTEELLVKLNREDLLRKQRTFDNGSIPHQIHLGELHAILRRQEDFYPFLKDNREKIEKILTFRIPYYVGPLARGNSRFAWMTRKSEETITPWNFEEVVDKGASAQSFIERMTNFDKNLPNEKVLPKHSLLYEYFTVYNELTKVKYVTEGMRKPAFLSGEQKKAIVDLLFKTNRKVTVKQLKEDYFKKIECFDSVEISGVEDRFNASLGTYHDLLKIIKDKDFLDNEENEDILEDIVLTLTLFEDREMIEERLKTYAHLFDDKVMKQLKRRRYTGWGRLSRKLINGIRDKQSGKTILDFLKSDGFANRNFMQLIHDDSLTFKEDIQKAQVSGQGDSLHEHIANLAGSPAIKKGILQTVKVVDELVKVMGRHKPENIVIEMARENQTTQKGQKNSRERMKRIEEGIKELGSQILKEHPVENTQLQNEKLYLYYLQNGRDMYVDQELDINRLSDYDVDHIVPQSFLKDDSIDNKVLTRSDKARGKSDNVPSEEVVKKMKNYWRQLLNAKLITQRKFDNLTKAERGGLSELDKAGFIKRQLVETRQITKHVAQILDSRMNTKYDENDKLIREVKVITLKSKLVSDFRKDFQFYKVREINNYHHAHDAYLNAVVGTALIKKYPKLESEFVYGDYKVYDVRKMIAKSEQEIGKATAKYFFYSNIMNFFKTEITLANGEIRKRPLIETNGETGEIVWDKGRDFATVRKVLSMPQVNIVKKTEVQTGGFSKESILPKRNSDKLIARKKDWDPKKYGGFDSPTVAYSVLVVAKVEKGKSKKLKSVKELLGITIMERSSFEKNPIDFLEAKGYKEVKKDLIIKLPKYSLFELENGRKRMLASAGELQKGNELALPSKYVNFLYLASHYEKLKGSPEDNEQKQLFVEQHKHYLDEIIEQISEFSKRVILADANLDKVLSAYNKHRDKPIREQAENIIHLFTLTNLGAPAAFKYFDTTIDRKRYTSTKEVLDATLIHQSITGLYETRIDLSQLGGDGGPAPAPAPAPGGVPWILKKPLELTIKLDLEEQQGTLLNNSILSKKGKEELKQLFEKYSALWQSWENQVGHRRIRPHKIATGTVKPTPQKQYHINPKAKPDIQIVINDLLKQGVLIQKESTMNTPVYPVPKPNGRWRMVLDYRAVNKVTPLIAVQNQHSYGILGSLFKGRYKTTIDLSNGFWAHPIVPEDYWITAFTWQGKQYCWTVLPQGFLNSPGLFNGDVVDLLQGIPNVEVYVDDVYISHDSEKEHLEYLDILFNRLKEAGYIISLKKSNIANSIVDFLGFQITNEGRGLTDTFKEKLENITAPTTLKQLQSILGKLNFARNFIPDFTELIAPLYALIPKSPKNYVPWQIEHSTTLETLITKLNGAEYLQGRKGDKTLIMKVNASYTTGYIRYYNEGEKKPISYVSIVFSKTELKFTELEKLLTTVHKGLLKALDLSMGQNIHVYSPIVSMQNIQKTPQTAKKALASRWLSWLSYLEDPRIRFFYDPQMPALKDLPAVDTGKDNKKHPSNFQHIFYTDGSAITSPTKEGHLNAGMGIVYFINKDGNLQKQQEWSISLGNHTAQFAEIAAFEFALKKCLPLGGNILVVTDSNYVAKAYNEELDVWASNGFVNNRKKPLKHISKWKSVADLKRLRPDVVVTHEPGHQKLDSSPHAYGNNLADQLATQASFKVHAGKRTADGSEFEKRTADGSEFESPKKKAKVE

SEQ ID NO: 6517 - protein, 2093 aa, synthetic construct
MPAAKRVKLDGGDKKYSIGLDIGTNSVGWAVITDEYKVPSKKFKVLGNTDRHSIKKNLIGALLFDSGETAEATRLKRTARRRYTRRKNRICYLQEIFSNEMAKVDDSFFHRLEESFLVEEDKKHERHPIFGNIVDEVAYHEKYPTIYHLRKKLVDSTDKADLRLIYLALAHMIKFRGHFLIEGDLNPDNSDVDKLFIQLVQTYNQLFEENPINASGVDAKAILSARLSKSRRLENLIAQLPGEKKNGLFGNLIALSLGLTPNFKSNFDLAEDAKLQLSKDTYDDDLDNLLAQIGDQYADLFLAAKNLSDAILLSDILRVNTEITKAPLSASMIKRYDEHHQDLTLLKALVRQQLPEKYKEIFFDQSKNGYAGYIDGGASQEEFYKFIKPILEKMDGTEELLVKLNREDLLRKQRTFDNGSIPHQIHLGELHAILRRQEDFYPFLKDNREKIEKILTFRIPYYVGPLARGNSRFAWMTRKSEETITPWNFEEVVDKGASAQSFIERMTNFDKNLPNEKVLPKHSLLYEYFTVYNELTKVKYVTEGMRKPAFLSGEQKKAIVDLLFKTNRKVTVKQLKEDYFKKIECFDSVEISGVEDRFNASLGTYHDLLKIIKDKDFLDNEENEDILEDIVLTLTLFEDREMIEERLKTYAHLFDDKVMKQLKRRRYTGWGRLSRKLINGIRDKQSGKTILDFLKSDGFANRNFMQLIHDDSLTFKEDIQKAQVSGQGDSLHEHIANLAGSPAIKKGILQTVKVVDELVKVMGRHKPENIVIEMARENQTTQKGQKNSRERMKRIEEGIKELGSQILKEHPVENTQLQNEKLYLYYLQNGRDMYVDQELDINRLSDYDVDHIVPQSFLKDDSIDNKVLTRSDKARGKSDNVPSEEVVKKMKNYWRQLLNAKLITQRKFDNLTKAERGGLSELDKAGFIKRQLVETRQITKHVAQILDSRMNTKYDENDKLIREVKVITLKSKLVSDFRKDFQFYKVREINNYHHAHDAYLNAVVGTALIKKYPKLESEFVYGDYKVYDVRKMIAKSEQEIGKATAKYFFYSNIMNFFKTEITLANGEIRKRPLIETNGETGEIVWDKGRDFATVRKVLSMPQVNIVKKTEVQTGGFSKESILPKRNSDKLIARKKDWDPKKYGGFDSPTVAYSVLVVAKVEKGKSKKLKSVKELLGITIMERSSFEKNPIDFLEAKGYKEVKKDLIIKLPKYSLFELENGRKRMLASAGELQKGNELALPSKYVNFLYLASHYEKLKGSPEDNEQKQLFVEQHKHYLDEIIEQISEFSKRVILADANLDKVLSAYNKHRDKPIREQAENIIHLFTLTNLGAPAAFKYFDTTIDRKRYTSTKEVLDATLIHQSITGLYETRIDLSQLGGDGGPAPAPAPAPGGTLQLEEEYRLFEPESTQKQEMDIWLKNFPQAWAETGGMGTAHCQAPVLIQLKATATPISIRQYPMPHEAYQGIKPHIRRMLDQGILKPCQSPWNTPLLPVKKPGTEDYRPVQDLREVNKRVEDIHPTVPNPYNLLSTLPPSHPWYTVLDLKDAFFCLRLHSESQLLFAFEWRDPEIGLSGQLTWTRLPQGFKNSPTLFNEALHSDLADFRVRYPALVLLQYVDDLLLAAATRTECLEGTKALLETLGNKGYRASAKKAQICLQEVTYLGYSLKDGQRWLTKARKEAILSIPVPKNSRQVREFLGTAGYCRLWIPGFAELAAPLYPLTRPGTLFQWGTEQQLAFEDIKKALLSSPALGLPDITKPFELFIDENSGFAKGVLVQKLGPWKRPVAYLSKKLDTVASGWPPCLRMVAAIAILVKDAGKLTLGQPLTILTSHPVEALVRQPPNKWLSNARMTHYQAMLLDAERVHFGPTVSLNPATLLPLPSGGNHHDCLQILAETHGTRPDLTDQPLPDADLTWYTDGSSFIRNGEREAGAAVTTESEVIWAAPLPPGTSAQRAELIALTQALKMAEGKKLTVYTDSRYAFATTHVHGEIYRRRGWLTSEGKEIKNKNEILALLEALFLPKRLSIIHCPGHQKGDSPQAKGNRLADDTAKKAATETHSSLTVLPAGKRTADGSEFEKRTADGSEFESPKKKAKVE

SEQ ID NO: 6518 - protein, 2085 aa, synthetic construct
MPAAKRVKLDGGDKKYSIGLDIGTNSVGWAVITDEYKVPSKKFKVLGNTDRHSIKKNLIGALLFDSGETAEATRLKRTARRRYTRRKNRICYLQEIFSNEMAKVDDSFFHRLEESFLVEEDKKHERHPIFGNIVDEVAYHEKYPTIYHLRKKLVDSTDKADLRLIYLALAHMIKFRGHFLIEGDLNPDNSDVDKLFIQLVQTYNQLFEENPINASGVDAKAILSARLSKSRRLENLIAQLPGEKKNGLFGNLIALSLGLTPNFKSNFDLAEDAKLQLSKDTYDDDLDNLLAQIGDQYADLFLAAKNLSDAILLSDILRVNTEITKAPLSASMIKRYDEHHQDLTLLKALVRQQLPEKYKEIFFDQSKNGYAGYIDGGASQEEFYKFIKPILEKMDGTEELLVKLNREDLLRKQRTFDNGSIPHQIHLGELHAILRRQEDFYPFLKDNREKIEKILTFRIPYYVGPLARGNSRFAWMTRKSEETITPWNFEEVVDKGASAQSFIERMTNFDKNLPNEKVLPKHSLLYEYFTVYNELTKVKYVTEGMRKPAFLSGEQKKAIVDLLFKTNRKVTVKQLKEDYFKKIECFDSVEISGVEDRFNASLGTYHDLLKIIKDKDFLDNEENEDILEDIVLTLTLFEDREMIEERLKTYAHLFDDKVMKQLKRRRYTGWGRLSRKLINGIRDKQSGKTILDFLKSDGFANRNFMQLIHDDSLTFKEDIQKAQVSGQGDSLHEHIANLAGSPAIKKGILQTVKVVDELVKVMGRHKPENIVIEMARENQTTQKGQKNSRERMKRIEEGIKELGSQILKEHPVENTQLQNEKLYLYYLQNGRDMYVDQELDINRLSDYDVDHIVPQSFLKDDSIDNKVLTRSDKARGKSDNVPSEEVVKKMKNYWRQLLNAKLITQRKFDNLTKAERGGLSELDKAGFIKRQLVETRQITKHVAQILDSRMNTKYDENDKLIREVKVITLKSKLVSDFRKDFQFYKVREINNYHHAHDAYLNAVVGTALIKKYPKLESEFVYGDYKVYDVRKMIAKSEQEIGKATAKYFFYSNIMNFFKTEITLANGEIRKRPLIETNGETGEIVWDKGRDFATVRKVLSMPQVNIVKKTEVQTGGFSKESILPKRNSDKLIARKKDWDPKKYGGFDSPTVAYSVLVVAKVEKGKSKKLKSVKELLGITIMERSSFEKNPIDFLEAKGYKEVKKDLIIKLPKYSLFELENGRKRMLASAGELQKGNELALPSKYVNFLYLASHYEKLKGSPEDNEQKQLFVEQHKHYLDEIIEQISEFSKRVILADANLDKVLSAYNKHRDKPIREQAENIIHLFTLTNLGAPAAFKYFDTTIDRKRYTSTKEVLDATLIHQSITGLYETRIDLSQLGGDGGPAPAPAPAPGGVPWLTQQPLQLTILVPLQEYQEKILSKTALPEDQKQQLKTLFVKYDNLWQHWENQVGHRKIRPHNIATGDYPPRPQKQYPINPKAKPSIQIVIDDLLKQGVLTPQNSTMNTPVYPVPKPDGRWRMVLDYREVNKTIPLTAAQNQHSAGILATIVRQKYKTTLDLANGFWAHPITPESYWLTAFTWQGKQYCWTRLPQGFLNSPALFNADVVDLLKEIPNVQVYVDDIYLSHDDPKEHVQQLEKVFQILLQAGYVVSLKKSEIGQKTVEFLGFNITKEGRGLTDTFKTKLLNITPPKDLKQLQSILGKLNFARNFIPNFAELVQPLYNLIAPAKGKYIEWSEENTKQLNMVIEALNTASNLEERLPEQRLVIKVNTSPSAGYVRYYNETGKKPIMYLNYVFSKAELKFSMLEKLLTTMHKALIKAMDLAMGQEILVYSPIVSMTKIQKTPLPERKALPIRWITWMTYLEDPRIQFHYDKTLPELKHIPDVYTSSQSPVKHPSQYEGVFYTDGSAIKSPDPTKSNNAGMGIVHATYKPEYQVLNQWSIPLGNHTAQMAEIAAVEFACKKALKIPGPVLVITDSFYVAESANKELPYWKSNGFVNNKKKPLKHISKWKSIAECLSMKPDITIQHEKGISLQIPVFILKGNALADKLATQGSYVVNAGKRTADGSEFEKRTADGSEFESPKKKAKVE

SEQ ID NO: 6519 - protein, 2216 aa, synthetic construct
MPAAKRVKLDGGDKKYSIGLDIGTNSVGWAVITDEYKVPSKKFKVLGNTDRHSIKKNLIGALLFDSGETAEATRLKRTARRRYTRRKNRICYLQEIFSNEMAKVDDSFFHRLEESFLVEEDKKHERHPIFGNIVDEVAYHEKYPTIYHLRKKLVDSTDKADLRLIYLALAHMIKFRGHFLIEGDLNPDNSDVDKLFIQLVQTYNQLFEENPINASGVDAKAILSARLSKSRRLENLIAQLPGEKKNGLFGNLIALSLGLTPNFKSNFDLAEDAKLQLSKDTYDDDLDNLLAQIGDQYADLFLAAKNLSDAILLSDILRVNTEITKAPLSASMIKRYDEHHQDLTLLKALVRQQLPEKYKEIFFDQSKNGYAGYIDGGASQEEFYKFIKPILEKMDGTEELLVKLNREDLLRKQRTFDNGSIPHQIHLGELHAILRRQEDFYPFLKDNREKIEKILTFRIPYYVGPLARGNSRFAWMTRKSEETITPWNFEEVVDKGASAQSFIERMTNFDKNLPNEKVLPKHSLLYEYFTVYNELTKVKYVTEGMRKPAFLSGEQKKAIVDLLFKTNRKVTVKQLKEDYFKKIECFDSVEISGVEDRFNASLGTYHDLLKIIKDKDFLDNEENEDILEDIVLTLTLFEDREMIEERLKTYAHLFDDKVMKQLKRRRYTGWGRLSRKLINGIRDKQSGKTILDFLKSDGFANRNFMQLIHDDSLTFKEDIQKAQVSGQGDSLHEHIANLAGSPAIKKGILQTVKVVDELVKVMGRHKPENIVIEMARENQTTQKGQKNSRERMKRIEEGIKELGSQILKEHPVENTQLQNEKLYLYYLQNGRDMYVDQELDINRLSDYDVDHIVPQSFLKDDSIDNKVLTRSDKARGKSDNVPSEEVVKKMKNYWRQLLNAKLITQRKFDNLTKAERGGLSELDKAGFIKRQLVETRQITKHVAQILDSRMNTKYDENDKLIREVKVITLKSKLVSDFRKDFQFYKVREINNYHHAHDAYLNAVVGTALIKKYPKLESEFVYGDYKVYDVRKMIAKSEQEIGKATAKYFFYSNIMNFFKTEITLANGEIRKRPLIETNGETGEIVWDKGRDFATVRKVLSMPQVNIVKKTEVQTGGFSKESILPKRNSDKLIARKKDWDPKKYGGFDSPTVAYSVLVVAKVEKGKSKKLKSVKELLGITIMERSSFEKNPIDFLEAKGYKEVKKDLIIKLPKYSLFELENGRKRMLASAGELQKGNELALPSKYVNFLYLASHYEKLKGSPEDNEQKQLFVEQHKHYLDEIIEQISEFSKRVILADANLDKVLSAYNKHRDKPIREQAENIIHLFTLTNLGAPAAFKYFDTTIDRKRYTSTKEVLDATLIHQSITGLYETRIDLSQLGGDGGPAPAPAPAPGGTLGDQGSRGSDPLPEPRVTLTVEGIPTEFLVNTGAEHSVLTKPMGKMGSKRTVVAGATGSKVYPWTTKRLLKIGQKQVTHSFLVIPECPAPLLGRDLLTKLKAQIQFSTEGPQVTWEDRPAMCLVLNLEEEYRLHEKPVPPSIDPSWLQLFPMVWAEKAGMGLANQVPPVVVELKSDASPVAVRQYPMSKEAREGIRPHIQRFLDLGILVPCQSPWNTPLLPVKKPGTNDYRPVQDLREVNKRVQDIHPTVPNPYNLLSSLPPSHTWYSVLDLKDAFFCLKLHPNSQPLFAFEWRDPEKGNTGQLTWTRLPQGFKNSPTLFDEALHRDLASFRALNPQVVMLQYVDDLLVAAPTYRDCKEGTRRLLQELSKLGYRVSAKKAQLCREEVTYLGYLLKGGKRWLTPARKATVMKIPTPTTPRQVREFLGTAGFCRLWIPGFASLAAPLYPLTREKVPFTWTEAHQEAFGRIKEALLSAPALALPDLTKPFALYVDEKEGVARGVLTQTLGPWRRPVAYLSKKLDPVASGWPTCLKAIAAVALLLKDADKLTLGQNVLVIAPHNLESIVRQPPDRWMTNARMTHYQSLLLNERVSFAPPAILNPATLLPVESDDTPIHICSEILAEETGTRPDLRDQPLPGVPAWYTDGSSFIMDGRRQAGAAIVDNKRTVWASNLPEGTSAQKAELIALTQALRLAEGKSINIYTDSRYAFATAHVHGAIYKQRGLLTSAGKDIKNKEEILALLEAIHLPKRVAIIHCPGHQRGTDPVATGNRKADEAAKQAAQSTRILTETTKNAGKRTADGSEFEKRTADGSEFESPKKKAKVE

SEQ ID NO: 6520 - protein, 2125 aa, synthetic construct
MPAAKRVKLDGGDKKYSIGLDIGTNSVGWAVITDEYKVPSKKFKVLGNTDRHSIKKNLIGALLFDSGETAEATRLKRTARRRYTRRKNRICYLQEIFSNEMAKVDDSFFHRLEESFLVEEDKKHERHPIFGNIVDEVAYHEKYPTIYHLRKKLVDSTDKADLRLIYLALAHMIKFRGHFLIEGDLNPDNSDVDKLFIQLVQTYNQLFEENPINASGVDAKAILSARLSKSRRLENLIAQLPGEKKNGLFGNLIALSLGLTPNFKSNFDLAEDAKLQLSKDTYDDDLDNLLAQIGDQYADLFLAAKNLSDAILLSDILRVNTEITKAPLSASMIKRYDEHHQDLTLLKALVRQQLPEKYKEIFFDQSKNGYAGYIDGGASQEEFYKFIKPILEKMDGTEELLVKLNREDLLRKQRTFDNGSIPHQIHLGELHAILRRQEDFYPFLKDNREKIEKILTFRIPYYVGPLARGNSRFAWMTRKSEETITPWNFEEVVDKGASAQSFIERMTNFDKNLPNEKVLPKHSLLYEYFTVYNELTKVKYVTEGMRKPAFLSGEQKKAIVDLLFKTNRKVTVKQLKEDYFKKIECFDSVEISGVEDRFNASLGTYHDLLKIIKDKDFLDNEENEDILEDIVLTLTLFEDREMIEERLKTYAHLFDDKVMKQLKRRRYTGWGRLSRKLINGIRDKQSGKTILDFLKSDGFANRNFMQLIHDDSLTFKEDIQKAQVSGQGDSLHEHIANLAGSPAIKKGILQTVKVVDELVKVMGRHKPENIVIEMARENQTTQKGQKNSRERMKRIEEGIKELGSQILKEHPVENTQLQNEKLYLYYLQNGRDMYVDQELDINRLSDYDVDHIVPQSFLKDDSIDNKVLTRSDKARGKSDNVPSEEVVKKMKNYWRQLLNAKLITQRKFDNLTKAERGGLSELDKAGFIKRQLVETRQITKHVAQILDSRMNTKYDENDKLIREVKVITLKSKLVSDFRKDFQFYKVREINNYHHAHDAYLNAVVGTALIKKYPKLESEFVYGDYKVYDVRKMIAKSEQEIGKATAKYFFYSNIMNFFKTEITLANGEIRKRPLIETNGETGEIVWDKGRDFATVRKVLSMPQVNIVKKTEVQTGGFSKESILPKRNSDKLIARKKDWDPKKYGGFDSPTVAYSVLVVAKVEKGKSKKLKSVKELLGITIMERSSFEKNPIDFLEAKGYKEVKKDLIIKLPKYSLFELENGRKRMLASAGELQKGNELALPSKYVNFLYLASHYEKLKGSPEDNEQKQLFVEQHKHYLDEIIEQISEFSKRVILADANLDKVLSAYNKHRDKPIREQAENIIHLFTLTNLGAPAAFKYFDTTIDRKRYTSTKEVLDATLIHQSITGLYETRIDLSQLGGDGGPAPAPAPAPGGLLGRDLLTKLKAQIQFSTEGPQVTWEDRPAMCLVLNLEEEYRLHEKPVPPSIDPSWLQLFPMVWAEKAGMGLANQVPPVVVELKSDASPVAVRQYPMSKEAREGIRPHIQRFLDLGILVPCQSPWNTPLLPVKKPGTNDYRPVQDLREVNKRVQDIHPTVPNPYNLLSSLPPSHTWYSVLDLKDAFFCLKLHPNSQPLFAFEWRDPEKGNTGQLTWTRLPQGFKNSPTLFNEALHRDLASFRALNPQVVMLQYVDDLLVAAPTYRDCKEGTRRLLQELSKLGYRVSAKKAQLCREEVTYLGYLLKGGKRWLTPARKATVMKIPTPTTPRQVREFLGTAGFCRLWIPGFASLAAPLYPLTRPKVPFTWTEAHQEAFGRIKEALLSAPALALPDLTKPFALYVDEKEGVARGVLTQTLGPWRRPVAYLSKKLDPVASGWPTCLKAIAAVALLLKDADKLTLGQNVLVIAPHNLESIVRQPPDRWMTNARMTHYQSLLLNERVSFAPPAILNPATLLPVESDDTPIHICSEILAEETGTRPDLRDQPLPGVPAWYTDGSSFIMDGRRQAGAAIVDNKRTVWASNLPEGTSAQKAELIALTQALRLAEGKSINIYTDSRYAFATAHVHGAIYKQRGWLTSAGKDIKNKEEILALLEAIHLPKRVAIIHCPGHQRGTDPVATGNRKADEAAKQAAQSTRILTETTKNAGKRTADGSEFEKRTADGSEFESPKKKAKVE

SEQ ID NO: 6521 - protein, 2216 aa, synthetic construct
MPAAKRVKLDGGDKKYSIGLDIGTNSVGWAVITDEYKVPSKKFKVLGNTDRHSIKKNLIGALLFDSGETAEATRLKRTARRRYTRRKNRICYLQEIFSNEMAKVDDSFFHRLEESFLVEEDKKHERHPIFGNIVDEVAYHEKYPTIYHLRKKLVDSTDKADLRLIYLALAHMIKFRGHFLIEGDLNPDNSDVDKLFIQLVQTYNQLFEENPINASGVDAKAILSARLSKSRRLENLIAQLPGEKKNGLFGNLIALSLGLTPNFKSNFDLAEDAKLQLSKDTYDDDLDNLLAQIGDQYADLFLAAKNLSDAILLSDILRVNTEITKAPLSASMIKRYDEHHQDLTLLKALVRQQLPEKYKEIFFDQSKNGYAGYIDGGASQEEFYKFIKPILEKMDGTEELLVKLNREDLLRKQRTFDNGSIPHQIHLGELHAILRRQEDFYPFLKDNREKIEKILTFRIPYYVGPLARGNSRFAWMTRKSEETITPWNFEEVVDKGASAQSFIERMTNFDKNLPNEKVLPKHSLLYEYFTVYNELTKVKYVTEGMRKPAFLSGEQKKAIVDLLFKTNRKVTVKQLKEDYFKKIECFDSVEISGVEDRFNASLGTYHDLLKIIKDKDFLDNEENEDILEDIVLTLTLFEDREMIEERLKTYAHLFDDKVMKQLKRRRYTGWGRLSRKLINGIRDKQSGKTILDFLKSDGFANRNFMQLIHDDSLTFKEDIQKAQVSGQGDSLHEHIANLAGSPAIKKGILQTVKVVDELVKVMGRHKPENIVIEMARENQTTQKGQKNSRERMKRIEEGIKELGSQILKEHPVENTQLQNEKLYLYYLQNGRDMYVDQELDINRLSDYDVDHIVPQSFLKDDSIDNKVLTRSDKARGKSDNVPSEEVVKKMKNYWRQLLNAKLITQRKFDNLTKAERGGLSELDKAGFIKRQLVETRQITKHVAQILDSRMNTKYDENDKLIREVKVITLKSKLVSDFRKDFQFYKVREINNYHHAHDAYLNAVVGTALIKKYPKLESEFVYGDYKVYDVRKMIAKSEQEIGKATAKYFFYSNIMNFFKTEITLANGEIRKRPLIETNGETGEIVWDKGRDFATVRKVLSMPQVNIVKKTEVQTGGFSKESILPKRNSDKLIARKKDWDPKKYGGFDSPTVAYSVLVVAKVEKGKSKKLKSVKELLGITIMERSSFEKNPIDFLEAKGYKEVKKDLIIKLPKYSLFELENGRKRMLASAGELQKGNELALPSKYVNFLYLASHYEKLKGSPEDNEQKQLFVEQHKHYLDEIIEQISEFSKRVILADANLDKVLSAYNKHRDKPIREQAENIIHLFTLTNLGAPAAFKYFDTTIDRKRYTSTKEVLDATLIHQSITGLYETRIDLSQLGGDGGPAPAPAPAPGGTLGDQGSRGSDPLPEPRVTLTVEGIPTEFLVNTGAEHSVLTKPMGKMGSKRTVVAGATGSKVYPWTTKRLLKIGQKQVTHSFLVIPECPAPLLGRDLLTKLKAQIQFSTEGPQVTWEDRPAMCLVLNLEEEYRLHEKPVPPSIDPSWLQLFPMVWAEKAGMGLANQVPPVVVELKSDASPVAVRQYPMSKEAREGIRPHIQRFLDLGILVPCQSPWNTPLLPVKKPGTNDYRPVQDLREVNKRVQDIHPTVPNPYNLLSSLPPSHTWYSVLDLKDAFFCLKLHPNSQPLFAFEWRDPEKGNTGQLTWTRLPQGFKNSPTLFNEALHRDLASFRALNPQVVMLQYVDDLLVAAPTYRDCKEGTRRLLQELSKLGYRVSAKKAQLCREEVTYLGYLLKGGKRWLTPARKATVMKIPTPTTPRQVREFLGTAGFCRLWIPGFASLAAPLYPLTRPKVPFTWTEAHQEAFGRIKEALLSAPALALPDLTKPFALYVDEKEGVARGVLTQTLGPWRRPVAYLSKKLDPVASGWPTCLKAIAAVALLLKDADKLTLGQNVLVIAPHNLESIVRQPPDRWMTNARMTHYQSLLLNERVSFAPPAILNPATLLPVESDDTPIHICSEILAEETGTRPDLRDQPLPGVPAWYTDGSSFIMDGRRQAGAAIVDNKRTVWASNLPEGTSAQKAELIALTQALRLAEGKSINIYTDSRYAFATAHVHGAIYKQRGWLTSAGKDIKNKEEILALLEAIHLPKRVAIIHCPGHQRGTDPVATGNRKADEAAKQAAQSTRILTETTKNAGKRTADGSEFEKRTADGSEFESPKKKAKVE

SEQ ID NO: 6522 - protein, 2094 aa, synthetic construct
MPAAKRVKLDGGDKKYSIGLDIGTNSVGWAVITDEYKVPSKKFKVLGNTDRHSIKKNLIGALLFDSGETAEATRLKRTARRRYTRRKNRICYLQEIFSNEMAKVDDSFFHRLEESFLVEEDKKHERHPIFGNIVDEVAYHEKYPTIYHLRKKLVDSTDKADLRLIYLALAHMIKFRGHFLIEGDLNPDNSDVDKLFIQLVQTYNQLFEENPINASGVDAKAILSARLSKSRRLENLIAQLPGEKKNGLFGNLIALSLGLTPNFKSNFDLAEDAKLQLSKDTYDDDLDNLLAQIGDQYADLFLAAKNLSDAILLSDILRVNTEITKAPLSASMIKRYDEHHQDLTLLKALVRQQLPEKYKEIFFDQSKNGYAGYIDGGASQEEFYKFIKPILEKMDGTEELLVKLNREDLLRKQRTFDNGSIPHQIHLGELHAILRRQEDFYPFLKDNREKIEKILTFRIPYYVGPLARGNSRFAWMTRKSEETITPWNFEEVVDKGASAQSFIERMTNFDKNLPNEKVLPKHSLLYEYFTVYNELTKVKYVTEGMRKPAFLSGEQKKAIVDLLFKTNRKVTVKQLKEDYFKKIECFDSVEISGVEDRFNASLGTYHDLLKIIKDKDFLDNEENEDILEDIVLTLTLFEDREMIEERLKTYAHLFDDKVMKQLKRRRYTGWGRLSRKLINGIRDKQSGKTILDFLKSDGFANRNFMQLIHDDSLTFKEDIQKAQVSGQGDSLHEHIANLAGSPAIKKGILQTVKVVDELVKVMGRHKPENIVIEMARENQTTQKGQKNSRERMKRIEEGIKELGSQILKEHPVENTQLQNEKLYLYYLQNGRDMYVDQELDINRLSDYDVDHIVPQSFLKDDSIDNKVLTRSDKARGKSDNVPSEEVVKKMKNYWRQLLNAKLITQRKFDNLTKAERGGLSELDKAGFIKRQLVETRQITKHVAQILDSRMNTKYDENDKLIREVKVITLKSKLVSDFRKDFQFYKVREINNYHHAHDAYLNAVVGTALIKKYPKLESEFVYGDYKVYDVRKMIAKSEQEIGKATAKYFFYSNIMNFFKTEITLANGEIRKRPLIETNGETGEIVWDKGRDFATVRKVLSMPQVNIVKKTEVQTGGFSKESILPKRNSDKLIARKKDWDPKKYGGFDSPTVAYSVLVVAKVEKGKSKKLKSVKELLGITIMERSSFEKNPIDFLEAKGYKEVKKDLIIKLPKYSLFELENGRKRMLASAGELQKGNELALPSKYVNFLYLASHYEKLKGSPEDNEQKQLFVEQHKHYLDEIIEQISEFSKRVILADANLDKVLSAYNKHRDKPIREQAENIIHLFTLTNLGAPAAFKYFDTTIDRKRYTSTKEVLDATLIHQSITGLYETRIDLSQLGGDGGPAPAPAPAPGGLGIEDEYRLHETSTEPDVSLGSTWLSDFPQAWAETGGMGLAVRQAPLIIPLKATSTPVSIQQYPMSHEARLGIKPHIQRLLDQGILVPCQSPWNTPLLPVKKPGTNDYRPVQDLREVNKRVEDIHPTVPNPYNLLSGLPPSHQWYTVLDLKDAFFCLRLHPTSQPLFAFEWRDPGMGISGQLTWTRLPQGFKNSPTLFNEALHRDLADFRIQHPDLILLQYVDDILLAATSELDCQQGTRALLQTLGDLGYRASAKKAQICQKQVKYLGYLLREGQRWLTEARKETVMGQPVPKTPRQLREFLGKAGFCRLFIPGFAEMAAPLYPLTKPGTLFSWGPDQQKAYQEIKQALLTAPALGLPDLTKPFELFVDEKQGYAKGVLTQKLGPWRRPVAYLSKKLDPVAAGWPPCLRMVAAIAVLTKDAGKLTMGQPLVILAPHAVEALVKQPPDRWLSNARMTHYQAMLLDTDRVQFGPVVALNPATLLPLPEEGAPHDCLEILAETHGTRPDLTDQPIPDADHTWYTDGSSFLQEGQRKAGAAVTTETEVIWAGALPAGTSAQRAELIALTQALKMAEGKRLNVYTDSRYAFATAHIHGEIYRRRGWLTSEGREIKNKSEILALLKALFLPKRLSIIHCLGHQKGDSAEARGNRLADQAAREAAIKTPPDTSTLLIAGKRTADGSEFEKRTADGSEFESPKKKAKVE

SEQ ID NO: 6523 - protein, 2094 aa, synthetic construct; identical to SEQ ID NO: 6522

SEQ ID NO: 6524 - protein, 2094 aa, synthetic construct
MPAAKRVKLDGGDKKYSIGLDIGTNSVGWAVITDEYKVPSKKFKVLGNTDRHSIKKNLIGALLFDSGETAEATRLKRTARRRYTRRKNRICYLQEIFSNEMAKVDDSFFHRLEESFLVEEDKKHERHPIFGNIVDEVAYHEKYPTIYHLRKKLVDSTDKADLRLIYLALAHMIKFRGHFLIEGDLNPDNSDVDKLFIQLVQTYNQLFEENPINASGVDAKAILSARLSKSRRLENLIAQLPGEKKNGLFGNLIALSLGLTPNFKSNFDLAEDAKLQLSKDTYDDDLDNLLAQIGDQYADLFLAAKNLSDAILLSDILRVNTEITKAPLSASMIKRYDEHHQDLTLLKALVRQQLPEKYKEIFFDQSKNGYAGYIDGGASQEEFYKFIKPILEKMDGTEELLVKLNREDLLRKQRTFDNGSIPHQIHLGELHAILRRQEDFYPFLKDNREKIEKILTFRIPYYVGPLARGNSRFAWMTRKSEETITPWNFEEVVDKGASAQSFIERMTNFDKNLPNEKVLPKHSLLYEYFTVYNELTKVKYVTEGMRKPAFLSGEQKKAIVDLLFKTNRKVTVKQLKEDYFKKIECFDSVEISGVEDRFNASLGTYHDLLKIIKDKDFLDNEENEDILEDIVLTLTLFEDREMIEERLKTYAHLFDDKVMKQLKRRRYTGWGRLSRKLINGIRDKQSGKTILDFLKSDGFANRNFMQLIHDDSLTFKEDIQKAQVSGQGDSLHEHIANLAGSPAIKKGILQTVKVVDELVKVMGRHKPENIVIEMARENQTTQKGQKNSRERMKRIEEGIKELGSQILKEHPVENTQLQNEKLYLYYLQNGRDMYVDQELDINRLSDYDVDHIVPQSFLKDDSIDNKVLTRSDKARGKSDNVPSEEVVKKMKNYWRQLLNAKLITQRKFDNLTKAERGGLSELDKAGFIKRQLVETRQITKHVAQILDSRMNTKYDENDKLIREVKVITLKSKLVSDFRKDFQFYKVREINNYHHAHDAYLNAVVGTALIKKYPKLESEFVYGDYKVYDVRKMIAKSEQEIGKATAKYFFYSNIMNFFKTEITLANGEIRKRPLIETNGETGEIVWDKGRDFATVRKVLSMPQVNIVKKTEVQTGGFSKESILPKRNSDKLIARKKDWDPKKYGGFDSPTVAYSVLVVAKVEKGKSKKLKSVKELLGITIMERSSFEKNPIDFLEAKGYKEVKKDLIIKLPKYSLFELENGRKRMLASAGELQKGNELALPSKYVNFLYLASHYEKLKGSPEDNEQKQLFVEQHKHYLDEIIEQISEFSKRVILADANLDKVLSAYNKHRDKPIREQAENIIHLFTLTNLGAPAAFKYFDTTIDRKRYTSTKEVLDATLIHQSITGLYETRIDLSQLGGDGGPAPAPAPAPGGTLNIEDEHRLHETSKEPDVSLGSTWLSDFPQAWAETGGMGLAVRQAPLIIPLKATSTPVSIKQYPMSQEARLGIKPHIQRLLDQGILVPCQSPWNTPLLPVKKPGTNDYRPVQDLREVNKRVEDIHPTVPNPYNLLSGLPPSHQWYTVLDLKDAFFCLRLHPTSQPLFAFEWRDPEMGISGQLTWTRLPQGFKNSPTLFDEALHRDLADFRIQHPDLILLQYVDDLLLAATSELDCQQGTRALLQTLGNLGYRASAKKAQICQKQVKYLGYLLKEGQRWLTEARKETVMGQPTPKTPRQLREFLGTAGFCRLWIPGFAEMAAPLYPLTKTGTLFNWGPDQQKAYQEIKQALLTAPALGLPDLTKPFELFVDEKQGYAKGVLTQKLGPWRRPVAYLSKKLDPVAAGWPPCLRMVAAIAVLTKDAGKLTMGQPLVILAPHAVEALVKQPPDRWLSNARMTHYQALLLDTDRVQFGPVVALNPATLLPLPEEGLQHNCLDILAEAHGTRPDLTDQPLPDADHTWYTDGSSLLQEGQRKAGAAVTTETEVIWAKALPAGTSAQRAELIALTQALKMAEGKKLNVYTDSRYAFATAHIHGEIYRRRGLLTSEGKEIKNKDEILALLKALFLPKRLSIIHCPGHQKGHSAEARGNRMADQAARKAAITETPDTSTLLAGKRTADGSEFEKRTADGSEFESPKKKAKVE

SEQ ID NO: 6525 - protein, 2086 aa, synthetic construct
MPAAKRVKLDGGDKKYSIGLDIGTNSVGWAVITDEYKVPSKKFKVLGNTDRHSIKKNLIGALLFDSGETAEATRLKRTARRRYTRRKNRICYLQEIFSNEMAKVDDSFFHRLEESFLVEEDKKHERHPIFGNIVDEVAYHEKYPTIYHLRKKLVDSTDKADLRLIYLALAHMIKFRGHFLIEGDLNPDNSDVDKLFIQLVQTYNQLFEENPINASGVDAKAILSARLSKSRRLENLIAQLPGEKKNGLFGNLIALSLGLTPNFKSNFDLAEDAKLQLSKDTYDDDLDNLLAQIGDQYADLFLAAKNLSDAILLSDILRVNTEITKAPLSASMIKRYDEHHQDLTLLKALVRQQLPEKYKEIFFDQSKNGYAGYIDGGASQEEFYKFIKPILEKMDGTEELLVKLNREDLLRKQRTFDNGSIPHQIHLGELHAILRRQEDFYPFLKDNREKIEKILTFRIPYYVGPLARGNSRFAWMTRKSEETITPWNFEEVVDKGASAQSFIERMTNFDKNLPNEKVLPKHSLLYEYFTVYNELTKVKYVTEGMRKPAFLSGEQKKAIVDLLFKTNRKVTVKQLKEDYFKKIECFDSVEISGVEDRFNASLGTYHDLLKIIKDKDFLDNEENEDILEDIVLTLTLFEDREMIEERLKTYAHLFDDKVMKQLKRRRYTGWGRLSRKLINGIRDKQSGKTILDFLKSDGFANRNFMQLIHDDSLTFKEDIQKAQVSGQGDSLHEHIANLAGSPAIKKGILQTVKVVDELVKVMGRHKPENIVIEMARENQTTQKGQKNSRERMKRIEEGIKELGSQILKEHPVENTQLQNEKLYLYYLQNGRDMYVDQELDINRLSDYDVDHIVPQSFLKDDSIDNKVLTRSDKARGKSDNVPSEEVVKKMKNYWRQLLNAKLITQRKFDNLTKAERGGLSELDKAGFIKRQLVETRQITKHVAQILDSRMNTKYDENDKLIREVKVITLKSKLVSDFRKDFQFYKVREINNYHHAHDAYLNAVVGTALIKKYPKLESEFVYGDYKVYDVRKMIAKSEQEIGKATAKYFFYSNIMNFFKTEITLANGEIRKRPLIETNGETGEIVWDKGRDFATVRKVLSMPQVNIVKKTEVQTGGFSKESILPKRNSDKLIARKKDWDPKKYGGFDSPTVAYSVLVVAKVEKGKSKKLKSVKELLGITIMERSSFEKNPIDFLEAKGYKEVKKDLIIKLPKYSLFELENGRKRMLASAGELQKGNELALPSKYVNFLYLASHYEKLKGSPEDNEQKQLFVEQHKHYLDEIIEQISEFSKRVILADANLDKVLSAYNKHRDKPIREQAENIIHLFTLTNLGAPAAFKYFDTTIDRKRYTSTKEVLDATLIHQSITGLYETRIDLSQLGGDGGPAPAPAPAPGGLDDEYRLYSPLVKPDQNIQFWLEQFPQAWAETAGMGLAKQVPPQVIQLKASATPVSVRQYPLSKEAQEGIRPHVQRLIQQGILVPVQSPWNTPLLPVRKPGTNDYRPVQDLREVNKRVQDIHPTVPNPYNLLCALPPQRSWYTVLDLKDAFFCLRLHPTSQPLFAFEWRDPGTGRTGQLTWTRLPQGFKNSPTIFNEALHRDLANFRIQHPQVTLLQYVDDLLLAGATKQDCLEGTKALLLELSDLGYRASAKKAQICRREVTYLGYSLRDGQRWLTEARKKTVVQIPAPTTAKQVREFLGKAGFCRLFIPGFATLAAPLYPLTKPKGEFSWAPEHQKAFDAIKKALLSAPALALPDVTKPFTLYVDERKGVARGVLTQTLGPWRRPVAYLSKKLDPVASGWPVCLKAIAAVAILVKDADKLTLGQNITVIAPHALENIVRQPPDRWMTNARMTHYQSLLLTERVTFAPPAALNPATLLPEETDEPVTHDCHQLLIEETGVRKDLTDIPLTGEVLTWFTDGSSYVVEGKRMAGAAVVDGTRTIWASSLPEGTSAQKAELMALTQALRLAEGKSINIYTDSRYAFATAHVHGAIYKQRGWLTSAGREIKNKEEILSLLEALHLPKRLAIIHCPGHQKAKDPISRGNQMADRVAKQAAQGVNLLPAGKRTADGSEFEKRTADGSEFESPKKKAKVE

SEQ ID NO: 6526 - protein, 2088 aa, synthetic construct
MPAAKRVKLDGGDKKYSIGLDIGTNSVGWAVITDEYKVPSKKFKVLGNTDRHSIKKNLIGALLFDSGETAEATRLKRTARRRYTRRKNRICYLQEIFSNEMAKVDDSFFHRLEESFLVEEDKKHERHPIFGNIVDEVAYHEKYPTIYHLRKKLVDSTDKADLRLIYLALAHMIKFRGHFLIEGDLNPDNSDVDKLFIQLVQTYNQLFEENPINASGVDAKAILSARLSKSRRLENLIAQLPGEKKNGLFGNLIALSLGLTPNFKSNFDLAEDAKLQLSKDTYDDDLDNLLAQIGDQYADLFLAAKNLSDAILLSDILRVNTEITKAPLSASMIKRYDEHHQDLTLLKALVRQQLPEKYKEIFFDQSKNGYAGYIDGGASQEEFYKFIKPILEKMDGTEELLVKLNREDLLRKQRTFDNGSIPHQIHLGELHAILRRQEDFYPFLKDNREKIEKILTFRIPYYVGPLARGNSRFAWMTRKSEETITPWNFEEVVDKGASAQSFIERMTNFDKNLPNEKVLPKHSLLYEYFTVYNELTKVKYVTEGMRKPAFLSGEQKKAIVDLLFKTNRKVTVKQLKEDYFKKIECFDSVEISGVEDRFNASLGTYHDLLKIIKDKDFLDNEENEDILEDIVLTLTLFEDREMIEERLKTYAHLFDDKVMKQLKRRRYTGWGRLSRKLINGIRDKQSGKTILDFLKSDGFANRNFMQLIHDDSLTFKEDIQKAQVSGQGDSLHEHIANLAGSPAIKKGILQTVKVVDELVKVMGRHKPENIVIEMARENQTTQKGQKNSRERMKRIEEGIKELGSQILKEHPVENTQLQNEKLYLYYLQNGRDMYVDQELDINRLSDYDVDHIVPQSFLKDDSIDNKVLTRSDKARGKSDNVPSEEVVKKMKNYWRQLLNAKLITQRKFDNLTKAERGGLSELDKAGFIKRQLVETRQITKHVAQILDSRMNTKYDENDKLIREVKVITLKSKLVSDFRKDFQFYKVREINNYHHAHDAYLNAVVGTALIKKYPKLESEFVYGDYKVYDVRKMIAKSEQEIGKATAKYFFYSNIMNFFKTEITLANGEIRKRPLIETNGETGEIVWDKGRDFATVRKVLSMPQVNIVKKTEVQTGGFSKESILPKRNSDKLIARKKDWDPKKYGGFDSPTVAYSVLVVAKVEKGKSKKLKSVKELLGITIMERSSFEKNPIDFLEAKGYKEVKKDLIIKLPKYSLFELENGRKRMLASAGELQKGNELALPSKYVNFLYLASHYEKLKGSPEDNEQKQLFVEQHKHYLDEIIEQISEFSKRVILADANLDKVLSAYNKHRDKPIREQAENIIHLFTLTNLGAPAAFKYFDTTIDRKRYTSTKEVLDATLIHQSITGLYETRIDLSQLGGDGGPAPAPAPAPGGTLQLDDEYRLYSPLVKPDQNIQFWLEQFPQAWAETAGMGLAKQVPPQVIQLKASATPVSVRQYPLSKEAQEGIRPHVQRLIQQGILVPVQSPWNTPLLPVRKPGTNDYRPVQDLREVNKRVQDIHPTVPNPYNLLCALPPQRSWYTVLDLKDAFFCLRLHPTSQPLFAFEWRDPGTGRTGQLTWTRLPQGFKNSPTIFDEALHRDLANFRIQHPQVTLLQYVDDLLLAGATKQDCLEGTKALLLELSDLGYRASAKKAQICRREVTYLGYSLRDGQRWLTEARKKTVVQIPAPTTAKQVREFLGTAGFCRLWIPGFATLAAPLYPLTKEKGEFSWAPEHQKAFDAIKKALLSAPALALPDVTKPFTLYVDERKGVARGVLTQTLGPWRRPVAYLSKKLDPVASGWPVCLKAIAAVAILVKDADKLTLGQNITVIAPHALENIVRQPPDRWMTNARMTHYQSLLLTERVTFAPPAALNPATLLPEETDEPVTHDCHQLLIEETGVRKDLTDIPLTGEVLTWFTDGSSYVVEGKRMAGAAVVDGTRTIWASSLPEGTSAQKAELMALTQALRLAEGKSINIYTDSRYAFATAHVHGAIYKQRGLLTSAGREIKNKEEILSLLEALHLPKRLAIIHCPGHQKAKDPISRGNQMADRVAKQAAQGVNLLAGKRTADGSEFEKRTADGSEFESPKKKAKVE

SEQ ID NO: 6527 - protein, 2086 aa, synthetic construct; identical to SEQ ID NO: 6525

SEQ ID NO: 6528 - protein, 2088 aa, synthetic construct; identical to SEQ ID NO: 6526

SEQ ID NO: 6529 - protein, 2085 aa, synthetic construct
MPAAKRVKLDGGDKKYSIGLDIGTNSVGWAVITDEYKVPSKKFKVLGNTDRHSIKKNLIGALLFDSGETAEATRLKRTARRRYTRRKNRICYLQEIFSNEMAKVDDSFFHRLEESFLVEEDKKHERHPIFGNIVDEVAYHEKYPTIYHLRKKLVDSTDKADLRLIYLALAHMIKFRGHFLIEGDLNPDNSDVDKLFIQLVQTYNQLFEENPINASGVDAKAILSARLSKSRRLENLIAQLPGEKKNGLFGNLIALSLGLTPNFKSNFDLAEDAKLQLSKDTYDDDLDNLLAQIGDQYADLFLAAKNLSDAILLSDILRVNTEITKAPLSASMIKRYDEHHQDLTLLKALVRQQLPEKYKEIFFDQSKNGYAGYIDGGASQEEFYKFIKPILEKMDGTEELLVKLNREDLLRKQRTFDNGSIPHQIHLGELHAILRRQEDFYPFLKDNREKIEKILTFRIPYYVGPLARGNSRFAWMTRKSEETITPWNFEEVVDKGASAQSFIERMTNFDKNLPNEKVLPKHSLLYEYFTVYNELTKVKYVTEGMRKPAFLSGEQKKAIVDLLFKTNRKVTVKQLKEDYFKKIECFDSVEISGVEDRFNASLGTYHDLLKIIKDKDFLDNEENEDILEDIVLTLTLFEDREMIEERLKTYAHLFDDKVMKQLKRRRYTGWGRLSRKLINGIRDKQSGKTILDFLKSDGFANRNFMQLIHDDSLTFKEDIQKAQVSGQGDSLHEHIANLAGSPAIKKGILQTVKVVDELVKVMGRHKPENIVIEMARENQTTQKGQKNSRERMKRIEEGIKELGSQILKEHPVENTQLQNEKLYLYYLQNGRDMYVDQELDINRLSDYDVDHIVPQSFLKDDSIDNKVLTRSDKARGKSDNVPSEEVVKKMKNYWRQLLNAKLITQRKFDNLTKAERGGLSELDKAGFIKRQLVETRQITKHVAQILDSRMNTKYDENDKLIREVKVITLKSKLVSDFRKDFQFYKVREINNYHHAHDAYLNAVVGTALIKKYPKLESEFVYGDYKVYDVRKMIAKSEQEIGKATAKYFFYSNIMNFFKTEITLANGEIRKRPLIETNGETGEIVWDKGRDFATVRKVLSMPQVNIVKKTEVQTGGFSKESILPKRNSDKLIARKKDWDPKKYGGFDSPTVAYSVLVVAKVEKGKSKKLKSVKELLGITIMERSSFEKNPIDFLEAKGYKEVKKDLIIKLPKYSLFELENGRKRMLASAGELQKGNELALPSKYVNFLYLASHYEKLKGSPEDNEQKQLFVEQHKHYLDEIIEQISEFSKRVILADANLDKVLSAYNKHRDKPIREQAENIIHLFTLTNLGAPAAFKYFDTTIDRKRYTSTKEVLDATLIHQSITGLYETRIDLSQLGGDGGPAPAPAPAPGGIPWLMKKPLQLTTLVPLQEYEERLLKQTMLTGSYKEKLQSLFLKYDALWQHWENQVGHRRIKPHHIATGTVNPRPQKQYPINPKAKASIQTVINDLLKQGVLIQQNSIMNTPVYPVPKPDGKWRMVLDYREVNKTIPLIAAQNQHSAGILSSIFRGKYKTTLDLSNGFWAHSITPESYWLTAFTWLGQQYCWTRLPQGFLNSPALFNADVVDLLKEVPNVQVYVDDIYISHDDPREHLEQLEKVFSLLLNAGYVVSLKKSEIAQHEVEFLGFNITKEGRGLTETFKQKLLNITPPRDLKQLQSILGKLNFARNFIPNFSELVKPLYNIIATAPGKYITWTTDNSQQLQNIISMLNSAENLEERNPEVRLIMKVNTSPSAGYIRFYNEFAKRPIMYLNYVYTKAEVKFTNTEKLLTTIHKGLIKALDLGMGQEILVYSPIVSMTKIQKTPLPERKALPIRWITWMSYLEDPRIQFHYDKTLPELQQVPTVTDDIIAKIKHPSEFSMVFYTDGSAIKHPNVNKSHNAGMGIAQVQFKPEFTVINTWSIPLGDHTAQLAEVAAVEFACKKALKIDGPVLIVTDSFYVAESVNKELPYWQSNGFFNNKKKPLKHVSKWKSIADCIQLKPDIIIIHEKGHQPTASTFHTEGNNLADKLATQGSYVVNAGKRTADGSEFEKRTADGSEFESPKKKAKVE

SEQ ID NO: 6530 - protein, 2098 aa, synthetic construct
MPAAKRVKLDGGDKKYSIGLDIGTNSVGWAVITDEYKVPSKKFKVLGNTDRHSIKKNLIGALLFDSGETAEATRLKRTARRRYTRRKNRICYLQEIFSNEMAKVDDSFFHRLEESFLVEEDKKHERHPIFGNIVDEVAYHEKYPTIYHLRKKLVDSTDKADLRLIYLALAHMIKFRGHFLIEGDLNPDNSDVDKLFIQLVQTYNQLFEENPINASGVDAKAILSARLSKSRRLENLIAQLPGEKKNGLFGNLIALSLGLTPNFKSNFDLAEDAKLQLSKDTYDDDLDNLLAQIGDQYADLFLAAKNLSDAILLSDILRVNTEITKAPLSASMIKRYDEHHQDLTLLKALVRQQLPEKYKEIFFDQSKNGYAGYIDGGASQEEFYKFIKPILEKMDGTEELLVKLNREDLLRKQRTFDNGSIPHQIHLGELHAILRRQEDFYPFLKDNREKIEKILTFRIPYYVGPLARGNSRFAWMTRKSEETITPWNFEEVVDKGASAQSFIERMTNFDKNLPNEKVLPKHSLLYEYFTVYNELTKVKYVTEGMRKPAFLSGEQKKAIVDLLFKTNRKVTVKQLKEDYFKKIECFDSVEISGVEDRFNASLGTYHDLLKIIKDKDFLDNEENEDILEDIVLTLTLFEDREMIEERLKTYAHLFDDKVMKQLKRRRYTGWGRLSRKLINGIRDKQSGKTILDFLKSDGFANRNFMQLIHDDSLTFKEDIQKAQVSGQGDSLHEHIANLAGSPAIKKGILQTVKVVDELVKVMGRHKPENIVIEMARENQTTQKGQKNSRERMKRIEEGIKELGSQILKEHPVENTQLQNEKLYLYYLQNGRDMYVDQELDINRLSDYDVDHIVPQSFLKDDSIDNKVLTRSDKARGKSDNVPSEEVVKKMKNYWRQLLNAKLITQRKFDNLTKAERGGLSELDKAGFIKRQLVETRQITKHVAQILDSRMNTKYDENDKLIREVKVITLKSKLVSDFRKDFQFYKVREINNYHHAHDAYLNAVVGTALIKKYPKLESEFVYGDYKVYDVRKMIAKSEQEIGKATAKYFFYSNIMNFFKTEITLANGEIRKRPLIETNGETGEIVWDKGRDFATVRKVLSMPQVNIVKKTEVQTGGFSKESILPKRNSDKLIARKKDWDPKKYGGFDSPTVAYSVLVVAKVEKGKSKKLKSVKELLGITIMERSSFEKNPIDFLEAKGYKEVKKDLIIKLPKYSLFELENGRKRMLASAGELQKGNELALPSKYVNFLYLASHYEKLKGSPEDNEQKQLFVEQHKHYLDEIIEQISEFSKRVILADANLDKVLSAYNKHRDKPIREQAENIIHLFTLTNLGAPAAFKYFDTTIDRKRYTSTKEVLDATLIHQSITGLYETRIDLSQLGGDGGPAPAPAPAPAPGGTAPLEEEYRLFLEAPIQNVTLLEQWKREIPKVWAEINPPGLASTQAPIHVQLLSTALPVRVRQYPITLEAKRSLRETIRKFRAAGILRPVHSPWNTPLLPVRKSGTSEYRMVQDLREVNKRVETIHPTVPNPYTLLSLLPPDRIWYSVLDLKDAFFCIPLAPESQLIFAFEWADAEEGESGQLTWTRLPQGFKNSPTLFNEALNRDLQGFRLDHPSVSLLQYVDDLLIAADTQAACLSATRDLLMTLAELGYRVSGKKAQLCQEEVTYLGFKIHKGSRSLSNSRTQAILQIPVPKTKRQVREFLGTIGYCRLWIPGFAELAQPLYAATRPGNDPLVWGEKEEEAFQSLKLALTQPPALALPSLDKPFQLFVEETSGAAKGVLTQALGPWKRPVAYLSKRLDPVAAGWPRCLRAIAAAALLTREASKLTFGQDIEITSSHNLESLLRSPPDKWLTNARITQYQVLLLDPPRVRFKQTAALNPATLLPETDDTLPIHHCLDTLDSLTSTRPDLTDQPLAQAEATLFTDGSSYIRDGKRYAGAAVVTLDSVIWAEPLPIGTSAQKAELIALTKALEWSKDKSVNIYTDSRYAFATLHVHGMIYRERGWLTAGGKAIKNAPEILALLTAVWLPKRVAVMHCKGHQKDDAPTSTGNRRADEVAREVAIRPLSTQATISAGKRTADGSEFEKRTADGSEFESPKKKAKVE

SEQ ID NO: 6531 - protein, 2098 aa, synthetic construct
MPAAKRVKLDGGDKKYSIGLDIGTNSVGWAVITDEYKVPSKKFKVLGNTDRHSIKKNLIGALLFDSGETAEATRLKRTARRRYTRRKNRICYLQEIFSNEMAKVDDSFFHRLEESFLVEEDKKHERHPIFGNIVDEVAYHEKYPTIYHLRKKLVDSTDKADLRLIYLALAHMIKFRGHFLIEGDLNPDNSDVDKLFIQLVQTYNQLFEENPINASGVDAKAILSARLSKSRRLENLIAQLPGEKKNGLFGNLIALSLGLTPNFKSNFDLAEDAKLQLSKDTYDDDLDNLLAQIGDQYADLFLAAKNLSDAILLSDILRVNTEITKAPLSASMIKRYDEHHQDLTLLKALVRQQLPEKYKEIFFDQSKNGYAGYIDGGASQEEFYKFIKPILEKMDGTEELLVKLNREDLLRKQRTFDNGSIPHQIHLGELHAILRRQEDFYPFLKDNREKIEKILTFRIPYYVGPLARGNSRFAWMTRKSEETITPWNFEEVVDKGASAQSFIERMTNFDKNLPNEKVLPKHSLLYEYFTVYNELTKVKYVTEGMRKPAFLSGEQKKAIVDLLFKTNRKVTVKQLKEDYFKKIECFDSVEISGVEDRFNASLGTYHDLLKIIKDKDFLDNEENEDILEDIVLTLTLFEDREMIEERLKTYAHLFDDKVMKQLKRRRYTGWGRLSRKLINGIRDKQSGKTILDFLKSDGFANRNFMQLIHDDSLTFKEDIQKAQVSGQGDSLHEHIANLAGSPAIKKGILQTVKVVDELVKVMGRHKPENIVIEMARENQTTQKGQKNSRERMKRIEEGIKELGSQILKEHPVENTQLQNEKLYLYYLQNGRDMYVDQELDINRLSDYDVDHIVPQSFLKDDSIDNKVLTRSDKARGKSDNVPSEEVVKKMKNYWRQLLNAKLITQRKFDNLTKAERGGLSELDKAGFIKRQLVETRQITKHVAQILDSRMNTKYDENDKLIREVKVITLKSKLVSDFRKDFQFYKVREINNYHHAHDAYLNAVVGTALIKKYPKLESEFVYGDYKVYDVRKMIAKSEQEIGKATAKYFFYSNIMNFFKTEITLANGEIRKRPLIETNGETGEIVWDKGRDFATVRKVLSMPQVNIVKKTEVQTGGFSKESILPKRNSDKLIARKKDWDPKKYGGFDSPTVAYSVLVVAKVEKGKSKKLKSVKELLGITIMERSSFEKNPIDFLEAKGYKEVKKDLIIKLPKYSLFELENGRKRMLASAGELQKGNELALPSKYVNFLYLASHYEKLKGSPEDNEQKQLFVEQHKHYLDEIIEQISEFSKRVILADANLDKVLSAYNKHRDKPIREQAENIIHLFTLTNLGAPAAFKYFDTTIDRKRYTSTKEVLDATLIHQSITGLYETRIDLSQLGGDGGPAPAPAPAPAPGGTAPLEEEYRLFLEAPIQNVTLLEQWKREIPKVWAEINPPGLASTQAPIHVQLLSTALPVRVRQYPITLEAKRSLRETIRKFRAAGILRPVHSPWNTPLLPVRKSGTSEYRMVQDLREVNKRVETIHPTVPNPYTLLSLLPPDRIWYSVLDLKDAFFCIPLAPESQLIFAFEWADAEEGESGQLTWTRLPQGFKNSPTLFNEALNRDLQGFRLDHPSVSLLQYVDDLLIAADTQAACLSATRDLLMTLAELGYRVSGKKAQLCQEEVTYLGFKIHKGSRSLSNSRTQAILQIPVPKTKRQVREFLGKIGYCRLFIPGFAELAQPLYAATRPGNDPLVWGEKEEEAFQSLKLALTQPPALALPSLDKPFQLFVEETSGAAKGVLTQALGPWKRPVAYLSKRLDPVAAGWPRCLRAIAAAALLTREASKLTFGQDIEITSSHNLESLLRSPPDKWLTNARITQYQVLLLDPPRVRFKQTAALNPATLLPETDDTLPIHHCLDTLDSLTSTRPDLTDQPLAQAEATLFTDGSSYIRDGKRYAGAAVVTLDSVIWAEPLPIGTSAQKAELIALTKALEWSKDKSVNIYTDSRYAFATLHVHGMIYRERGWLTAGGKAIKNAPEILALLTAVWLPKRVAVMHCKGHQKDDAPTSTGNRRADEVAREVAIRPLSTQATISAGKRTADGSEFEKRTADGSEFESPKKKAKVE

SEQ ID NO: 6532 - protein, 2102 aa, synthetic construct
MPAAKRVKLDGGDKKYSIGLDIGTNSVGWAVITDEYKVPSKKFKVLGNTDRHSIKKNLIGALLFDSGETAEATRLKRTARRRYTRRKNRICYLQEIFSNEMAKVDDSFFHRLEESFLVEEDKKHERHPIFGNIVDEVAYHEKYPTIYHLRKKLVDSTDKADLRLIYLALAHMIKFRGHFLIEGDLNPDNSDVDKLFIQLVQTYNQLFEENPINASGVDAKAILSARLSKSRRLENLIAQLPGEKKNGLFGNLIALSLGLTPNFKSNFDLAEDAKLQLSKDTYDDDLDNLLAQIGDQYADLFLAAKNLSDAILLSDILRVNTEITKAPLSASMIKRYDEHHQDLTLLKALVRQQLPEKYKEIFFDQSKNGYAGYIDGGASQEEFYKFIKPILEKMDGTEELLVKLNREDLLRKQRTFDNGSIPHQIHLGELHAILRRQEDFYPFLKDNREKIEKILTFRIPYYVGPLARGNSRFAWMTRKSEETITPWNFEEVVDKGASAQSFIERMTNFDKNLPNEKVLPKHSLLYEYFTVYNELTKVKYVTEGMRKPAFLSGEQKKAIVDLLFKTNRKVTVKQLKEDYFKKIECFDSVEISGVEDRFNASLGTYHDLLKIIKDKDFLDNEENEDILEDIVLTLTLFEDREMIEERLKTYAHLFDDKVMKQLKRRRYTGWGRLSRKLINGIRDKQSGKTILDFLKSDGFANRNFMQLIHDDSLTFKEDIQKAQVSGQGDSLHEHIANLAGSPAIKKGILQTVKVVDELVKVMGRHKPENIVIEMARENQTTQKGQKNSRERMKRIEEGIKELGSQILKEHPVENTQLQNEKLYLYYLQNGRDMYVDQELDINRLSDYDVDHIVPQSFLKDDSIDNKVLTRSDKARGKSDNVPSEEVVKKMKNYWRQLLNAKLITQRKFDNLTKAERGGLSELDKAGFIKRQLVETRQITKHVAQILDSRMNTKYDENDKLIREVKVITLKSKLVSDFRKDFQFYKVREINNYHHAHDAYLNAVVGTALIKKYPKLESEFVYGDYKVYDVRKMIAKSEQEIGKATAKYFFYSNIMNFFKTEITLANGEIRKRPLIETNGETGEIVWDKGRDFATVRKVLSMPQVNIVKKTEVQTGGFSKESILPKRNSDKLIARKKDWDPKKYGGFDSPTVAYSVLVVAKVEKGKSKKLKSVKELLGITIMERSSFEKNPIDFLEAKGYKEVKKDLIIKLPKYSLFELENGRKRMLASAGELQKGNELALPSKYVNFLYLASHYEKLKGSPEDNEQKQLFVEQHKHYLDEIIEQISEFSKRVILADANLDKVLSAYNKHRDKPIREQAENIIHLFTLTNLGAPAAFKYFDTTIDRKRYTSTKEVLDATLIHQSITGLYETRIDLSQLGGDGGPAPAPAPAPAPGGTVSLQDEHRLFDIPVTTSLPDVWLQDFPQAWAETGGLGRAKCQAPIIIDLKPTAVPVSIKQYPMSLEAHMGIRQHIIKFLELGVLRPCRSPWNTPLLPVKKPGTQDYRPVQDLREINKRTVDIHPTVPNPYNLLSTLKPDYSWYTVLDLKDAFFCLPLAPQSQELFAFEWKDPERGISGQLTWTRLPQGFKNSPTLFNEALHRDLTDFRTQHPEVTLLQYVDDLLLAAPTKKACTQGTRHLLQELGEKGYRASAKKAQICQTKVTYLGYILSEGKRWLTPGRIETVARIPPPRNPREVREFLGTAGFCRLWIPGFAELAAPLYALTKPSTPFTWQTEHQLAFEALKKALLSAPALGLPDTSKPFTLFLDERQGIAKGVLTQKLGPWKRPVAYLSKKLDPVAAGWPPCLRIMAATAMLVKDSAKLTLGQPLTVITPHTLEAIVRQPPDRWITNARLTHYQALLLDTDRVQFGPPVTLNPATLLPVPENQPSPHDCRQVLAETHGTREDLKDQELPDADHTWYTDGSSYLDSGTRRAGAAVVDGHNTIWAQSLPPGTSAQKAELIALTKALELSKGKKANIYTDSRYAFATAHTHGSIYERRGWLTSEGKEIKNKAEIIALLKALFLPQEVAIIHCPGHQKGQDPVAVGNRQADRVARQAAMAEVLTLATEPDNTSHITAGKRTADGSEFEKRTADGSEFESPKKKAKVE

SEQ ID NO: 6533 - protein, 2173 aa, synthetic construct
MPAAKRVKLDGGDKKYSIGLDIGTNSVGWAVITDEYKVPSKKFKVLGNTDRHSIKKNLIGALLFDSGETAEATRLKRTARRRYTRRKNRICYLQEIFSNEMAKVDDSFFHRLEESFLVEEDKKHERHPIFGNIVDEVAYHEKYPTIYHLRKKLVDSTDKADLRLIYLALAHMIKFRGHFLIEGDLNPDNSDVDKLFIQLVQTYNQLFEENPINASGVDAKAILSARLSKSRRLENLIAQLPGEKKNGLFGNLIALSLGLTPNFKSNFDLAEDAKLQLSKDTYDDDLDNLLAQIGDQYADLFLAAKNLSDAILLSDILRVNTEITKAPLSASMIKRYDEHHQDLTLLKALVRQQLPEKYKEIFFDQSKNGYAGYIDGGASQEEFYKFIKPILEKMDGTEELLVKLNREDLLRKQRTFDNGSIPHQIHLGELHAILRRQEDFYPFLKDNREKIEKILTFRIPYYVGPLARGNSRFAWMTRKSEETITPWNFEEVVDKGASAQSFIERMTNFDKNLPNEKVLPKHSLLYEYFTVYNELTKVKYVTEGMRKPAFLSGEQKKAIVDLLFKTNRKVTVKQLKEDYFKKIECFDSVEISGVEDRFNASLGTYHDLLKIIKDKDFLDNEENEDILEDIVLTLTLFEDREMIEERLKTYAHLFDDKVMKQLKRRRYTGWGRLSRKLINGIRDKQSGKTILDFLKSDGFANRNFMQLIHDDSLTFKEDIQKAQVSGQGDSLHEHIANLAGSPAIKKGILQTVKVVDELVKVMGRHKPENIVIEMARENQTTQKGQKNSRERMKRIEEGIKELGSQILKEHPVENTQLQNEKLYLYYLQNGRDMYVDQELDINRLSDYDVDHIVPQSFLKDDSIDNKVLTRSDKARGKSDNVPSEEVVKKMKNYWRQLLNAKLITQRKFDNLTKAERGGLSELDKAGFIKRQLVETRQITKHVAQILDSRMNTKYDENDKLIREVKVITLKSKLVSDFRKDFQFYKVREINNYHHAHDAYLNAVVGTALIKKYPKLESEFVYGDYKVYDVRKMIAKSEQEIGKATAKYFFYSNIMNFFKTEITLANGEIRKRPLIETNGETGEIVWDKGRDFATVRKVLSMPQVNIVKKTEVQTGGFSKESILPKRNSDKLIARKKDWDPKKYGGFDSPTVAYSVLVVAKVEKGKSKKLKSVKELLGITIMERSSFEKNPIDFLEAKGYKEVKKDLIIKLPKYSLFELENGRKRMLASAGELQKGNELALPSKYVNFLYLASHYEKLKGSPEDNEQKQLFVEQHKHYLDEIIEQISEFSKRVILADANLDKVLSAYNKHRDKPIREQAENIIHLFTLTNLGAPAAFKYFDTTIDRKRYTSTKEVLDATLIHQSITGLYETRIDLSQLGGDGGPAPAPAPAPAPGGMDLLKPLTVERKGVKIKGYWNSQADITCVPKDLLQGEEPVRQQNVTTIHGTQEGDVYYVNLKIDGRRINTEVIGTTLDYAIITPGDVPWILKKPLELTIKLDLEEQQGTLLNNSILSKKGKEELKQLFEKYSALWQSWENQVGHRRIRPHKIATGTVKPTPQKQYHINPKAKPDIQIVINDLLKQGVLIQKESTMNTPVYPVPKPNGRWRMVLDYRAVNKVTPLIAVQNQHSYGILGSLFKGRYKTTIDLSNGFWAHPIVPEDYWITAFTWQGKQYCWTVLPQGFLNSPGLFTGDVVDLLQGIPNVEVYVDDVYISHDSEKEHLEYLDILFNRLKEAGYIISLKKSNIANSIVDFLGFQITNEGRGLTDTFKEKLENITAPTTLKQLQSILGLLNFARNFIPDFTELIAPLYALIPKSTKNYVPWQIEHSTTLETLITKLNGAEYLQGRKGDKTLIMKVNASYTTGYIRYYNEGEKKPISYVSIVFSKTELKFTELEKLLTTVHKGLLKALDLSMGQNIHVYSPIVSMQNIQKTPQTAKKALASRWLSWLSYLEDPRIRFFYDPQMPALKDLPAVDTGKDNKKHPSNFQHIFYTDGSAITSPTKEGHLNAGMGIVYFINKDGNLQKQQEWSISLGNHTAQFAEIAAFEFALKKCLPLGGNILVVTDSNYVAKAYNEELDVWASNGFVNNRKKPLKHISKWKSVADLKRLRPDVVVTHEPGHQKLDSSPHAYGNNLADQLATQASFKVHAGKRTADGSEFEKRTADGSEFESPKKKAKVE

SEQ ID NO: 6534 - protein, 2173 aa, synthetic construct
MPAAKRVKLDGGDKKYSIGLDIGTNSVGWAVITDEYKVPSKKFKVLGNTDRHSIKKNLIGALLFDSGETAEATRLKRTARRRYTRRKNRICYLQEIFSNEMAKVDDSFFHRLEESFLVEEDKKHERHPIFGNIVDEVAYHEKYPTIYHLRKKLVDSTDKADLRLIYLALAHMIKFRGHFLIEGDLNPDNSDVDKLFIQLVQTYNQLFEENPINASGVDAKAILSARLSKSRRLENLIAQLPGEKKNGLFGNLIALSLGLTPNFKSNFDLAEDAKLQLSKDTYDDDLDNLLAQIGDQYADLFLAAKNLSDAILLSDILRVNTEITKAPLSASMIKRYDEHHQDLTLLKALVRQQLPEKYKEIFFDQSKNGYAGYIDGGASQEEFYKFIKPILEKMDGTEELLVKLNREDLLRKQRTFDNGSIPHQIHLGELHAILRRQEDFYPFLKDNREKIEKILTFRIPYYVGPLARGNSRFAWMTRKSEETITPWNFEEVVDKGASAQSFIERMTNFDKNLPNEKVLPKHSLLYEYFTVYNELTKVKYVTEGMRKPAFLSGEQKKAIVDLLFKTNRKVTVKQLKEDYFKKIECFDSVEISGVEDRFNASLGTYHDLLKIIKDKDFLDNEENEDILEDIVLTLTLFEDREMIEERLKTYAHLFDDKVMKQLKRRRYTGWGRLSRKLINGIRDKQSGKTILDFLKSDGFANRNFMQLIHDDSLTFKEDIQKAQVSGQGDSLHEHIANLAGSPAIKKGILQTVKVVDELVKVMGRHKPENIVIEMARENQTTQKGQKNSRERMKRIEEGIKELGSQILKEHPVENTQLQNEKLYLYYLQNGRDMYVDQELDINRLSDYDVDHIVPQSFLKDDSIDNKVLTRSDKARGKSDNVPSEEVVKKMKNYWRQLLNAKLITQRKFDNLTKAERGGLSELDKAGFIKRQLVETRQITKHVAQILDSRMNTKYDENDKLIREVKVITLKSKLVSDFRKDFQFYKVREINNYHHAHDAYLNAVVGTALIKKYPKLESEFVYGDYKVYDVRKMIAKSEQEIGKATAKYFFYSNIMNFFKTEITLANGEIRKRPLIETNGETGEIVWDKGRDFATVRKVLSMPQVNIVKKTEVQTGGFSKESILPKRNSDKLIARKKDWDPKKYGGFDSPTVAYSVLVVAKVEKGKSKKLKSVKELLGITIMERSSFEKNPIDFLEAKGYKEVKKDLIIKLPKYSLFELENGRKRMLASAGELQKGNELALPSKYVNFLYLASHYEKLKGSPEDNEQKQLFVEQHKHYLDEIIEQISEFSKRVILADANLDKVLSAYNKHRDKPIREQAENIIHLFTLTNLGAPAAFKYFDTTIDRKRYTSTKEVLDATLIHQSITGLYETRIDLSQLGGDGGPAPAPAPAPAPGGMDLLKPLTVERKGVKIKGYWNSQADITCVPKDLLQGEEPVRQQNVTTIHGTQEGDVYYVNLKIDGRRINTEVIGTTLDYAIITPGDVPWILKKPLELTIKLDLEEQQGTLLNNSILSKKGKEELKQLFEKYSALWQSWENQVGHRRIRPHKIATGTVKPTPQKQYHINPKAKPDIQIVINDLLKQGVLIQKESTMNTPVYPVPKPNGRWRMVLDYRAVNKVTPLIAVQNQHSYGILGSLFKGRYKTTIDLSNGFWAHPIVPEDYWITAFTWQGKQYCWTVLPQGFLNSPGLFNGDVVDLLQGIPNVEVYVDDVYISHDSEKEHLEYLDILFNRLKEAGYIISLKKSNIANSIVDFLGFQITNEGRGLTDTFKEKLENITAPTTLKQLQSILGLLNFARNFIPDFTELIAPLYALIPKSPKNYVPWQIEHSTTLETLITKLNGAEYLQGRKGDKTLIMKVNASYTTGYIRYYNEGEKKPISYVSIVFSKTELKFTELEKLLTTVHKGLLKALDLSMGQNIHVYSPIVSMQNIQKTPQTAKKALASRWLSWLSYLEDPRIRFFYDPQMPALKDLPAVDTGKDNKKHPSNFQHIFYTDGSAITSPTKEGHLNAGMGIVYFINKDGNLQKQQEWSISLGNHTAQFAEIAAFEFALKKCLPLGGNILVVTDSNYVAKAYNEELDVWASNGFVNNRKKPLKHISKWKSVADLKRLRPDVVVTHEPGHQKLDSSPHAYGNNLADQLATQASFKVHAGKRTADGSEFEKRTADGSEFESPKKKAKVE

SEQ ID NO: 6535 - protein, 2095 aa, synthetic construct
MPAAKRVKLDGGDKKYSIGLDIGTNSVGWAVITDEYKVPSKKFKVLGNTDRHSIKKNLIGALLFDSGETAEATRLKRTARRRYTRRKNRICYLQEIFSNEMAKVDDSFFHRLEESFLVEEDKKHERHPIFGNIVDEVAYHEKYPTIYHLRKKLVDSTDKADLRLIYLALAHMIKFRGHFLIEGDLNPDNSDVDKLFIQLVQTYNQLFEENPINASGVDAKAILSARLSKSRRLENLIAQLPGEKKNGLFGNLIALSLGLTPNFKSNFDLAEDAKLQLSKDTYDDDLDNLLAQIGDQYADLFLAAKNLSDAILLSDILRVNTEITKAPLSASMIKRYDEHHQDLTLLKALVRQQLPEKYKEIFFDQSKNGYAGYIDGGASQEEFYKFIKPILEKMDGTEELLVKLNREDLLRKQRTFDNGSIPHQIHLGELHAILRRQEDFYPFLKDNREKIEKILTFRIPYYVGPLARGNSRFAWMTRKSEETITPWNFEEVVDKGASAQSFIERMTNFDKNLPNEKVLPKHSLLYEYFTVYNELTKVKYVTEGMRKPAFLSGEQKKAIVDLLFKTNRKVTVKQLKEDYFKKIECFDSVEISGVEDRFNASLGTYHDLLKIIKDKDFLDNEENEDILEDIVLTLTLFEDREMIEERLKTYAHLFDDKVMKQLKRRRYTGWGRLSRKLINGIRDKQSGKTILDFLKSDGFANRNFMQLIHDDSLTFKEDIQKAQVSGQGDSLHEHIANLAGSPAIKKGILQTVKVVDELVKVMGRHKPENIVIEMARENQTTQKGQKNSRERMKRIEEGIKELGSQILKEHPVENTQLQNEKLYLYYLQNGRDMYVDQELDINRLSDYDVDHIVPQSFLKDDSIDNKVLTRSDKARGKSDNVPSEEVVKKMKNYWRQLLNAKLITQRKFDNLTKAERGGLSELDKAGFIKRQLVETRQITKHVAQILDSRMNTKYDENDKLIREVKVITLKSKLVSDFRKDFQFYKVREINNYHHAHDAYLNAVVGTALIKKYPKLESEFVYGDYKVYDVRKMIAKSEQEIGKATAKYFFYSNIMNFFKTEITLANGEIRKRPLIETNGETGEIVWDKGRDFATVRKVLSMPQVNIVKKTEVQTGGFSKESILPKRNSDKLIARKKDWDPKKYGGFDSPTVAYSVLVVAKVEKGKSKKLKSVKELLGITIMERSSFEKNPIDFLEAKGYKEVKKDLIIKLPKYSLFELENGRKRMLASAGELQKGNELALPSKYVNFLYLASHYEKLKGSPEDNEQKQLFVEQHKHYLDEIIEQISEFSKRVILADANLDKVLSAYNKHRDKPIREQAENIIHLFTLTNLGAPAAFKYFDTTIDRKRYTSTKEVLDATLIHQSITGLYETRIDLSQLGGDGGPAPAPAPAPAPGGTLQLEEEYRLFEPESTQKQEMDIWLKNFPQAWAETGGMGTAHCQAPVLIQLKATATPISIRQYPMPHEAYQGIKPHIRRMLDQGILKPCQSPWNTPLLPVKKPGTEDYRPVQDLREVNKRVEDIHPTVPNPYNLLSTLPPSHPWYTVLDLKDAFFCLRLHSESQLLFAFEWRDPEIGLSGQLTWTRLPQGFKNSPTLFDEALHSDLADFRVRYPALVLLQYVDDLLLAAATRTECLEGTKALLETLGNKGYRASAKKAQICLQEVTYLGYSLKDGQRWLTKARKEAILSIPVPKNSRQVREFLGTAGYCRLWIPGFAELAAPLYPLTRPGTLFQWGTEQQLAFEDIKKALLSSPALGLPDITKPFELFIDENSGFAKGVLVQKLGPWKRPVAYLSKKLDTVASGWPPCLRMVAAIAILVKDAGKLTLGQPLTILTSHPVEALVRQPPNKWLSNARMTHYQAMLLDAERVHFGPTVSLNPATLLPLPSGGNHHDCLQILAETHGTRPDLTDQPLPDADLTWYTDGSSFIRNGEREAGAAVTTESEVIWAAPLPPGTSAQRAELIALTQALKMAEGKKLTVYTDSRYAFATTHVHGEIYRRRGLLTSEGKEIKNKNEILALLEALFLPKRLSIIHCPGHQKGDSPQAKGNRLADDTAKKAATETHSSLTVLPAGKRTADGSEFEKRTADGSEFESPKKKAKVE

SEQ ID NO: 6536 - protein, 2176 aa, synthetic construct
MPAAKRVKLDGGDKKYSIGLDIGTNSVGWAVITDEYKVPSKKFKVLGNTDRHSIKKNLIGALLFDSGETAEATRLKRTARRRYTRRKNRICYLQEIFSNEMAKVDDSFFHRLEESFLVEEDKKHERHPIFGNIVDEVAYHEKYPTIYHLRKKLVDSTDKADLRLIYLALAHMIKFRGHFLIEGDLNPDNSDVDKLFIQLVQTYNQLFEENPINASGVDAKAILSARLSKSRRLENLIAQLPGEKKNGLFGNLIALSLGLTPNFKSNFDLAEDAKLQLSKDTYDDDLDNLLAQIGDQYADLFLAAKNLSDAILLSDILRVNTEITKAPLSASMIKRYDEHHQDLTLLKALVRQQLPEKYKEIFFDQSKNGYAGYIDGGASQEEFYKFIKPILEKMDGTEELLVKLNREDLLRKQRTFDNGSIPHQIHLGELHAILRRQEDFYPFLKDNREKIEKILTFRIPYYVGPLARGNSRFAWMTRKSEETITPWNFEEVVDKGASAQSFIERMTNFDKNLPNEKVLPKHSLLYEYFTVYNELTKVKYVTEGMRKPAFLSGEQKKAIVDLLFKTNRKVTVKQLKEDYFKKIECFDSVEISGVEDRFNASLGTYHDLLKIIKDKDFLDNEENEDILEDIVLTLTLFEDREMIEERLKTYAHLFDDKVMKQLKRRRYTGWGRLSRKLINGIRDKQSGKTILDFLKSDGFANRNFMQLIHDDSLTFKEDIQKAQVSGQGDSLHEHIANLAGSPAIKKGILQTVKVVDELVKVMGRHKPENIVIEMARENQTTQKGQKNSRERMKRIEEGIKELGSQILKEHPVENTQLQNEKLYLYYLQNGRDMYVDQELDINRLSDYDVDHIVPQSFLKDDSIDNKVLTRSDKARGKSDNVPSEEVVKKMKNYWRQLLNAKLITQRKFDNLTKAERGGLSELDKAGFIKRQLVETRQITKHVAQILDSRMNTKYDENDKLIREVKVITLKSKLVSDFRKDFQFYKVREINNYHHAHDAYLNAVVGTALIKKYPKLESEFVYGDYKVYDVRKMIAKSEQEIGKATAKYFFYSNIMNFFKTEITLANGEIRKRPLIETNGETGEIVWDKGRDFATVRKVLSMPQVNIVKKTEVQTGGFSKESILPKRNSDKLIARKKDWDPKKYGGFDSPTVAYSVLVVAKVEKGKSKKLKSVKELLGITIMERSSFEKNPIDFLEAKGYKEVKKDLIIKLPKYSLFELENGRKRMLASAGELQKGNELALPSKYVNFLYLASHYEKLKGSPEDNEQKQLFVEQHKHYLDEIIEQISEFSKRVILADANLDKVLSAYNKHRDKPIREQAENIIHLFTLTNLGAPAAFKYFDTTIDRKRYTSTKEVLDATLIHQSITGLYETRIDLSQLGGDGGPAPAPAPAPAPGGMNPLQLLQPLPAEIKGTKLLAHWNSGATITCIPESFLEDEQPIKKTLIKTIHGEKQQNVYYVTFKVKGRKVEAEVIASPYEYILLSPTDVPWLTQQPLQLTILVPLQEYQEKILSKTALPEDQKQQLKTLFVKYDNLWQHWENQVGHRKIRPHNIATGDYPPRPQKQYPINPKAKPSIQIVIDDLLKQGVLTPQNSTMNTPVYPVPKPDGRWRMVLDYREVNKTIPLTAAQNQHSAGILATIVRQKYKTTLDLANGFWAHPITPESYWLTAFTWQGKQYCWTRLPQGFLNSPALFNADVVDLLKEIPNVQVYVDDIYLSHDDPKEHVQQLEKVFQILLQAGYVVSLKKSEIGQKTVEFLGFNITKEGRGLTDTFKTKLLNITPPKDLKQLQSILGLLNFARNFIPNFAELVQPLYNLIAPAKGKYIEWSEENTKQLNMVIEALNTASNLEERLPEQRLVIKVNTSPSAGYVRYYNETGKKPIMYLNYVFSKAELKFSMLEKLLTTMHKALIKAMDLAMGQEILVYSPIVSMTKIQKTPLPERKALPIRWITWMTYLEDPRIQFHYDKTLPELKHIPDVYTSSQSPVKHPSQYEGVFYTDGSAIKSPDPTKSNNAGMGIVHATYKPEYQVLNQWSIPLGNHTAQMAEIAAVEFACKKALKIPGPVLVITDSFYVAESANKELPYWKSNGFVNNKKKPLKHISKWKSIAECLSMKPDITIQHEKGISLQIPVFILKGNALADKLATQGSYVVNAGKRTADGSEFEKRTADGSEFESPKKKAKVE

SEQ ID NO: 6537 - protein, 2009 aa, synthetic construct
MPAAKRVKLDGGDKKYSIGLDIGTNSVGWAVITDEYKVPSKKFKVLGNTDRHSIKKNLIGALLFDSGETAEATRLKRTARRRYTRRKNRICYLQEIFSNEMAKVDDSFFHRLEESFLVEEDKKHERHPIFGNIVDEVAYHEKYPTIYHLRKKLVDSTDKADLRLIYLALAHMIKFRGHFLIEGDLNPDNSDVDKLFIQLVQTYNQLFEENPINASGVDAKAILSARLSKSRRLENLIAQLPGEKKNGLFGNLIALSLGLTPNFKSNFDLAEDAKLQLSKDTYDDDLDNLLAQIGDQYADLFLAAKNLSDAILLSDILRVNTEITKAPLSASMIKRYDEHHQDLTLLKALVRQQLPEKYKEIFFDQSKNGYAGYIDGGASQEEFYKFIKPILEKMDGTEELLVKLNREDLLRKQRTFDNGSIPHQIHLGELHAILRRQEDFYPFLKDNREKIEKILTFRIPYYVGPLARGNSRFAWMTRKSEETITPWNFEEVVDKGASAQSFIERMTNFDKNLPNEKVLPKHSLLYEYFTVYNELTKVKYVTEGMRKPAFLSGEQKKAIVDLLFKTNRKVTVKQLKEDYFKKIECFDSVEISGVEDRFNASLGTYHDLLKIIKDKDFLDNEENEDILEDIVLTLTLFEDREMIEERLKTYAHLFDDKVMKQLKRRRYTGWGRLSRKLINGIRDKQSGKTILDFLKSDGFANRNFMQLIHDDSLTFKEDIQKAQVSGQGDSLHEHIANLAGSPAIKKGILQTVKVVDELVKVMGRHKPENIVIEMARENQTTQKGQKNSRERMKRIEEGIKELGSQILKEHPVENTQLQNEKLYLYYLQNGRDMYVDQELDINRLSDYDVDHIVPQSFLKDDSIDNKVLTRSDKARGKSDNVPSEEVVKKMKNYWRQLLNAKLITQRKFDNLTKAERGGLSELDKAGFIKRQLVETRQITKHVAQILDSRMNTKYDENDKLIREVKVITLKSKLVSDFRKDFQFYKVREINNYHHAHDAYLNAVVGTALIKKYPKLESEFVYGDYKVYDVRKMIAKSEQEIGKATAKYFFYSNIMNFFKTEITLANGEIRKRPLIETNGETGEIVWDKGRDFATVRKVLSMPQVNIVKKTEVQTGGFSKESILPKRNSDKLIARKKDWDPKKYGGFDSPTVAYSVLVVAKVEKGKSKKLKSVKELLGITIMERSSFEKNPIDFLEAKGYKEVKKDLIIKLPKYSLFELENGRKRMLASAGELQKGNELALPSKYVNFLYLASHYEKLKGSPEDNEQKQLFVEQHKHYLDEIIEQISEFSKRVILADANLDKVLSAYNKHRDKPIREQAENIIHLFTLTNLGAPAAFKYFDTTIDRKRYTSTKEVLDATLIHQSITGLYETRIDLSQLGGDGGPAPAPAPAPAPGGGLEHLPPPPEVSQFPLNPERLQALTDLVSRALEAKHIEPYQGPGNNPIFPVKKPNGKWRFIHDLRATNSVTRDLASPSPGPPDLTSLPQGLPHLRTIDLTDAFFQIPLPTIFQPYFAFTLPQPNNYGPGTRYSWRVLPQGFKNSPTLFQQQLSHILTPVRKTFPNSLIIQYMDDILLASPAPGELAALTDKVTNALTKEGLPLSPEKTQATPGPIHFLGQVISQDCITYETLPSINVKSTWSLAELQSMLGELQWVSKGTPVLRSSLHQLYLALRGHRDPRDTIKLTSIQVQALRTIQKALTLNCRSRLVNQLPILALIMLRPTGTTAVLFQTKQKWPLVWLHTPHPATSLRPWGQLLANAVIILDKYSLQHYGQVCKSFHHNISNQALTYYLHTSDQSSVAILLQHSHRFHNLGAQPSGPWRSLLQMPQIFQNIDVLRPPFTISPVVINHAPCLFSDGSASKAAFIIWDRQVIHQQVLSLPSTCSAQAGELFGLLAGLQKSQPWVALNIFLDSKFLIGHLRRMAWGAFPGPSTQCELHTQLLPLLQGKTVYVHHVRSHTLLQDPISRLNEATDALMLAPLLPLAGKRTADGSEFEKRTADGSEFESPKKKAKVE

SEQ ID NO: 6538 - protein, 2127 aa, synthetic construct
MPAAKRVKLDGGDKKYSIGLDIGTNSVGWAVITDEYKVPSKKFKVLGNTDRHSIKKNLIGALLFDSGETAEATRLKRTARRRYTRRKNRICYLQEIFSNEMAKVDDSFFHRLEESFLVEEDKKHERHPIFGNIVDEVAYHEKYPTIYHLRKKLVDSTDKADLRLIYLALAHMIKFRGHFLIEGDLNPDNSDVDKLFIQLVQTYNQLFEENPINASGVDAKAILSARLSKSRRLENLIAQLPGEKKNGLFGNLIALSLGLTPNFKSNFDLAEDAKLQLSKDTYDDDLDNLLAQIGDQYADLFLAAKNLSDAILLSDILRVNTEITKAPLSASMIKRYDEHHQDLTLLKALVRQQLPEKYKEIFFDQSKNGYAGYIDGGASQEEFYKFIKPILEKMDGTEELLVKLNREDLLRKQRTFDNGSIPHQIHLGELHAILRRQEDFYPFLKDNREKIEKILTFRIPYYVGPLARGNSRFAWMTRKSEETITPWNFEEVVDKGASAQSFIERMTNFDKNLPNEKVLPKHSLLYEYFTVYNELTKVKYVTEGMRKPAFLSGEQKKAIVDLLFKTNRKVTVKQLKEDYFKKIECFDSVEISGVEDRFNASLGTYHDLLKIIKDKDFLDNEENEDILEDIVLTLTLFEDREMIEERLKTYAHLFDDKVMKQLKRRRYTGWGRLSRKLINGIRDKQSGKTILDFLKSDGFANRNFMQLIHDDSLTFKEDIQKAQVSGQGDSLHEHIANLAGSPAIKKGILQTVKVVDELVKVMGRHKPENIVIEMARENQTTQKGQKNSRERMKRIEEGIKELGSQILKEHPVENTQLQNEKLYLYYLQNGRDMYVDQELDINRLSDYDVDHIVPQSFLKDDSIDNKVLTRSDKARGKSDNVPSEEVVKKMKNYWRQLLNAKLITQRKFDNLTKAERGGLSELDKAGFIKRQLVETRQITKHVAQILDSRMNTKYDENDKLIREVKVITLKSKLVSDFRKDFQFYKVREINNYHHAHDAYLNAVVGTALIKKYPKLESEFVYGDYKVYDVRKMIAKSEQEIGKATAKYFFYSNIMNFFKTEITLANGEIRKRPLIETNGETGEIVWDKGRDFATVRKVLSMPQVNIVKKTEVQTGGFSKESILPKRNSDKLIARKKDWDPKKYGGFDSPTVAYSVLVVAKVEKGKSKKLKSVKELLGITIMERSSFEKNPIDFLEAKGYKEVKKDLIIKLPKYSLFELENGRKRMLASAGELQKGNELALPSKYVNFLYLASHYEKLKGSPEDNEQKQLFVEQHKHYLDEIIEQISEFSKRVILADANLDKVLSAYNKHRDKPIREQAENIIHLFTLTNLGAPAAFKYFDTTIDRKRYTSTKEVLDATLIHQSITGLYETRIDLSQLGGDGGPAPAPAPAPAPGGLLGRDLLTKLKAQIQFSTEGPQVTWEDRPAMCLVLNLEEEYRLHEKPVPPSIDPSWLQLFPMVWAEKAGMGLANQVPPVVVELKSDASPVAVRQYPMSKEAREGIRPHIQRFLDLGILVPCQSPWNTPLLPVKKPGTNDYRPVQDLREVNKRVQDIHPTVPNPYNLLSSLPPSHTWYSVLDLKDAFFCLKLHPNSQPLFAFEWRDPEKGNTGQLTWTRLPQGFKNSPTLFDEALHRDLASFRALNPQVVMLQYVDDLLVAAPTYRDCKEGTRRLLQELSKLGYRVSAKKAQLCREEVTYLGYLLKGGKRWLTPARKATVMKIPTPTTPRQVREFLGTAGFCRLWIPGFASLAAPLYPLTREKVPFTWTEAHQEAFGRIKEALLSAPALALPDLTKPFALYVDEKEGVARGVLTQTLGPWRRPVAYLSKKLDPVASGWPTCLKAIAAVALLLKDADKLTLGQNVLVIAPHNLESIVRQPPDRWMTNARMTHYQSLLLNERVSFAPPAILNPATLLPVESDDTPIHICSEILAEETGTRPDLRDQPLPGVPAWYTDGSSFIMDGRRQAGAAIVDNKRTVWASNLPEGTSAQKAELIALTQALRLAEGKSINIYTDSRYAFATAHVHGAIYKQRGLLTSAGKDIKNKEEILALLEAIHLPKRVAIIHCPGHQRGTDPVATGNRKADEAAKQAAQSTRILTETTKNAGKRTADGSEFEKRTADGSEFESPKKKAKVE

SEQ ID NO: 6539 - protein, 2218 aa, synthetic construct
MPAAKRVKLDGGDKKYSIGLDIGTNSVGWAVITDEYKVPSKKFKVLGNTDRHSIKKNLIGALLFDSGETAEATRLKRTARRRYTRRKNRICYLQEIFSNEMAKVDDSFFHRLEESFLVEEDKKHERHPIFGNIVDEVAYHEKYPTIYHLRKKLVDSTDKADLRLIYLALAHMIKFRGHFLIEGDLNPDNSDVDKLFIQLVQTYNQLFEENPINASGVDAKAILSARLSKSRRLENLIAQLPGEKKNGLFGNLIALSLGLTPNFKSNFDLAEDAKLQLSKDTYDDDLDNLLAQIGDQYADLFLAAKNLSDAILLSDILRVNTEITKAPLSASMIKRYDEHHQDLTLLKALVRQQLPEKYKEIFFDQSKNGYAGYIDGGASQEEFYKFIKPILEKMDGTEELLVKLNREDLLRKQRTFDNGSIPHQIHLGELHAILRRQEDFYPFLKDNREKIEKILTFRIPYYVGPLARGNSRFAWMTRKSEETITPWNFEEVVDKGASAQSFIERMTNFDKNLPNEKVLPKHSLLYEYFTVYNELTKVKYVTEGMRKPAFLSGEQKKAIVDLLFKTNRKVTVKQLKEDYFKKIECFDSVEISGVEDRFNASLGTYHDLLKIIKDKDFLDNEENEDILEDIVLTLTLFEDREMIEERLKTYAHLFDDKVMKQLKRRRYTGWGRLSRKLINGIRDKQSGKTILDFLKSDGFANRNFMQLIHDDSLTFKEDIQKAQVSGQGDSLHEHIANLAGSPAIKKGILQTVKVVDELVKVMGRHKPENIVIEMARENQTTQKGQKNSRERMKRIEEGIKELGSQILKEHPVENTQLQNEKLYLYYLQNGRDMYVDQELDINRLSDYDVDHIVPQSFLKDDSIDNKVLTRSDKARGKSDNVPSEEVVKKMKNYWRQLLNAKLITQRKFDNLTKAERGGLSELDKAGFIKRQLVETRQITKHVAQILDSRMNTKYDENDKLIREVKVITLKSKLVSDFRKDFQFYKVREINNYHHAHDAYLNAVVGTALIKKYPKLESEFVYGDYKVYDVRKMIAKSEQEIGKATAKYFFYSNIMNFFKTEITLANGEIRKRPLIETNGETGEIVWDKGRDFATVRKVLSMPQVNIVKKTEVQTGGFSKESILPKRNSDKLIARKKDWDPKKYGGFDSPTVAYSVLVVAKVEKGKSKKLKSVKELLGITIMERSSFEKNPIDFLEAKGYKEVKKDLIIKLPKYSLFELENGRKRMLASAGELQKGNELALPSKYVNFLYLASHYEKLKGSPEDNEQKQLFVEQHKHYLDEIIEQISEFSKRVILADANLDKVLSAYNKHRDKPIREQAENIIHLFTLTNLGAPAAFKYFDTTIDRKRYTSTKEVLDATLIHQSITGLYETRIDLSQLGGDGGPAPAPAPAPAPGGTLGDQGSRGSDPLPEPRVTLTVEGIPTEFLVNTGAEHSVLTKPMGKMGSKRTVVAGATGSKVYPWTTKRLLKIGQKQVTHSFLVIPECPAPLLGRDLLTKLKAQIQFSTEGPQVTWEDRPAMCLVLNLEEEYRLHEKPVPPSIDPSWLQLFPMVWAEKAGMGLANQVPPVVVELKSDASPVAVRQYPMSKEAREGIRPHIQRFLDLGILVPCQSPWNTPLLPVKKPGTNDYRPVQDLREVNKRVQDIHPTVPNPYNLLSSLPPSHTWYSVLDLKDAFFCLKLHPNSQPLFAFEWRDPEKGNTGQLTWTRLPQGFKNSPTLFNEALHRDLASFRALNPQVVMLQYVDDLLVAAPTYRDCKEGTRRLLQELSKLGYRVSAKKAQLCREEVTYLGYLLKGGKRWLTPARKATVMKIPTPTTPRQVREFLGTAGFCRLWIPGFASLAAPLYPLTRPKVPFTWTEAHQEAFGRIKEALLSAPALALPDLTKPFALYVDEKEGVARGVLTQTLGPWRRPVAYLSKKLDPVASGWPTCLKAIAAVALLLKDADKLTLGQNVLVIAPHNLESIVRQPPDRWMTNARMTHYQSLLLNERVSFAPPAILNPATLLPVESDDTPIHICSEILAEETGTRPDLRDQPLPGVPAWYTDGSSFIMDGRRQAGAAIVDNKRTVWASNLPEGTSAQKAELIALTQALRLAEGKSINIYTDSRYAFATAHVHGAIYKQRGWLTSAGKDIKNKEEILALLEAIHLPKRVAIIHCPGHQRGTDPVATGNRKADEAAKQAAQSTRILTETTKNAGKRTADGSEFEKRTADGSEFESPKKKAKVE

SEQ ID NO: 6540 - protein, 2096 aa, synthetic construct
MPAAKRVKLDGGDKKYSIGLDIGTNSVGWAVITDEYKVPSKKFKVLGNTDRHSIKKNLIGALLFDSGETAEATRLKRTARRRYTRRKNRICYLQEIFSNEMAKVDDSFFHRLEESFLVEEDKKHERHPIFGNIVDEVAYHEKYPTIYHLRKKLVDSTDKADLRLIYLALAHMIKFRGHFLIEGDLNPDNSDVDKLFIQLVQTYNQLFEENPINASGVDAKAILSARLSKSRRLENLIAQLPGEKKNGLFGNLIALSLGLTPNFKSNFDLAEDAKLQLSKDTYDDDLDNLLAQIGDQYADLFLAAKNLSDAILLSDILRVNTEITKAPLSASMIKRYDEHHQDLTLLKALVRQQLPEKYKEIFFDQSKNGYAGYIDGGASQEEFYKFIKPILEKMDGTEELLVKLNREDLLRKQRTFDNGSIPHQIHLGELHAILRRQEDFYPFLKDNREKIEKILTFRIPYYVGPLARGNSRFAWMTRKSEETITPWNFEEVVDKGASAQSFIERMTNFDKNLPNEKVLPKHSLLYEYFTVYNELTKVKYVTEGMRKPAFLSGEQKKAIVDLLFKTNRKVTVKQLKEDYFKKIECFDSVEISGVEDRFNASLGTYHDLLKIIKDKDFLDNEENEDILEDIVLTLTLFEDREMIEERLKTYAHLFDDKVMKQLKRRRYTGWGRLSRKLINGIRDKQSGKTILDFLKSDGFANRNFMQLIHDDSLTFKEDIQKAQVSGQGDSLHEHIANLAGSPAIKKGILQTVKVVDELVKVMGRHKPENIVIEMARENQTTQKGQKNSRERMKRIEEGIKELGSQILKEHPVENTQLQNEKLYLYYLQNGRDMYVDQELDINRLSDYDVDHIVPQSFLKDDSIDNKVLTRSDKARGKSDNVPSEEVVKKMKNYWRQLLNAKLITQRKFDNLTKAERGGLSELDKAGFIKRQLVETRQITKHVAQILDSRMNTKYDENDKLIREVKVITLKSKLVSDFRKDFQFYKVREINNYHHAHDAYLNAVVGTALIKKYPKLESEFVYGDYKVYDVRKMIAKSEQEIGKATAKYFFYSNIMNFFKTEITLANGEIRKRPLIETNGETGEIVWDKGRDFATVRKVLSMPQVNIVKKTEVQTGGFSKESILPKRNSDKLIARKKDWDPKKYGGFDSPTVAYSVLVVAKVEKGKSKKLKSVKELLGITIMERSSFEKNPIDFLEAKGYKEVKKDLIIKLPKYSLFELENGRKRMLASAGELQKGNELALPSKYVNFLYLASHYEKLKGSPEDNEQKQLFVEQHKHYLDEIIEQISEFSKRVILADANLDKVLSAYNKHRDKPIREQAENIIHLFTLTNLGAPAAFKYFDTTIDRKRYTSTKEVLDATLIHQSITGLYETRIDLSQLGGDGGPAPAPAPAPAPGGLGIEDEYRLHETSTEPDVSLGSTWLSDFPQAWAETGGMGLAVRQAPLIIPLKATSTPVSIQQYPMSHEARLGIKPHIQRLLDQGILVPCQSPWNTPLLPVKKPGTNDYRPVQDLREVNKRVEDIHPTVPNPYNLLSGLPPSHQWYTVLDLKDAFFCLRLHPTSQPLFAFEWRDPGMGISGQLTWTRLPQGFKNSPTLFNEALHRDLADFRIQHPDLILLQYVDDILLAATSELDCQQGTRALLQTLGDLGYRASAKKAQICQKQVKYLGYLLREGQRWLTEARKETVMGQPVPKTPRQLREFLGKAGFCRLFIPGFAEMAAPLYPLTKPGTLFSWGPDQQKAYQEIKQALLTAPALGLPDLTKPFELFVDEKQGYAKGVLTQKLGPWRRPVAYLSKKLDPVAAGWPPCLRMVAAIAVLTKDAGKLTMGQPLVILAPHAVEALVKQPPDRWLSNARMTHYQAMLLDTDRVQFGPVVALNPATLLPLPEEGAPHDCLEILAETHGTRPDLTDQPIPDADHTWYTDGSSFLQEGQRKAGAAVTTETEVIWAGALPAGTSAQRAELIALTQALKMAEGKRLNVYTDSRYAFATAHIHGEIYRRRGWLTSEGREIKNKSEILALLKALFLPKRLSIIHCLGHQKGDSAEARGNRLADQAAREAAIKTPPDTSTLLIAGKRTADGSEFEKRTADGSEFESPKKKAKVE

SEQ ID NO: 6541 - protein, 2096 aa, synthetic construct
MPAAKRVKLDGGDKKYSIGLDIGTNSVGWAVITDEYKVPSKKFKVLGNTDRHSIKKNLIGALLFDSGETAEATRLKRTARRRYTRRKNRICYLQEIFSNEMAKVDDSFFHRLEESFLVEEDKKHERHPIFGNIVDEVAYHEKYPTIYHLRKKLVDSTDKADLRLIYLALAHMIKFRGHFLIEGDLNPDNSDVDKLFIQLVQTYNQLFEENPINASGVDAKAILSARLSKSRRLENLIAQLPGEKKNGLFGNLIALSLGLTPNFKSNFDLAEDAKLQLSKDTYDDDLDNLLAQIGDQYADLFLAAKNLSDAILLSDILRVNTEITKAPLSASMIKRYDEHHQDLTLLKALVRQQLPEKYKEIFFDQSKNGYAGYIDGGASQEEFYKFIKPILEKMDGTEELLVKLNREDLLRKQRTFDNGSIPHQIHLGELHAILRRQEDFYPFLKDNREKIEKILTFRIPYYVGPLARGNSRFAWMTRKSEETITPWNFEEVVDKGASAQSFIERMTNFDKNLPNEKVLPKHSLLYEYFTVYNELTKVKYVTEGMRKPAFLSGEQKKAIVDLLFKTNRKVTVKQLKEDYFKKIECFDSVEISGVEDRFNASLGTYHDLLKIIKDKDFLDNEENEDILEDIVLTLTLFEDREMIEERLKTYAHLFDDKVMKQLKRRRYTGWGRLSRKLINGIRDKQSGKTILDFLKSDGFANRNFMQLIHDDSLTFKEDIQKAQVSGQGDSLHEHIANLAGSPAIKKGILQTVKVVDELVKVMGRHKPENIVIEMARENQTTQKGQKNSRERMKRIEEGIKELGSQILKEHPVENTQLQNEKLYLYYLQNGRDMYVDQELDINRLSDYDVDHIVPQSFLKDDSIDNKVLTRSDKARGKSDNVPSEEVVKKMKNYWRQLLNAKLITQRKFDNLTKAERGGLSELDKAGFIKRQLVETRQITKHVAQILDSRMNTKYDENDKLIREVKVITLKSKLVSDFRKDFQFYKVREINNYHHAHDAYLNAVVGTALIKKYPKLESEFVYGDYKVYDVRKMIAKSEQEIGKATAKYFFYSNIMNFFKTEITLANGEIRKRPLIETNGETGEIVWDKGRDFATVRKVLSMPQVNIVKKTEVQTGGFSKESILPKRNSDKLIARKKDWDPKKYGGFDSPTVAYSVLVVAKVEKGKSKKLKSVKELLGITIMERSSFEKNPIDFLEAKGYKEVKKDLIIKLPKYSLFELENGRKRMLASAGELQKGNELALPSKYVNFLYLASHYEKLKGSPEDNEQKQLFVEQHKHYLDEIIEQISEFSKRVILADANLDKVLSAYNKHRDKPIREQAENIIHLFTLTNLGAPAAFKYFDTTIDRKRYTSTKEVLDATLIHQSITGLYETRIDLSQLGGDGGPAPAPAPAPAPGGTLGIEDEYRLHETSTEPDVSLGSTWLSDFPQAWAETGGMGLAVRQAPLIIPLKATSTPVSIQQYPMSHEARLGIKPHIQRLLDQGILVPCQSPWNTPLLPVKKPGTNDYRPVQDLREVNKRVEDIHPTVPNPYNLLSGLPPSHQWYTVLDLKDAFFCLRLHPTSQPLFAFEWRDPGMGISGQLTWTRLPQGFKNSPTLFDEALHRDLADFRIQHPDLILLQYVDDILLAATSELDCQQGTRALLQTLGDLGYRASAKKAQICQKQVKYLGYLLREGQRWLTEARKETVMGQPVPKTPRQLREFLGTAGFCRLWIPGFAEMAAPLYPLTKTGTLFSWGPDQQKAYQEIKQALLTAPALGLPDLTKPFELFVDEKQGYAKGVLTQKLGPWRRPVAYLSKKLDPVAAGWPPCLRMVAAIAVLTKDAGKLTMGQPLVILAPHAVEALVKQPPDRWLSNARMTHYQAMLLDTDRVQFGPVVALNPATLLPLPEEGAPHDCLEILAETHGTRPDLTDQPIPDADHTWYTDGSSFLQEGQRKAGAAVTTETEVIWAGALPAGTSAQRAELIALTQALKMAEGKRLNVYTDSRYAFATAHIHGEIYRRRGLLTSEGREIKNKSEILALLKALFLPKRLSIIHCLGHQKGDSAEARGNRLADQAAREAAIKTPPDTSTLLAGKRTADGSEFEKRTADGSEFESPKKKAKVE

SEQ ID NO: 6542 - protein, 2096 aa, synthetic construct; identical to SEQ ID NO: 6540

SEQ ID NO: 6543 - protein, 2096 aa, synthetic construct
MPAAKRVKLDGGDKKYSIGLDIGTNSVGWAVITDEYKVPSKKFKVLGNTDRHSIKKNLIGALLFDSGETAEATRLKRTARRRYTRRKNRICYLQEIFSNEMAKVDDSFFHRLEESFLVEEDKKHERHPIFGNIVDEVAYHEKYPTIYHLRKKLVDSTDKADLRLIYLALAHMIKFRGHFLIEGDLNPDNSDVDKLFIQLVQTYNQLFEENPINASGVDAKAILSARLSKSRRLENLIAQLPGEKKNGLFGNLIALSLGLTPNFKSNFDLAEDAKLQLSKDTYDDDLDNLLAQIGDQYADLFLAAKNLSDAILLSDILRVNTEITKAPLSASMIKRYDEHHQDLTLLKALVRQQLPEKYKEIFFDQSKNGYAGYIDGGASQEEFYKFIKPILEKMDGTEELLVKLNREDLLRKQRTFDNGSIPHQIHLGELHAILRRQEDFYPFLKDNREKIEKILTFRIPYYVGPLARGNSRFAWMTRKSEETITPWNFEEVVDKGASAQSFIERMTNFDKNLPNEKVLPKHSLLYEYFTVYNELTKVKYVTEGMRKPAFLSGEQKKAIVDLLFKTNRKVTVKQLKEDYFKKIECFDSVEISGVEDRFNASLGTYHDLLKIIKDKDFLDNEENEDILEDIVLTLTLFEDREMIEERLKTYAHLFDDKVMKQLKRRRYTGWGRLSRKLINGIRDKQSGKTILDFLKSDGFANRNFMQLIHDDSLTFKEDIQKAQVSGQGDSLHEHIANLAGSPAIKKGILQTVKVVDELVKVMGRHKPENIVIEMARENQTTQKGQKNSRERMKRIEEGIKELGSQILKEHPVENTQLQNEKLYLYYLQNGRDMYVDQELDINRLSDYDVDHIVPQSFLKDDSIDNKVLTRSDKARGKSDNVPSEEVVKKMKNYWRQLLNAKLITQRKFDNLTKAERGGLSELDKAGFIKRQLVETRQITKHVAQILDSRMNTKYDENDKLIREVKVITLKSKLVSDFRKDFQFYKVREINNYHHAHDAYLNAVVGTALIKKYPKLESEFVYGDYKVYDVRKMIAKSEQEIGKATAKYFFYSNIMNFFKTEITLANGEIRKRPLIETNGETGEIVWDKGRDFATVRKVLSMPQVNIVKKTEVQTGGFSKESILPKRNSDKLIARKKDWDPKKYGGFDSPTVAYSVLVVAKVEKGKSKKLKSVKELLGITIMERSSFEKNPIDFLEAKGYKEVKKDLIIKLPKYSLFELENGRKRMLASAGELQKGNELALPSKYVNFLYLASHYEKLKGSPEDNEQKQLFVEQHKHYLDEIIEQISEFSKRVILADANLDKVLSAYNKHRDKPIREQAENIIHLFTLTNLGAPAAFKYFDTTIDRKRYTSTKEVLDATLIHQSITGLYETRIDLSQLGGDGGPAPAPAPAPAPGGTLNIEDEYRLHETSKGPDVPLGSTWLSDFPQAWAETGGMGLAVRQAPLIIPLKATSTPVSIKQYPMSQEARLGIKPHIQRLLDQGILVPCQSPWNTPLLPVKKPGTNDYRPVQDLREVNKRVEDIHPTVPNPYNLLSGLPPSHQWYTVLDLKDAFFCLRLHPTSQSLFAFEWRDPEMGISGQLTWTRLPQGFKNSPTLFNEALHRDLADFRIQHPDLILLQYVDDLLLAATSELDCQQGTRALLQTLGDLGYRASAKKAQICQKQVKYLGYLLKEGQRWLTEARKETVMGQPTPKTPRQLREFLGTAGFCRLWIPGFAEMAAPLYPLTKPGTLFEWGPDQQKAYQEIKQALLTAPALGLPDLTKPFELFVDEKQGYAKGVLTQKLGPWRRPVAYLSKKLDPVAAGWPPCLRMVAAIAVLTKDAGKLTMGQPLVILAPHAVEALVKQPPDRWLSNARMTHYQALLLDTDRVQFGPIVALNPATLLPLPEEGLQHDCLDILAEAHGTRPDLTDQPLPDADHTWYTDGSSFLQEGQRKAGAAVTTETEVVWAKALPAGTSAQRAELIALTQALKMAEGKKLNVYTDSRYAFATAHIHGEIYRRRGWLTSEGKEIKNKDEILALLKALFLPKRLSIIHCPGHQKGNRAEARGNRMADQAAREVATRETPETSTLLAGKRTADGSEFEKRTADGSEFESPKKKAKVE

SEQ ID NO: 6544 - protein, 2090 aa, synthetic construct
MPAAKRVKLDGGDKKYSIGLDIGTNSVGWAVITDEYKVPSKKFKVLGNTDRHSIKKNLIGALLFDSGETAEATRLKRTARRRYTRRKNRICYLQEIFSNEMAKVDDSFFHRLEESFLVEEDKKHERHPIFGNIVDEVAYHEKYPTIYHLRKKLVDSTDKADLRLIYLALAHMIKFRGHFLIEGDLNPDNSDVDKLFIQLVQTYNQLFEENPINASGVDAKAILSARLSKSRRLENLIAQLPGEKKNGLFGNLIALSLGLTPNFKSNFDLAEDAKLQLSKDTYDDDLDNLLAQIGDQYADLFLAAKNLSDAILLSDILRVNTEITKAPLSASMIKRYDEHHQDLTLLKALVRQQLPEKYKEIFFDQSKNGYAGYIDGGASQEEFYKFIKPILEKMDGTEELLVKLNREDLLRKQRTFDNGSIPHQIHLGELHAILRRQEDFYPFLKDNREKIEKILTFRIPYYVGPLARGNSRFAWMTRKSEETITPWNFEEVVDKGASAQSFIERMTNFDKNLPNEKVLPKHSLLYEYFTVYNELTKVKYVTEGMRKPAFLSGEQKKAIVDLLFKTNRKVTVKQLKEDYFKKIECFDSVEISGVEDRFNASLGTYHDLLKIIKDKDFLDNEENEDILEDIVLTLTLFEDREMIEERLKTYAHLFDDKVMKQLKRRRYTGWGRLSRKLINGIRDKQSGKTILDFLKSDGFANRNFMQLIHDDSLTFKEDIQKAQVSGQGDSLHEHIANLAGSPAIKKGILQTVKVVDELVKVMGRHKPENIVIEMARENQTTQKGQKNSRERMKRIEEGIKELGSQILKEHPVENTQLQNEKLYLYYLQNGRDMYVDQELDINRLSDYDVDHIVPQSFLKDDSIDNKVLTRSDKARGKSDNVPSEEVVKKMKNYWRQLLNAKLITQRKFDNLTKAERGGLSELDKAGFIKRQLVETRQITKHVAQILDSRMNTKYDENDKLIREVKVITLKSKLVSDFRKDFQFYKVREINNYHHAHDAYLNAVVGTALIKKYPKLESEFVYGDYKVYDVRKMIAKSEQEIGKATAKYFFYSNIMNFFKTEITLANGEIRKRPLIETNGETGEIVWDKGRDFATVRKVLSMPQVNIVKKTEVQTGGFSKESILPKRNSDKLIARKKDWDPKKYGGFDSPTVAYSVLVVAKVEKGKSKKLKSVKELLGITIMERSSFEKNPIDFLEAKGYKEVKKDLIIKLPKYSLFELENGRKRMLASAGELQKGNELALPSKYVNFLYLASHYEKLKGSPEDNEQKQLFVEQHKHYLDEIIEQISEFSKRVILADANLDKVLSAYNKHRDKPIREQAENIIHLFTLTNLGAPAAFKYFDTTIDRKRYTSTKEVLDATLIHQSITGLYETRIDLSQLGGDGGPAPAPAPAPAPGGTLQLDDEYRLYSPLVKPDQNIQFWLEQFPQAWAETAGMGLAKQVPPQVIQLKASATPVSVRQYPLSKEAQEGIRPHVQRLIQQGILVPVQSPWNTPLLPVRKPGTNDYRPVQDLREVNKRVQDIHPTVPNPYNLLCALPPQRSWYTVLDLKDAFFCLRLHPTSQPLFAFEWRDPGTGRTGQLTWTRLPQGFKNSPTIFDEALHRDLANFRIQHPQVTLLQYVDDLLLAGATKQDCLEGTKALLLELSDLGYRASAKKAQICRREVTYLGYSLRDGQRWLTEARKKTVVQIPAPTTAKQVREFLGTAGFCRLWIPGFATLAAPLYPLTKEKGEFSWAPEHQKAFDAIKKALLSAPALALPDVTKPFTLYVDERKGVARGVLTQTLGPWRRPVAYLSKKLDPVASGWPVCLKAIAAVAILVKDADKLTLGQNITVIAPHALENIVRQPPDRWMTNARMTHYQSLLLTERVTFAPPAALNPATLLPEETDEPVTHDCHQLLIEETGVRKDLTDIPLTGEVLTWFTDGSSYVVEGKRMAGAAVVDGTRTIWASSLPEGTSAQKAELMALTQALRLAEGKSINIYTDSRYAFATAHVHGAIYKQRGLLTSAGREIKNKEEILSLLEALHLPKRLAIIHCPGHQKAKDPISRGNQMADRVAKQAAQGVNLLAGKRTADGSEFEKRTADGSEFESPKKKAKVE

SEQ ID NO: 6545 - protein, 2090 aa, synthetic construct; identical to SEQ ID NO: 6544

SEQ ID NO: 6546 - protein, 2087 aa, synthetic construct
MPAAKRVKLDGGDKKYSIGLDIGTNSVGWAVITDEYKVPSKKFKVLGNTDRHSIKKNLIGALLFDSGETAEATRLKRTARRRYTRRKNRICYLQEIFSNEMAKVDDSFFHRLEESFLVEEDKKHERHPIFGNIVDEVAYHEKYPTIYHLRKKLVDSTDKADLRLIYLALAHMIKFRGHFLIEGDLNPDNSDVDKLFIQLVQTYNQLFEENPINASGVDAKAILSARLSKSRRLENLIAQLPGEKKNGLFGNLIALSLGLTPNFKSNFDLAEDAKLQLSKDTYDDDLDNLLAQIGDQYADLFLAAKNLSDAILLSDILRVNTEITKAPLSASMIKRYDEHHQDLTLLKALVRQQLPEKYKEIFFDQSKNGYAGYIDGGASQEEFYKFIKPILEKMDGTEELLVKLNREDLLRKQRTFDNGSIPHQIHLGELHAILRRQEDFYPFLKDNREKIEKILTFRIPYYVGPLARGNSRFAWMTRKSEETITPWNFEEVVDKGASAQSFIERMTNFDKNLPNEKVLPKHSLLYEYFTVYNELTKVKYVTEGMRKPAFLSGEQKKAIVDLLFKTNRKVTVKQLKEDYFKKIECFDSVEISGVEDRFNASLGTYHDLLKIIKDKDFLDNEENEDILEDIVLTLTLFEDREMIEERLKTYAHLFDDKVMKQLKRRRYTGWGRLSRKLINGIRDKQSGKTILDFLKSDGFANRNFMQLIHDDSLTFKEDIQKAQVSGQGDSLHEHIANLAGSPAIKKGILQTVKVVDELVKVMGRHKPENIVIEMARENQTTQKGQKNSRERMKRIEEGIKELGSQILKEHPVENTQLQNEKLYLYYLQNGRDMYVDQELDINRLSDYDVDHIVPQSFLKDDSIDNKVLTRSDKARGKSDNVPSEEVVKKMKNYWRQLLNAKLITQRKFDNLTKAERGGLSELDKAGFIKRQLVETRQITKHVAQILDSRMNTKYDENDKLIREVKVITLKSKLVSDFRKDFQFYKVREINNYHHAHDAYLNAVVGTALIKKYPKLESEFVYGDYKVYDVRKMIAKSEQEIGKATAKYFFYSNIMNFFKTEITLANGEIRKRPLIETNGETGEIVWDKGRDFATVRKVLSMPQVNIVKKTEVQTGGFSKESILPKRNSDKLIARKKDWDPKKYGGFDSPTVAYSVLVVAKVEKGKSKKLKSVKELLGITIMERSSFEKNPIDFLEAKGYKEVKKDLIIKLPKYSLFELENGRKRMLASAGELQKGNELALPSKYVNFLYLASHYEKLKGSPEDNEQKQLFVEQHKHYLDEIIEQISEFSKRVILADANLDKVLSAYNKHRDKPIREQAENIIHLFTLTNLGAPAAFKYFDTTIDRKRYTSTKEVLDATLIHQSITGLYETRIDLSQLGGDGGPAPAPAPAPAPGGVPWLMKKPLQLTVLVPLHEYQERLLQQTALPKEQKELLQKLFLKYDALWQHWENQVGHRRIKPHNIATGTLAPRPQKQYPINPKAKPSIQIVIDDLLKQGVLIQQNSTMNTPVYPVPKPDGKWRMVLDYREVNKTIPLIAAQNQHSAGILSSIYRGKYKTTLDLTNGFWAHPITPESYWLTAFTWQGKQYCWTRLPQGFLNSPALFNADVVDLLKEIPNVQAYVDDIYISHDDPQEHLEQLEKIFSILLNAGYVVSLKKSEIAQREVEFLGFNITKEGRGLTDTFKQKLLNITPPKDLKQLQSILGKLNFARNFIPNYSELVKPLYTIVAPANGKFISWTEDNSNQLQHIISVLNQADNLEERNPETRLIIKVNSSPSAGYIRYYNEGSKRPIMYVNYIFSKAEAKFTQTEKLLTTMHKGLIKAMDLAMGQEILVYSPIVSMTKIQRTPLPERKALPVRWITWMTYLEDPRIQFHYDKSLPELQQIPNVTEDVIAKTKHPSEFAMVFYTDGSAIKHPDVNKSHSAGMGIAQVQFIPEYKIVHQWSIPLGDHTAQLAEIAAVEFACKKALKISGPVLIVTDSFYVAESANKELPYWKSNGFLNNKKKPLRHVSKWKSIAECLQLKPDIIIMHEKGHQQPMTTLHTEGNNLADKLATQGSYVVHAGKRTADGSEFEKRTADGSEFESPKKKAKVE

SEQ ID NO: 6547 - protein, 2176 aa, synthetic construct
MPAAKRVKLDGGDKKYSIGLDIGTNSVGWAVITDEYKVPSKKFKVLGNTDRHSIKKNLIGALLFDSGETAEATRLKRTARRRYTRRKNRICYLQEIFSNEMAKVDDSFFHRLEESFLVEEDKKHERHPIFGNIVDEVAYHEKYPTIYHLRKKLVDSTDKADLRLIYLALAHMIKFRGHFLIEGDLNPDNSDVDKLFIQLVQTYNQLFEENPINASGVDAKAILSARLSKSRRLENLIAQLPGEKKNGLFGNLIALSLGLTPNFKSNFDLAEDAKLQLSKDTYDDDLDNLLAQIGDQYADLFLAAKNLSDAILLSDILRVNTEITKAPLSASMIKRYDEHHQDLTLLKALVRQQLPEKYKEIFFDQSKNGYAGYIDGGASQEEFYKFIKPILEKMDGTEELLVKLNREDLLRKQRTFDNGSIPHQIHLGELHAILRRQEDFYPFLKDNREKIEKILTFRIPYYVGPLARGNSRFAWMTRKSEETITPWNFEEVVDKGASAQSFIERMTNFDKNLPNEKVLPKHSLLYEYFTVYNELTKVKYVTEGMRKPAFLSGEQKKAIVDLLFKTNRKVTVKQLKEDYFKKIECFDSVEISGVEDRFNASLGTYHDLLKIIKDKDFLDNEENEDILEDIVLTLTLFEDREMIEERLKTYAHLFDDKVMKQLKRRRYTGWGRLSRKLINGIRDKQSGKTILDFLKSDGFANRNFMQLIHDDSLTFKEDIQKAQVSGQGDSLHEHIANLAGSPAIKKGILQTVKVVDELVKVMGRHKPENIVIEMARENQTTQKGQKNSRERMKRIEEGIKELGSQILKEHPVENTQLQNEKLYLYYLQNGRDMYVDQELDINRLSDYDVDHIVPQSFLKDDSIDNKVLTRSDKARGKSDNVPSEEVVKKMKNYWRQLLNAKLITQRKFDNLTKAERGGLSELDKAGFIKRQLVETRQITKHVAQILDSRMNTKYDENDKLIREVKVITLKSKLVSDFRKDFQFYKVREINNYHHAHDAYLNAVVGTALIKKYPKLESEFVYGDYKVYDVRKMIAKSEQEIGKATAKYFFYSNIMNFFKTEITLANGEIRKRPLIETNGETGEIVWDKGRDFATVRKVLSMPQVNIVKKTEVQTGGFSKESILPKRNSDKLIARKKDWDPKKYGGFDSPTVAYSVLVVAKVEKGKSKKLKSVKELLGITIMERSSFEKNPIDFLEAKGYKEVKKDLIIKLPKYSLFELENGRKRMLASAGELQKGNELALPSKYVNFLYLASHYEKLKGSPEDNEQKQLFVEQHKHYLDEIIEQISEFSKRVILADANLDKVLSAYNKHRDKPIREQAENIIHLFTLTNLGAPAAFKYFDTTIDRKRYTSTKEVLDATLIHQSITGLYETRIDLSQLGGDGGPAPAPAPAPAPGGMDPLQLLQPLEAEIKGTKLKAHWNSGATITCVPEAFLEDERPIQTMLIKTIHGEKQQDVYYLTFKVQGRKVEAEVLASPYDYILLNPSDVPWLMKKPLQLTVLVPLHEYQERLLQQTALPKEQKELLQKLFLKYDALWQHWENQVGHRRIKPHNIATGTLAPRPQKQYPINPKAKPSIQIVIDDLLKQGVLIQQNSTMNTPVYPVPKPDGKWRMVLDYREVNKTIPLIAAQNQHSAGILSSIYRGKYKTTLDLTNGFWAHPITPESYWLTAFTWQGKQYCWTRLPQGFLNSPALFNADVVDLLKEIPNVQAYVDDIYISHDDPQEHLEQLEKIFSILLNAGYVVSLKKSEIAQREVEFLGFNITKEGRGLTDTFKQKLLNITPPKDLKQLQSILGLLNFARNFIPNYSELVKPLYTIVAPANGKFISWTEDNSNQLQHIISVLNQADNLEERNPETRLIIKVNSSPSAGYIRYYNEGSKRPIMYVNYIFSKAEAKFTQTEKLLTTMHKGLIKAMDLAMGQEILVYSPIVSMTKIQRTPLPERKALPVRWITWMTYLEDPRIQFHYDKSLPELQQIPNVTEDVIAKTKHPSEFAMVFYTDGSAIKHPDVNKSHSAGMGIAQVQFIPEYKIVHQWSIPLGDHTAQLAEIAAVEFACKKALKISGPVLIVTDSFYVAESANKELPYWKSNGFLNNKKKPLRHVSKWKSIAECLQLKPDIIIMHEKGHQQPMTTLHTEGNNLADKLATQGSYVVHAGKRTADGSEFEKRTADGSEFESPKKKAKVE

SEQ ID NO: 6548 - protein, 2176 aa, synthetic construct
MPAAKRVKLDGGDKKYSIGLDIGTNSVGWAVITDEYKVPSKKFKVLGNTDRHSIKKNLIGALLFDSGETAEATRLKRTARRRYTRRKNRICYLQEIFSNEMAKVDDSFFHRLEESFLVEEDKKHERHPIFGNIVDEVAYHEKYPTIYHLRKKLVDSTDKADLRLIYLALAHMIKFRGHFLIEGDLNPDNSDVDKLFIQLVQTYNQLFEENPINASGVDAKAILSARLSKSRRLENLIAQLPGEKKNGLFGNLIALSLGLTPNFKSNFDLAEDAKLQLSKDTYDDDLDNLLAQIGDQYADLFLAAKNLSDAILLSDILRVNTEITKAPLSASMIKRYDEHHQDLTLLKALVRQQLPEKYKEIFFDQSKNGYAGYIDGGASQEEFYKFIKPILEKMDGTEELLVKLNREDLLRKQRTFDNGSIPHQIHLGELHAILRRQEDFYPFLKDNREKIEKILTFRIPYYVGPLARGNSRFAWMTRKSEETITPWNFEEVVDKGASAQSFIERMTNFDKNLPNEKVLPKHSLLYEYFTVYNELTKVKYVTEGMRKPAFLSGEQKKAIVDLLFKTNRKVTVKQLKEDYFKKIECFDSVEISGVEDRFNASLGTYHDLLKIIKDKDFLDNEENEDILEDIVLTLTLFEDREMIEERLKTYAHLFDDKVMKQLKRRRYTGWGRLSRKLINGIRDKQSGKTILDFLKSDGFANRNFMQLIHDDSLTFKEDIQKAQVSGQGDSLHEHIANLAGSPAIKKGILQTVKVVDELVKVMGRHKPENIVIEMARENQTTQKGQKNSRERMKRIEEGIKELGSQILKEHPVENTQLQNEKLYLYYLQNGRDMYVDQELDINRLSDYDVDHIVPQSFLKDDSIDNKVLTRSDKARGKSDNVPSEEVVKKMKNYWRQLLNAKLITQRKFDNLTKAERGGLSELDKAGFIKRQLVETRQITKHVAQILDSRMNTKYDENDKLIREVKVITLKSKLVSDFRKDFQFYKVREINNYHHAHDAYLNAVVGTALIKKYPKLESEFVYGDYKVYDVRKMIAKSEQEIGKATAKYFFYSNIMNFFKTEITLANGEIRKRPLIETNGETGEIVWDKGRDFATVRKVLSMPQVNIVKKTEVQTGGFSKESILPKRNSDKLIARKKDWDPKKYGGFDSPTVAYSVLVVAKVEKGKSKKLKSVKELLGITIMERSSFEKNPIDFLEAKGYKEVKKDLIIKLPKYSLFELENGRKRMLASAGELQKGNELALPSKYVNFLYLASHYEKLKGSPEDNEQKQLFVEQHKHYLDEIIEQISEFSKRVILADANLDKVLSAYNKHRDKPIREQAENIIHLFTLTNLGAPAAFKYFDTTIDRKRYTSTKEVLDATLIHQSITGLYETRIDLSQLGGDGGPAPAPAPAPAPGGMDPLQLLQPLEAEIKGTKLKAHWNSGATITCVPQAFLEEEVPIKNIWIKTIHGEKEQPVYYLTFKIQGRKVEAEVISSPYDYILVSPSDIPWLMKKPLQLTTLVPLQEYEERLLKQTMLTGSYKEKLQSLFLKYDALWQHWENQVGHRRIKPHHIATGTVNPRPQKQYPINPKAKASIQTVINDLLKQGVLIQQNSIMNTPVYPVPKPDGKWRMVLDYREVNKTIPLIAAQNQHSAGILSSIFRGKYKTTLDLSNGFWAHSITPESYWLTAFTWLGQQYCWTRLPQGFLNSPALFNADVVDLLKEVPNVQVYVDDIYISHDDPREHLEQLEKVFSLLLNAGYVVSLKKSEIAQHEVEFLGFNITKEGRGLTETFKQKLLNITPPRDLKQLQSILGLLNFARNFIPNFSELVKPLYNIIATAPGKYITWTTDNSQQLQNIISMLNSAENLEERNPEVRLIMKVNTSPSAGYIRFYNEFAKRPIMYLNYVYTKAEVKFTNTEKLLTTIHKGLIKALDLGMGQEILVYSPIVSMTKIQKTPLPERKALPIRWITWMSYLEDPRIQFHYDKTLPELQQVPTVTDDIIAKIKHPSEFSMVFYTDGSAIKHPNVNKSHNAGMGIAQVQFKPEFTVINTWSIPLGDHTAQLAEVAAVEFACKKALKIDGPVLIVTDSFYVAESVNKELPYWQSNGFFNNKKKPLKHVSKWKSIADCIQLKPDIIIIHEKGHQPTASTFHTEGNNLADKLATQGSYVVNAGKRTADGSEFEKRTADGSEFESPKKKAKVE

SEQ ID NO: 6549 - protein, 2094 aa, synthetic construct
MPAAKRVKLDGGDKKYSIGLDIGTNSVGWAVITDEYKVPSKKFKVLGNTDRHSIKKNLIGALLFDSGETAEATRLKRTARRRYTRRKNRICYLQEIFSNEMAKVDDSFFHRLEESFLVEEDKKHERHPIFGNIVDEVAYHEKYPTIYHLRKKLVDSTDKADLRLIYLALAHMIKFRGHFLIEGDLNPDNSDVDKLFIQLVQTYNQLFEENPINASGVDAKAILSARLSKSRRLENLIAQLPGEKKNGLFGNLIALSLGLTPNFKSNFDLAEDAKLQLSKDTYDDDLDNLLAQIGDQYADLFLAAKNLSDAILLSDILRVNTEITKAPLSASMIKRYDEHHQDLTLLKALVRQQLPEKYKEIFFDQSKNGYAGYIDGGASQEEFYKFIKPILEKMDGTEELLVKLNREDLLRKQRTFDNGSIPHQIHLGELHAILRRQEDFYPFLKDNREKIEKILTFRIPYYVGPLARGNSRFAWMTRKSEETITPWNFEEVVDKGASAQSFIERMTNFDKNLPNEKVLPKHSLLYEYFTVYNELTKVKYVTEGMRKPAFLSGEQKKAIVDLLFKTNRKVTVKQLKEDYFKKIECFDSVEISGVEDRFNASLGTYHDLLKIIKDKDFLDNEENEDILEDIVLTLTLFEDREMIEERLKTYAHLFDDKVMKQLKRRRYTGWGRLSRKLINGIRDKQSGKTILDFLKSDGFANRNFMQLIHDDSLTFKEDIQKAQVSGQGDSLHEHIANLAGSPAIKKGILQTVKVVDELVKVMGRHKPENIVIEMARENQTTQKGQKNSRERMKRIEEGIKELGSQILKEHPVENTQLQNEKLYLYYLQNGRDMYVDQELDINRLSDYDVDHIVPQSFLKDDSIDNKVLTRSDKARGKSDNVPSEEVVKKMKNYWRQLLNAKLITQRKFDNLTKAERGGLSELDKAGFIKRQLVETRQITKHVAQILDSRMNTKYDENDKLIREVKVITLKSKLVSDFRKDFQFYKVREINNYHHAHDAYLNAVVGTALIKKYPKLESEFVYGDYKVYDVRKMIAKSEQEIGKATAKYFFYSNIMNFFKTEITLANGEIRKRPLIETNGETGEIVWDKGRDFATVRKVLSMPQVNIVKKTEVQTGGFSKESILPKRNSDKLIARKKDWDPKKYGGFDSPTVAYSVLVVAKVEKGKSKKLKSVKELLGITIMERSSFEKNPIDFLEAKGYKEVKKDLIIKLPKYSLFELENGRKRMLASAGELQKGNELALPSKYVNFLYLASHYEKLKGSPEDNEQKQLFVEQHKHYLDEIIEQISEFSKRVILADANLDKVLSAYNKHRDKPIREQAENIIHLFTLTNLGAPAAFKYFDTTIDRKRYTSTKEVLDATLIHQSITGLYETRIDLSQLGGDGGPAPAPAPAPAPGGVLNLEEEYRLHEKPVPSSIDPSWLQLFPTVWAERAGMGLANQVPPVVVELRSGASPVAVRQYPMSKEAREGIRPHIQRFLDLGVLVPCQSPWNTPLLPVKKPGTNDYRPVQDLREINKRVQDIHPTVPNPYNLLSSLPPSHTWYSVLDLKDAFFCLKLHPNSQPLFAFEWRDPEKGNTGQLTWTRLPQGFKNSPTLFNEALHRDLAPFRALNPQVVLLQYVDDLLVAAPTYRDCKEGTQKLLQELSKLGYRVSAKKAQLCQKEVTYLGYLLKEGKRWLTPARKATVMKIPPPTTPRQVREFLGKAGFCRLFIPGFASLAAPLYPLTKPSIPFIWTEEHQKAFDRIKEALLSAPALALPDLTKPFTLYVDERAGVARGVLTQTLGPWRRPVAYLSKKLDPVASGWPTCLKAVAAVALLLKDADKLTLGQNVTVIASHSLESIVRQPPDRWMTNARMTHYQSLLLNERVSFAPPAVLNPATLLPVESEATPVHRCSEILAEETGTRRDLKDQPLPGVPAWYTDGSSFIAEGKRRAGAAIVDGKRTVWASSLPEGTSAQKAELVALTQALRLAEGKDINIYTDSRYAFATAHIHGAIYKQRGWLTSAGKDIKNKEEILALLEAIHLPKRVAIIHCPGHQKGNDPVATGNRRADEAAKQAALSTRVLAETTKPAGKRTADGSEFEKRTADGSEFESPKKKAKVE

SEQ ID NO: 6550 - protein, 2096 aa, synthetic construct
MPAAKRVKLDGGDKKYSIGLDIGTNSVGWAVITDEYKVPSKKFKVLGNTDRHSIKKNLIGALLFDSGETAEATRLKRTARRRYTRRKNRICYLQEIFSNEMAKVDDSFFHRLEESFLVEEDKKHERHPIFGNIVDEVAYHEKYPTIYHLRKKLVDSTDKADLRLIYLALAHMIKFRGHFLIEGDLNPDNSDVDKLFIQLVQTYNQLFEENPINASGVDAKAILSARLSKSRRLENLIAQLPGEKKNGLFGNLIALSLGLTPNFKSNFDLAEDAKLQLSKDTYDDDLDNLLAQIGDQYADLFLAAKNLSDAILLSDILRVNTEITKAPLSASMIKRYDEHHQDLTLLKALVRQQLPEKYKEIFFDQSKNGYAGYIDGGASQEEFYKFIKPILEKMDGTEELLVKLNREDLLRKQRTFDNGSIPHQIHLGELHAILRRQEDFYPFLKDNREKIEKILTFRIPYYVGPLARGNSRFAWMTRKSEETITPWNFEEVVDKGASAQSFIERMTNFDKNLPNEKVLPKHSLLYEYFTVYNELTKVKYVTEGMRKPAFLSGEQKKAIVDLLFKTNRKVTVKQLKEDYFKKIECFDSVEISGVEDRFNASLGTYHDLLKIIKDKDFLDNEENEDILEDIVLTLTLFEDREMIEERLKTYAHLFDDKVMKQLKRRRYTGWGRLSRKLINGIRDKQSGKTILDFLKSDGFANRNFMQLIHDDSLTFKEDIQKAQVSGQGDSLHEHIANLAGSPAIKKGILQTVKVVDELVKVMGRHKPENIVIEMARENQTTQKGQKNSRERMKRIEEGIKELGSQILKEHPVENTQLQNEKLYLYYLQNGRDMYVDQELDINRLSDYDVDHIVPQSFLKDDSIDNKVLTRSDKARGKSDNVPSEEVVKKMKNYWRQLLNAKLITQRKFDNLTKAERGGLSELDKAGFIKRQLVETRQITKHVAQILDSRMNTKYDENDKLIREVKVITLKSKLVSDFRKDFQFYKVREINNYHHAHDAYLNAVVGTALIKKYPKLESEFVYGDYKVYDVRKMIAKSEQEIGKATAKYFFYSNIMNFFKTEITLANGEIRKRPLIETNGETGEIVWDKGRDFATVRKVLSMPQVNIVKKTEVQTGGFSKESILPKRNSDKLIARKKDWDPKKYGGFDSPTVAYSVLVVAKVEKGKSKKLKSVKELLGITIMERSSFEKNPIDFLEAKGYKEVKKDLIIKLPKYSLFELENGRKRMLASAGELQKGNELALPSKYVNFLYLASHYEKLKGSPEDNEQKQLFVEQHKHYLDEIIEQISEFSKRVILADANLDKVLSAYNKHRDKPIREQAENIIHLFTLTNLGAPAAFKYFDTTIDRKRYTSTKEVLDATLIHQSITGLYETRIDLSQLGGDGGPAPAPAPAPAPGGTLNIEDEYRLHETSKEPDVPLGSTWLSDFPQAWAETGGMGLAVRQAPLIIPLKATSTPVSIKQYPMSQEARLGIKPHIQRLLDQGILVPCQSPWNTPLLPVKKPGTNDYRPVQDLREVNKRVEDIHPTVPNPYNLLSGLPPSHQWYTVLDLKDAFFCLRLHPTSQPLFAFEWRDPEMGISGQLTWTRLPQGFKNSPTLFDEALHRDLADFRIQHPDLILLQYVDDLLLAATSEQDCQRGTRALLQTLGNLGYRASAKKAQICQKQVKYLGYLLKEGQRWLTEARKETVMGQPTPKTPRQLREFLGTAGFCRLWIPGFAEMAAPLYPLTKTGTLFNWGPDQQKAYQEIKQALLTAPALGLPDLTKPFELFVDEKQGYAKGVLTQKLGPWRRPVAYLSKKLDPVAAGWPPCLRMVAAIAVLTKDAGKLTMGQPLVILAPHAVEALVKQPPDRWLSNARMTHYQAMLLDTDRVQFGPVVALNPATLLPLPEKEAPHDCLEILAETHGTRPDLTDQPIPDADYTWYTDGSSFLQEGQRRAGAAVTTETEVIWARALPAGTSAQRAELIALTQALKMAEGKKLNVYTDSRYAFATAHVHGEIYRRRGLLTSEGREIKNKNEILALLKALFLPKRLSIIHCPGHQKGNSAEARGNRMADQAAREAAMKAVLETSTLLAGKRTADGSEFEKRTADGSEFESPKKKAKVE

SEQ ID NO: 6551 - protein, 2096 aa, synthetic construct
MPAAKRVKLDGGDKKYSIGLDIGTNSVGWAVITDEYKVPSKKFKVLGNTDRHSIKKNLIGALLFDSGETAEATRLKRTARRRYTRRKNRICYLQEIFSNEMAKVDDSFFHRLEESFLVEEDKKHERHPIFGNIVDEVAYHEKYPTIYHLRKKLVDSTDKADLRLIYLALAHMIKFRGHFLIEGDLNPDNSDVDKLFIQLVQTYNQLFEENPINASGVDAKAILSARLSKSRRLENLIAQLPGEKKNGLFGNLIALSLGLTPNFKSNFDLAEDAKLQLSKDTYDDDLDNLLAQIGDQYADLFLAAKNLSDAILLSDILRVNTEITKAPLSASMIKRYDEHHQDLTLLKALVRQQLPEKYKEIFFDQSKNGYAGYIDGGASQEEFYKFIKPILEKMDGTEELLVKLNREDLLRKQRTFDNGSIPHQIHLGELHAILRRQEDFYPFLKDNREKIEKILTFRIPYYVGPLARGNSRFAWMTRKSEETITPWNFEEVVDKGASAQSFIERMTNFDKNLPNEKVLPKHSLLYEYFTVYNELTKVKYVTEGMRKPAFLSGEQKKAIVDLLFKTNRKVTVKQLKEDYFKKIECFDSVEISGVEDRFNASLGTYHDLLKIIKDKDFLDNEENEDILEDIVLTLTLFEDREMIEERLKTYAHLFDDKVMKQLKRRRYTGWGRLSRKLINGIRDKQSGKTILDFLKSDGFANRNFMQLIHDDSLTFKEDIQKAQVSGQGDSLHEHIANLAGSPAIKKGILQTVKVVDELVKVMGRHKPENIVIEMARENQTTQKGQKNSRERMKRIEEGIKELGSQILKEHPVENTQLQNEKLYLYYLQNGRDMYVDQELDINRLSDYDVDHIVPQSFLKDDSIDNKVLTRSDKARGKSDNVPSEEVVKKMKNYWRQLLNAKLITQRKFDNLTKAERGGLSELDKAGFIKRQLVETRQITKHVAQILDSRMNTKYDENDKLIREVKVITLKSKLVSDFRKDFQFYKVREINNYHHAHDAYLNAVVGTALIKKYPKLESEFVYGDYKVYDVRKMIAKSEQEIGKATAKYFFYSNIMNFFKTEITLANGEIRKRPLIETNGETGEIVWDKGRDFATVRKVLSMPQVNIVKKTEVQTGGFSKESILPKRNSDKLIARKKDWDPKKYGGFDSPTVAYSVLVVAKVEKGKSKKLKSVKELLGITIMERSSFEKNPIDFLEAKGYKEVKKDLIIKLPKYSLFELENGRKRMLASAGELQKGNELALPSKYVNFLYLASHYEKLKGSPEDNEQKQLFVEQHKHYLDEIIEQISEFSKRVILADANLDKVLSAYNKHRDKPIREQAENIIHLFTLTNLGAPAAFKYFDTTIDRKRYTSTKEVLDATLIHQSITGLYETRIDLSQLGGDGGPAPAPAPAPAPGGTLNIEDEYRLHETSKEPDVPLGSTWLSDFPQAWAETGGMGLAVRQAPLIIPLKATSTPVSIKQYPMSQEARLGIKPHIQRLLDQGILVPCQSPWNTPLLPVKKPGTNDYRPVQDLREVNKRVEDIHPTVPNPYNLLSGLPPSHQWYTVLDLKDAFFCLRLHPTSQPLFAFEWRDPEMGISGQLTWTRLPQGFKNSPTLFNEALHRDLADFRIQHPDLILLQYVDDLLLAATSEQDCQRGTRALLQTLGNLGYRASAKKAQICQKQVKYLGYLLKEGQRWLTEARKETVMGQPTPKTPRQLREFLGTAGFCRLWIPGFAEMAAPLYPLTKPGTLFNWGPDQQKAYQEIKQALLTAPALGLPDLTKPFELFVDEKQGYAKGVLTQKLGPWRRPVAYLSKKLDPVAAGWPPCLRMVAAIAVLTKDAGKLTMGQPLVILAPHAVEALVKQPPDRWLSNARMTHYQAMLLDTDRVQFGPVVALNPATLLPLPEKEAPHDCLEILAETHGTRPDLTDQPIPDADYTWYTDGSSFLQEGQRRAGAAVTTETEVIWARALPAGTSAQRAELIALTQALKMAEGKKLNVYTDSRYAFATAHVHGEIYRRRGWLTSEGREIKNKNEILALLKALFLPKRLSIIHCPGHQKGNSAEARGNRMADQAAREAAMKAVLETSTLLAGKRTADGSEFEKRTADGSEFESPKKKAKVE

SEQ ID NO: 6552 - protein, 2100 aa, synthetic construct
MPAAKRVKLDGGDKKYSIGLDIGTNSVGWAVITDEYKVPSKKFKVLGNTDRHSIKKNLIGALLFDSGETAEATRLKRTARRRYTRRKNRICYLQEIFSNEMAKVDDSFFHRLEESFLVEEDKKHERHPIFGNIVDEVAYHEKYPTIYHLRKKLVDSTDKADLRLIYLALAHMIKFRGHFLIEGDLNPDNSDVDKLFIQLVQTYNQLFEENPINASGVDAKAILSARLSKSRRLENLIAQLPGEKKNGLFGNLIALSLGLTPNFKSNFDLAEDAKLQLSKDTYDDDLDNLLAQIGDQYADLFLAAKNLSDAILLSDILRVNTEITKAPLSASMIKRYDEHHQDLTLLKALVRQQLPEKYKEIFFDQSKNGYAGYIDGGASQEEFYKFIKPILEKMDGTEELLVKLNREDLLRKQRTFDNGSIPHQIHLGELHAILRRQEDFYPFLKDNREKIEKILTFRIPYYVGPLARGNSRFAWMTRKSEETITPWNFEEVVDKGASAQSFIERMTNFDKNLPNEKVLPKHSLLYEYFTVYNELTKVKYVTEGMRKPAFLSGEQKKAIVDLLFKTNRKVTVKQLKEDYFKKIECFDSVEISGVEDRFNASLGTYHDLLKIIKDKDFLDNEENEDILEDIVLTLTLFEDREMIEERLKTYAHLFDDKVMKQLKRRRYTGWGRLSRKLINGIRDKQSGKTILDFLKSDGFANRNFMQLIHDDSLTFKEDIQKAQVSGQGDSLHEHIANLAGSPAIKKGILQTVKVVDELVKVMGRHKPENIVIEMARENQTTQKGQKNSRERMKRIEEGIKELGSQILKEHPVENTQLQNEKLYLYYLQNGRDMYVDQELDINRLSDYDVDHIVPQSFLKDDSIDNKVLTRSDKARGKSDNVPSEEVVKKMKNYWRQLLNAKLITQRKFDNLTKAERGGLSELDKAGFIKRQLVETRQITKHVAQILDSRMNTKYDENDKLIREVKVITLKSKLVSDFRKDFQFYKVREINNYHHAHDAYLNAVVGTALIKKYPKLESEFVYGDYKVYDVRKMIAKSEQEIGKATAKYFFYSNIMNFFKTEITLANGEIRKRPLIETNGETGEIVWDKGRDFATVRKVLSMPQVNIVKKTEVQTGGFSKESILPKRNSDKLIARKKDWDPKKYGGFDSPTVAYSVLVVAKVEKGKSKKLKSVKELLGITIMERSSFEKNPIDFLEAKGYKEVKKDLIIKLPKYSLFELENGRKRMLASAGELQKGNELALPSKYVNFLYLASHYEKLKGSPEDNEQKQLFVEQHKHYLDEIIEQISEFSKRVILADANLDKVLSAYNKHRDKPIREQAENIIHLFTLTNLGAPAAFKYFDTTIDRKRYTSTKEVLDATLIHQSITGLYETRIDLSQLGGDGGPAPAPAPAPAPAPGGTAPLEEEYRLFLEAPIQNVTLLEQWKREIPKVWAEINPPGLASTQAPIHVQLLSTALPVRVRQYPITLEAKRSLRETIRKFRAAGILRPVHSPWNTPLLPVRKSGTSEYRMVQDLREVNKRVETIHPTVPNPYTLLSLLPPDRIWYSVLDLKDAFFCIPLAPESQLIFAFEWADAEEGESGQLTWTRLPQGFKNSPTLFDEALNRDLQGFRLDHPSVSLLQYVDDLLIAADTQAACLSATRDLLMTLAELGYRVSGKKAQLCQEEVTYLGFKIHKGSRSLSNSRTQAILQIPVPKTKRQVREFLGTIGYCRLWIPGFAELAQPLYAATRGGNDPLVWGEKEEEAFQSLKLALTQPPALALPSLDKPFQLFVEETSGAAKGVLTQALGPWKRPVAYLSKRLDPVAAGWPRCLRAIAAAALLTREASKLTFGQDIEITSSHNLESLLRSPPDKWLTNARITQYQVLLLDPPRVRFKQTAALNPATLLPETDDTLPIHHCLDTLDSLTSTRPDLTDQPLAQAEATLFTDGSSYIRDGKRYAGAAVVTLDSVIWAEPLPIGTSAQKAELIALTKALEWSKDKSVNIYTDSRYAFATLHVHGMIYRERGLLTAGGKAIKNAPEILALLTAVWLPKRVAVMHCKGHQKDDAPTSTGNRRADEVAREVAIRPLSTQATISAGKRTADGSEFEKRTADGSEFESPKKKAKVE

SEQ ID NO: 6553 - protein, 2175 aa, synthetic construct
MPAAKRVKLDGGDKKYSIGLDIGTNSVGWAVITDEYKVPSKKFKVLGNTDRHSIKKNLIGALLFDSGETAEATRLKRTARRRYTRRKNRICYLQEIFSNEMAKVDDSFFHRLEESFLVEEDKKHERHPIFGNIVDEVAYHEKYPTIYHLRKKLVDSTDKADLRLIYLALAHMIKFRGHFLIEGDLNPDNSDVDKLFIQLVQTYNQLFEENPINASGVDAKAILSARLSKSRRLENLIAQLPGEKKNGLFGNLIALSLGLTPNFKSNFDLAEDAKLQLSKDTYDDDLDNLLAQIGDQYADLFLAAKNLSDAILLSDILRVNTEITKAPLSASMIKRYDEHHQDLTLLKALVRQQLPEKYKEIFFDQSKNGYAGYIDGGASQEEFYKFIKPILEKMDGTEELLVKLNREDLLRKQRTFDNGSIPHQIHLGELHAILRRQEDFYPFLKDNREKIEKILTFRIPYYVGPLARGNSRFAWMTRKSEETITPWNFEEVVDKGASAQSFIERMTNFDKNLPNEKVLPKHSLLYEYFTVYNELTKVKYVTEGMRKPAFLSGEQKKAIVDLLFKTNRKVTVKQLKEDYFKKIECFDSVEISGVEDRFNASLGTYHDLLKIIKDKDFLDNEENEDILEDIVLTLTLFEDREMIEERLKTYAHLFDDKVMKQLKRRRYTGWGRLSRKLINGIRDKQSGKTILDFLKSDGFANRNFMQLIHDDSLTFKEDIQKAQVSGQGDSLHEHIANLAGSPAIKKGILQTVKVVDELVKVMGRHKPENIVIEMARENQTTQKGQKNSRERMKRIEEGIKELGSQILKEHPVENTQLQNEKLYLYYLQNGRDMYVDQELDINRLSDYDVDHIVPQSFLKDDSIDNKVLTRSDKARGKSDNVPSEEVVKKMKNYWRQLLNAKLITQRKFDNLTKAERGGLSELDKAGFIKRQLVETRQITKHVAQILDSRMNTKYDENDKLIREVKVITLKSKLVSDFRKDFQFYKVREINNYHHAHDAYLNAVVGTALIKKYPKLESEFVYGDYKVYDVRKMIAKSEQEIGKATAKYFFYSNIMNFFKTEITLANGEIRKRPLIETNGETGEIVWDKGRDFATVRKVLSMPQVNIVKKTEVQTGGFSKESILPKRNSDKLIARKKDWDPKKYGGFDSPTVAYSVLVVAKVEKGKSKKLKSVKELLGITIMERSSFEKNPIDFLEAKGYKEVKKDLIIKLPKYSLFELENGRKRMLASAGELQKGNELALPSKYVNFLYLASHYEKLKGSPEDNEQKQLFVEQHKHYLDEIIEQISEFSKRVILADANLDKVLSAYNKHRDKPIREQAENIIHLFTLTNLGAPAAFKYFDTTIDRKRYTSTKEVLDATLIHQSITGLYETRIDLSQLGGDGGPAPAPAPAPAPAPGGMDLLKPLTVERKGVKIKGYWNSQADITCVPKDLLQGEEPVRQQNVTTIHGTQEGDVYYVNLKIDGRRINTEVIGTTLDYAIITPGDVPWILKKPLELTIKLDLEEQQGTLLNNSILSKKGKEELKQLFEKYSALWQSWENQVGHRRIRPHKIATGTVKPTPQKQYHINPKAKPDIQIVINDLLKQGVLIQKESTMNTPVYPVPKPNGRWRMVLDYRAVNKVTPLIAVQNQHSYGILGSLFKGRYKTTIDLSNGFWAHPIVPEDYWITAFTWQGKQYCWTVLPQGFLNSPGLFNGDVVDLLQGIPNVEVYVDDVYISHDSEKEHLEYLDILFNRLKEAGYIISLKKSNIANSIVDFLGFQITNEGRGLTDTFKEKLENITAPTTLKQLQSILGLLNFARNFIPDFTELIAPLYALIPKSPKNYVPWQIEHSTTLETLITKLNGAEYLQGRKGDKTLIMKVNASYTTGYIRYYNEGEKKPISYVSIVFSKTELKFTELEKLLTTVHKGLLKALDLSMGQNIHVYSPIVSMQNIQKTPQTAKKALASRWLSWLSYLEDPRIRFFYDPQMPALKDLPAVDTGKDNKKHPSNFQHIFYTDGSAITSPTKEGHLNAGMGIVYFINKDGNLQKQQEWSISLGNHTAQFAEIAAFEFALKKCLPLGGNILVVTDSNYVAKAYNEELDVWASNGFVNNRKKPLKHISKWKSVADLKRLRPDVVVTHEPGHQKLDSSPHAYGNNLADQLATQASFKVHAGKRTADGSEFEKRTADGSEFESPKKKAKVE

SEQ ID NO: 6554 - protein, 2175 aa, synthetic construct
MPAAKRVKLDGGDKKYSIGLDIGTNSVGWAVITDEYKVPSKKFKVLGNTDRHSIKKNLIGALLFDSGETAEATRLKRTARRRYTRRKNRICYLQEIFSNEMAKVDDSFFHRLEESFLVEEDKKHERHPIFGNIVDEVAYHEKYPTIYHLRKKLVDSTDKADLRLIYLALAHMIKFRGHFLIEGDLNPDNSDVDKLFIQLVQTYNQLFEENPINASGVDAKAILSARLSKSRRLENLIAQLPGEKKNGLFGNLIALSLGLTPNFKSNFDLAEDAKLQLSKDTYDDDLDNLLAQIGDQYADLFLAAKNLSDAILLSDILRVNTEITKAPLSASMIKRYDEHHQDLTLLKALVRQQLPEKYKEIFFDQSKNGYAGYIDGGASQEEFYKFIKPILEKMDGTEELLVKLNREDLLRKQRTFDNGSIPHQIHLGELHAILRRQEDFYPFLKDNREKIEKILTFRIPYYVGPLARGNSRFAWMTRKSEETITPWNFEEVVDKGASAQSFIERMTNFDKNLPNEKVLPKHSLLYEYFTVYNELTKVKYVTEGMRKPAFLSGEQKKAIVDLLFKTNRKVTVKQLKEDYFKKIECFDSVEISGVEDRFNASLGTYHDLLKIIKDKDFLDNEENEDILEDIVLTLTLFEDREMIEERLKTYAHLFDDKVMKQLKRRRYTGWGRLSRKLINGIRDKQSGKTILDFLKSDGFANRNFMQLIHDDSLTFKEDIQKAQVSGQGDSLHEHIANLAGSPAIKKGILQTVKVVDELVKVMGRHKPENIVIEMARENQTTQKGQKNSRERMKRIEEGIKELGSQILKEHPVENTQLQNEKLYLYYLQNGRDMYVDQELDINRLSDYDVDHIVPQSFLKDDSIDNKVLTRSDKARGKSDNVPSEEVVKKMKNYWRQLLNAKLITQRKFDNLTKAERGGLSELDKAGFIKRQLVETRQITKHVAQILDSRMNTKYDENDKLIREVKVITLKSKLVSDFRKDFQFYKVREINNYHHAHDAYLNAVVGTALIKKYPKLESEFVYGDYKVYDVRKMIAKSEQEIGKATAKYFFYSNIMNFFKTEITLANGEIRKRPLIETNGETGEIVWDKGRDFATVRKVLSMPQVNIVKKTEVQTGGFSKESILPKRNSDKLIARKKDWDPKKYGGFDSPTVAYSVLVVAKVEKGKSKKLKSVKELLGITIMERSSFEKNPIDFLEAKGYKEVKKDLIIKLPKYSLFELENGRKRMLASAGELQKGNELALPSKYVNFLYLASHYEKLKGSPEDNEQKQLFVEQHKHYLDEIIEQISEFSKRVILADANLDKVLSAYNKHRDKPIREQAENIIHLFTLTNLGAPAAFKYFDTTIDRKRYTSTKEVLDATLIHQSITGLYETRIDLSQLGGDGGPAPAPAPAPAPAPGGMDLLKPLTVERKGVKIKGYWNSQADITCVPKDLLQGEEPVRQQNVTTIHGTQEGDVYYVNLKIDGRRINTEVIGTTLDYAIITPGDVPWILKKPLELTIKLDLEEQQGTLLNNSILSKKGKEELKQLFEKYSALWQSWENQVGHRRIRPHKIATGTVKPTPQKQYHINPKAKPDIQIVINDLLKQGVLIQKESTMNTPVYPVPKPNGRWRMVLDYRAVNKVTPLIAVQNQHSYGILGSLFKGRYKTTIDLSNGFWAHPIVPEDYWITAFTWQGKQYCWTVLPQGFLNSPGLFNGDVVDLLQGIPNVEVYVDDVYISHDSEKEHLEYLDILFNRLKEAGYIISLKKSNIANSIVDFLGFQITNEGRGLTDTFKEKLENITAPTTLKQLQSILGKLNFARNFIPDFTELIAPLYALIPKSPKNYVPWQIEHSTTLETLITKLNGAEYLQGRKGDKTLIMKVNASYTTGYIRYYNEGEKKPISYVSIVFSKTELKFTELEKLLTTVHKGLLKALDLSMGQNIHVYSPIVSMQNIQKTPQTAKKALASRWLSWLSYLEDPRIRFFYDPQMPALKDLPAVDTGKDNKKHPSNFQHIFYTDGSAITSPTKEGHLNAGMGIVYFINKDGNLQKQQEWSISLGNHTAQFAEIAAFEFALKKCLPLGGNILVVTDSNYVAKAYNEELDVWASNGFVNNRKKPLKHISKWKSVADLKRLRPDVVVTHEPGHQKLDSSPHAYGNNLADQLATQASFKVHAGKRTADGSEFEKRTADGSEFESPKKKAKVE

SEQ ID NO: 6555 - protein, 2097 aa, synthetic construct
MPAAKRVKLDGGDKKYSIGLDIGTNSVGWAVITDEYKVPSKKFKVLGNTDRHSIKKNLIGALLFDSGETAEATRLKRTARRRYTRRKNRICYLQEIFSNEMAKVDDSFFHRLEESFLVEEDKKHERHPIFGNIVDEVAYHEKYPTIYHLRKKLVDSTDKADLRLIYLALAHMIKFRGHFLIEGDLNPDNSDVDKLFIQLVQTYNQLFEENPINASGVDAKAILSARLSKSRRLENLIAQLPGEKKNGLFGNLIALSLGLTPNFKSNFDLAEDAKLQLSKDTYDDDLDNLLAQIGDQYADLFLAAKNLSDAILLSDILRVNTEITKAPLSASMIKRYDEHHQDLTLLKALVRQQLPEKYKEIFFDQSKNGYAGYIDGGASQEEFYKFIKPILEKMDGTEELLVKLNREDLLRKQRTFDNGSIPHQIHLGELHAILRRQEDFYPFLKDNREKIEKILTFRIPYYVGPLARGNSRFAWMTRKSEETITPWNFEEVVDKGASAQSFIERMTNFDKNLPNEKVLPKHSLLYEYFTVYNELTKVKYVTEGMRKPAFLSGEQKKAIVDLLFKTNRKVTVKQLKEDYFKKIECFDSVEISGVEDRFNASLGTYHDLLKIIKDKDFLDNEENEDILEDIVLTLTLFEDREMIEERLKTYAHLFDDKVMKQLKRRRYTGWGRLSRKLINGIRDKQSGKTILDFLKSDGFANRNFMQLIHDDSLTFKEDIQKAQVSGQGDSLHEHIANLAGSPAIKKGILQTVKVVDELVKVMGRHKPENIVIEMARENQTTQKGQKNSRERMKRIEEGIKELGSQILKEHPVENTQLQNEKLYLYYLQNGRDMYVDQELDINRLSDYDVDHIVPQSFLKDDSIDNKVLTRSDKARGKSDNVPSEEVVKKMKNYWRQLLNAKLITQRKFDNLTKAERGGLSELDKAGFIKRQLVETRQITKHVAQILDSRMNTKYDENDKLIREVKVITLKSKLVSDFRKDFQFYKVREINNYHHAHDAYLNAVVGTALIKKYPKLESEFVYGDYKVYDVRKMIAKSEQEIGKATAKYFFYSNIMNFFKTEITLANGEIRKRPLIETNGETGEIVWDKGRDFATVRKVLSMPQVNIVKKTEVQTGGFSKESILPKRNSDKLIARKKDWDPKKYGGFDSPTVAYSVLVVAKVEKGKSKKLKSVKELLGITIMERSSFEKNPIDFLEAKGYKEVKKDLIIKLPKYSLFELENGRKRMLASAGELQKGNELALPSKYVNFLYLASHYEKLKGSPEDNEQKQLFVEQHKHYLDEIIEQISEFSKRVILADANLDKVLSAYNKHRDKPIREQAENIIHLFTLTNLGAPAAFKYFDTTIDRKRYTSTKEVLDATLIHQSITGLYETRIDLSQLGGDGGPAPAPAPAPAPAPGGTLQLEEEYRLFEPESTQKQEMDIWLKNFPQAWAETGGMGTAHCQAPVLIQLKATATPISIRQYPMPHEAYQGIKPHIRRMLDQGILKPCQSPWNTPLLPVKKPGTEDYRPVQDLREVNKRVEDIHPTVPNPYNLLSTLPPSHPWYTVLDLKDAFFCLRLHSESQLLFAFEWRDPEIGLSGQLTWTRLPQGFKNSPTLFNEALHSDLADFRVRYPALVLLQYVDDLLLAAATRTECLEGTKALLETLGNKGYRASAKKAQICLQEVTYLGYSLKDGQRWLTKARKEAILSIPVPKNSRQVREFLGTAGYCRLWIPGFAELAAPLYPLTRPGTLFQWGTEQQLAFEDIKKALLSSPALGLPDITKPFELFIDENSGFAKGVLVQKLGPWKRPVAYLSKKLDTVASGWPPCLRMVAAIAILVKDAGKLTLGQPLTILTSHPVEALVRQPPNKWLSNARMTHYQAMLLDAERVHFGPTVSLNPATLLPLPSGGNHHDCLQILAETHGTRPDLTDQPLPDADLTWYTDGSSFIRNGEREAGAAVTTESEVIWAAPLPPGTSAQRAELIALTQALKMAEGKKLTVYTDSRYAFATTHVHGEIYRRRGWLTSEGKEIKNKNEILALLEALFLPKRLSIIHCPGHQKGDSPQAKGNRLADDTAKKAATETHSSLTVLPAGKRTADGSEFEKRTADGSEFESPKKKAKVE

SEQ ID NO: 6556 - protein, 2089 aa, synthetic construct
MPAAKRVKLDGGDKKYSIGLDIGTNSVGWAVITDEYKVPSKKFKVLGNTDRHSIKKNLIGALLFDSGETAEATRLKRTARRRYTRRKNRICYLQEIFSNEMAKVDDSFFHRLEESFLVEEDKKHERHPIFGNIVDEVAYHEKYPTIYHLRKKLVDSTDKADLRLIYLALAHMIKFRGHFLIEGDLNPDNSDVDKLFIQLVQTYNQLFEENPINASGVDAKAILSARLSKSRRLENLIAQLPGEKKNGLFGNLIALSLGLTPNFKSNFDLAEDAKLQLSKDTYDDDLDNLLAQIGDQYADLFLAAKNLSDAILLSDILRVNTEITKAPLSASMIKRYDEHHQDLTLLKALVRQQLPEKYKEIFFDQSKNGYAGYIDGGASQEEFYKFIKPILEKMDGTEELLVKLNREDLLRKQRTFDNGSIPHQIHLGELHAILRRQEDFYPFLKDNREKIEKILTFRIPYYVGPLARGNSRFAWMTRKSEETITPWNFEEVVDKGASAQSFIERMTNFDKNLPNEKVLPKHSLLYEYFTVYNELTKVKYVTEGMRKPAFLSGEQKKAIVDLLFKTNRKVTVKQLKEDYFKKIECFDSVEISGVEDRFNASLGTYHDLLKIIKDKDFLDNEENEDILEDIVLTLTLFEDREMIEERLKTYAHLFDDKVMKQLKRRRYTGWGRLSRKLINGIRDKQSGKTILDFLKSDGFANRNFMQLIHDDSLTFKEDIQKAQVSGQGDSLHEHIANLAGSPAIKKGILQTVKVVDELVKVMGRHKPENIVIEMARENQTTQKGQKNSRERMKRIEEGIKELGSQILKEHPVENTQLQNEKLYLYYLQNGRDMYVDQELDINRLSDYDVDHIVPQSFLKDDSIDNKVLTRSDKARGKSDNVPSEEVVKKMKNYWRQLLNAKLITQRKFDNLTKAERGGLSELDKAGFIKRQLVETRQITKHVAQILDSRMNTKYDENDKLIREVKVITLKSKLVSDFRKDFQFYKVREINNYHHAHDAYLNAVVGTALIKKYPKLESEFVYGDYKVYDVRKMIAKSEQEIGKATAKYFFYSNIMNFFKTEITLANGEIRKRPLIETNGETGEIVWDKGRDFATVRKVLSMPQVNIVKKTEVQTGGFSKESILPKRNSDKLIARKKDWDPKKYGGFDSPTVAYSVLVVAKVEKGKSKKLKSVKELLGITIMERSSFEKNPIDFLEAKGYKEVKKDLIIKLPKYSLFELENGRKRMLASAGELQKGNELALPSKYVNFLYLASHYEKLKGSPEDNEQKQLFVEQHKHYLDEIIEQISEFSKRVILADANLDKVLSAYNKHRDKPIREQAENIIHLFTLTNLGAPAAFKYFDTTIDRKRYTSTKEVLDATLIHQSITGLYETRIDLSQLGGDGGPAPAPAPAPAPAPGGVPWLTQQPLQLTILVPLQEYQEKILSKTALPEDQKQQLKTLFVKYDNLWQHWENQVGHRKIRPHNIATGDYPPRPQKQYPINPKAKPSIQIVIDDLLKQGVLTPQNSTMNTPVYPVPKPDGRWRMVLDYREVNKTIPLTAAQNQHSAGILATIVRQKYKTTLDLANGFWAHPITPESYWLTAFTWQGKQYCWTRLPQGFLNSPALFNADVVDLLKEIPNVQVYVDDIYLSHDDPKEHVQQLEKVFQILLQAGYVVSLKKSEIGQKTVEFLGFNITKEGRGLTDTFKTKLLNITPPKDLKQLQSILGKLNFARNFIPNFAELVQPLYNLIAPAKGKYIEWSEENTKQLNMVIEALNTASNLEERLPEQRLVIKVNTSPSAGYVRYYNETGKKPIMYLNYVFSKAELKFSMLEKLLTTMHKALIKAMDLAMGQEILVYSPIVSMTKIQKTPLPERKALPIRWITWMTYLEDPRIQFHYDKTLPELKHIPDVYTSSQSPVKHPSQYEGVFYTDGSAIKSPDPTKSNNAGMGIVHATYKPEYQVLNQWSIPLGNHTAQMAEIAAVEFACKKALKIPGPVLVITDSFYVAESANKELPYWKSNGFVNNKKKPLKHISKWKSIAECLSMKPDITIQHEKGISLQIPVFILKGNALADKLATQGSYVVNAGKRTADGSEFEKRTADGSEFESPKKKAKVE

SEQ ID NO: 6557 - protein, 2096 aa, synthetic construct
MPAAKRVKLDGGDKKYSIGLDIGTNSVGWAVITDEYKVPSKKFKVLGNTDRHSIKKNLIGALLFDSGETAEATRLKRTARRRYTRRKNRICYLQEIFSNEMAKVDDSFFHRLEESFLVEEDKKHERHPIFGNIVDEVAYHEKYPTIYHLRKKLVDSTDKADLRLIYLALAHMIKFRGHFLIEGDLNPDNSDVDKLFIQLVQTYNQLFEENPINASGVDAKAILSARLSKSRRLENLIAQLPGEKKNGLFGNLIALSLGLTPNFKSNFDLAEDAKLQLSKDTYDDDLDNLLAQIGDQYADLFLAAKNLSDAILLSDILRVNTEITKAPLSASMIKRYDEHHQDLTLLKALVRQQLPEKYKEIFFDQSKNGYAGYIDGGASQEEFYKFIKPILEKMDGTEELLVKLNREDLLRKQRTFDNGSIPHQIHLGELHAILRRQEDFYPFLKDNREKIEKILTFRIPYYVGPLARGNSRFAWMTRKSEETITPWNFEEVVDKGASAQSFIERMTNFDKNLPNEKVLPKHSLLYEYFTVYNELTKVKYVTEGMRKPAFLSGEQKKAIVDLLFKTNRKVTVKQLKEDYFKKIECFDSVEISGVEDRFNASLGTYHDLLKIIKDKDFLDNEENEDILEDIVLTLTLFEDREMIEERLKTYAHLFDDKVMKQLKRRRYTGWGRLSRKLINGIRDKQSGKTILDFLKSDGFANRNFMQLIHDDSLTFKEDIQKAQVSGQGDSLHEHIANLAGSPAIKKGILQTVKVVDELVKVMGRHKPENIVIEMARENQTTQKGQKNSRERMKRIEEGIKELGSQILKEHPVENTQLQNEKLYLYYLQNGRDMYVDQELDINRLSDYDVDHIVPQSFLKDDSIDNKVLTRSDKARGKSDNVPSEEVVKKMKNYWRQLLNAKLITQRKFDNLTKAERGGLSELDKAGFIKRQLVETRQITKHVAQILDSRMNTKYDENDKLIREVKVITLKSKLVSDFRKDFQFYKVREINNYHHAHDAYLNAVVGTALIKKYPKLESEFVYGDYKVYDVRKMIAKSEQEIGKATAKYFFYSNIMNFFKTEITLANGEIRKRPLIETNGETGEIVWDKGRDFATVRKVLSMPQVNIVKKTEVQTGGFSKESILPKRNSDKLIARKKDWDPKKYGGFDSPTVAYSVLVVAKVEKGKSKKLKSVKELLGITIMERSSFEKNPIDFLEAKGYKEVKKDLIIKLPKYSLFELENGRKRMLASAGELQKGNELALPSKYVNFLYLASHYEKLKGSPEDNEQKQLFVEQHKHYLDEIIEQISEFSKRVILADANLDKVLSAYNKHRDKPIREQAENIIHLFTLTNLGAPAAFKYFDTTIDRKRYTSTKEVLDATLIHQSITGLYETRIDLSQLGGDGGPAPAPAPAPAPAPGGVLNLEEEYRLHEKPVPSSIDPSWLQLFPTVWAERAGMGLANQVPPVVVELRSGASPVAVRQYPMSKEAREGIRPHIQKFLDLGVLVPCRSPWNTPLLPVKKPGTNDYRPVQDLREINKRVQDIHPTVPNPYNLLSSLPPSYTWYSVLDLKDAFFCLRLHPNSQPLFAFEWKDPEKGNTGQLTWTRLPQGFKNSPTLFNEALHRDLAPFRALNPQVVLLQYVDDLLVAAPTYEDCKKGTQKLLQELSKLGYRVSAKKAQLCQREVTYLGYLLKEGKRWLTPARKATVMKIPVPTTPRQVREFLGTAGFCRLWIPGFASLAAPLYPLTKPSIPFIWTEEHQQAFDHIKKALLSAPALALPDLTKPFTLYIDERAGVARGVLTQTLGPWRRPVAYLSKKLDPVASGWPTCLKAVAAVALLLKDADKLTLGQNVTVIASHSLESIVRQPPDRWMTNARMTHYQSLLLNERVSFAPPAVLNPATLLPVESEATPVHRCSEILAEETGTRRDLEDQPLPGVPTWYTDGSSFITEGKRRAGAPIVDGKRTVWASSLPEGTSAQKAELVALTQALRLAEGKNINIYTDSRYAFATAHIHGAIYKQRGWLTSAGKDIKNKEEILALLEAIHLPRRVAIIHCPGHQRGSNPVATGNRRADEAAKQAALSTRVLAGTTKPAGKRTADGSEFEKRTADGSEFESPKKKAKVE

SEQ ID NO: 6558 - protein, 2096 aa, synthetic construct
MPAAKRVKLDGGDKKYSIGLDIGTNSVGWAVITDEYKVPSKKFKVLGNTDRHSIKKNLIGALLFDSGETAEATRLKRTARRRYTRRKNRICYLQEIFSNEMAKVDDSFFHRLEESFLVEEDKKHERHPIFGNIVDEVAYHEKYPTIYHLRKKLVDSTDKADLRLIYLALAHMIKFRGHFLIEGDLNPDNSDVDKLFIQLVQTYNQLFEENPINASGVDAKAILSARLSKSRRLENLIAQLPGEKKNGLFGNLIALSLGLTPNFKSNFDLAEDAKLQLSKDTYDDDLDNLLAQIGDQYADLFLAAKNLSDAILLSDILRVNTEITKAPLSASMIKRYDEHHQDLTLLKALVRQQLPEKYKEIFFDQSKNGYAGYIDGGASQEEFYKFIKPILEKMDGTEELLVKLNREDLLRKQRTFDNGSIPHQIHLGELHAILRRQEDFYPFLKDNREKIEKILTFRIPYYVGPLARGNSRFAWMTRKSEETITPWNFEEVVDKGASAQSFIERMTNFDKNLPNEKVLPKHSLLYEYFTVYNELTKVKYVTEGMRKPAFLSGEQKKAIVDLLFKTNRKVTVKQLKEDYFKKIECFDSVEISGVEDRFNASLGTYHDLLKIIKDKDFLDNEENEDILEDIVLTLTLFEDREMIEERLKTYAHLFDDKVMKQLKRRRYTGWGRLSRKLINGIRDKQSGKTILDFLKSDGFANRNFMQLIHDDSLTFKEDIQKAQVSGQGDSLHEHIANLAGSPAIKKGILQTVKVVDELVKVMGRHKPENIVIEMARENQTTQKGQKNSRERMKRIEEGIKELGSQILKEHPVENTQLQNEKLYLYYLQNGRDMYVDQELDINRLSDYDVDHIVPQSFLKDDSIDNKVLTRSDKARGKSDNVPSEEVVKKMKNYWRQLLNAKLITQRKFDNLTKAERGGLSELDKAGFIKRQLVETRQITKHVAQILDSRMNTKYDENDKLIREVKVITLKSKLVSDFRKDFQFYKVREINNYHHAHDAYLNAVVGTALIKKYPKLESEFVYGDYKVYDVRKMIAKSEQEIGKATAKYFFYSNIMNFFKTEITLANGEIRKRPLIETNGETGEIVWDKGRDFATVRKVLSMPQVNIVKKTEVQTGGFSKESILPKRNSDKLIARKKDWDPKKYGGFDSPTVAYSVLVVAKVEKGKSKKLKSVKELLGITIMERSSFEKNPIDFLEAKGYKEVKKDLIIKLPKYSLFELENGRKRMLASAGELQKGNELALPSKYVNFLYLASHYEKLKGSPEDNEQKQLFVEQHKHYLDEIIEQISEFSKRVILADANLDKVLSAYNKHRDKPIREQAENIIHLFTLTNLGAPAAFKYFDTTIDRKRYTSTKEVLDATLIHQSITGLYETRIDLSQLGGDGGPAPAPAPAPAPAPGGVLNLEEEYRLHEKPVPSSIDPSWLQLFPTVWAERAGMGLANQVPPVVVELRSGASPVAVRQYPMSKEAREGIRPHIQKFLDLGVLVPCRSPWNTPLLPVKKPGTNDYRPVQDLREINKRVQDIHPTVPNPYNLLSSLPPSYTWYSVLDLKDAFFCLRLHPNSQPLFAFEWKDPEKGNTGQLTWTRLPQGFKNSPTLFNEALHRDLAPFRALNPQVVLLQYVDDLLVAAPTYEDCKKGTQKLLQELSKLGYRVSAKKAQLCQREVTYLGYLLKEGKRWLTPARKATVMKIPVPTTPRQVREFLGKAGFCRLFIPGFASLAAPLYPLTKPSIPFIWTEEHQQAFDHIKKALLSAPALALPDLTKPFTLYIDERAGVARGVLTQTLGPWRRPVAYLSKKLDPVASGWPTCLKAVAAVALLLKDADKLTLGQNVTVIASHSLESIVRQPPDRWMTNARMTHYQSLLLNERVSFAPPAVLNPATLLPVESEATPVHRCSEILAEETGTRRDLEDQPLPGVPTWYTDGSSFITEGKRRAGAPIVDGKRTVWASSLPEGTSAQKAELVALTQALRLAEGKNINIYTDSRYAFATAHIHGAIYKQRGWLTSAGKDIKNKEEILALLEAIHLPRRVAIIHCPGHQRGSNPVATGNRRADEAAKQAALSTRVLAGTTKPAGKRTADGSEFEKRTADGSEFESPKKKAKVE

SEQ ID NO: 6559 - protein, 2129 aa, synthetic construct
MPAAKRVKLDGGDKKYSIGLDIGTNSVGWAVITDEYKVPSKKFKVLGNTDRHSIKKNLIGALLFDSGETAEATRLKRTARRRYTRRKNRICYLQEIFSNEMAKVDDSFFHRLEESFLVEEDKKHERHPIFGNIVDEVAYHEKYPTIYHLRKKLVDSTDKADLRLIYLALAHMIKFRGHFLIEGDLNPDNSDVDKLFIQLVQTYNQLFEENPINASGVDAKAILSARLSKSRRLENLIAQLPGEKKNGLFGNLIALSLGLTPNFKSNFDLAEDAKLQLSKDTYDDDLDNLLAQIGDQYADLFLAAKNLSDAILLSDILRVNTEITKAPLSASMIKRYDEHHQDLTLLKALVRQQLPEKYKEIFFDQSKNGYAGYIDGGASQEEFYKFIKPILEKMDGTEELLVKLNREDLLRKQRTFDNGSIPHQIHLGELHAILRRQEDFYPFLKDNREKIEKILTFRIPYYVGPLARGNSRFAWMTRKSEETITPWNFEEVVDKGASAQSFIERMTNFDKNLPNEKVLPKHSLLYEYFTVYNELTKVKYVTEGMRKPAFLSGEQKKAIVDLLFKTNRKVTVKQLKEDYFKKIECFDSVEISGVEDRFNASLGTYHDLLKIIKDKDFLDNEENEDILEDIVLTLTLFEDREMIEERLKTYAHLFDDKVMKQLKRRRYTGWGRLSRKLINGIRDKQSGKTILDFLKSDGFANRNFMQLIHDDSLTFKEDIQKAQVSGQGDSLHEHIANLAGSPAIKKGILQTVKVVDELVKVMGRHKPENIVIEMARENQTTQKGQKNSRERMKRIEEGIKELGSQILKEHPVENTQLQNEKLYLYYLQNGRDMYVDQELDINRLSDYDVDHIVPQSFLKDDSIDNKVLTRSDKARGKSDNVPSEEVVKKMKNYWRQLLNAKLITQRKFDNLTKAERGGLSELDKAGFIKRQLVETRQITKHVAQILDSRMNTKYDENDKLIREVKVITLKSKLVSDFRKDFQFYKVREINNYHHAHDAYLNAVVGTALIKKYPKLESEFVYGDYKVYDVRKMIAKSEQEIGKATAKYFFYSNIMNFFKTEITLANGEIRKRPLIETNGETGEIVWDKGRDFATVRKVLSMPQVNIVKKTEVQTGGFSKESILPKRNSDKLIARKKDWDPKKYGGFDSPTVAYSVLVVAKVEKGKSKKLKSVKELLGITIMERSSFEKNPIDFLEAKGYKEVKKDLIIKLPKYSLFELENGRKRMLASAGELQKGNELALPSKYVNFLYLASHYEKLKGSPEDNEQKQLFVEQHKHYLDEIIEQISEFSKRVILADANLDKVLSAYNKHRDKPIREQAENIIHLFTLTNLGAPAAFKYFDTTIDRKRYTSTKEVLDATLIHQSITGLYETRIDLSQLGGDGGPAPAPAPAPAPAPGGLLGRDLLTKLKAQIQFSTEGPQVTWEDRPAMCLVLNLEEEYRLHEKPVPPSIDPSWLQLFPMVWAEKAGMGLANQVPPVVVELKSDASPVAVRQYPMSKEAREGIRPHIQRFLDLGILVPCQSPWNTPLLPVKKPGTNDYRPVQDLREVNKRVQDIHPTVPNPYNLLSSLPPSHTWYSVLDLKDAFFCLKLHPNSQPLFAFEWRDPEKGNTGQLTWTRLPQGFKNSPTLFNEALHRDLASFRALNPQVVMLQYVDDLLVAAPTYRDCKEGTRRLLQELSKLGYRVSAKKAQLCREEVTYLGYLLKGGKRWLTPARKATVMKIPTPTTPRQVREFLGTAGFCRLWIPGFASLAAPLYPLTRPKVPFTWTEAHQEAFGRIKEALLSAPALALPDLTKPFALYVDEKEGVARGVLTQTLGPWRRPVAYLSKKLDPVASGWPTCLKAIAAVALLLKDADKLTLGQNVLVIAPHNLESIVRQPPDRWMTNARMTHYQSLLLNERVSFAPPAILNPATLLPVESDDTPIHICSEILAEETGTRPDLRDQPLPGVPAWYTDGSSFIMDGRRQAGAAIVDNKRTVWASNLPEGTSAQKAELIALTQALRLAEGKSINIYTDSRYAFATAHVHGAIYKQRGWLTSAGKDIKNKEEILALLEAIHLPKRVAIIHCPGHQRGTDPVATGNRKADEAAKQAAQSTRILTETTKNAGKRTADGSEFEKRTADGSEFESPKKKAKVE

SEQ ID NO: 6560 - protein, 2220 aa, synthetic construct
MPAAKRVKLDGGDKKYSIGLDIGTNSVGWAVITDEYKVPSKKFKVLGNTDRHSIKKNLIGALLFDSGETAEATRLKRTARRRYTRRKNRICYLQEIFSNEMAKVDDSFFHRLEESFLVEEDKKHERHPIFGNIVDEVAYHEKYPTIYHLRKKLVDSTDKADLRLIYLALAHMIKFRGHFLIEGDLNPDNSDVDKLFIQLVQTYNQLFEENPINASGVDAKAILSARLSKSRRLENLIAQLPGEKKNGLFGNLIALSLGLTPNFKSNFDLAEDAKLQLSKDTYDDDLDNLLAQIGDQYADLFLAAKNLSDAILLSDILRVNTEITKAPLSASMIKRYDEHHQDLTLLKALVRQQLPEKYKEIFFDQSKNGYAGYIDGGASQEEFYKFIKPILEKMDGTEELLVKLNREDLLRKQRTFDNGSIPHQIHLGELHAILRRQEDFYPFLKDNREKIEKILTFRIPYYVGPLARGNSRFAWMTRKSEETITPWNFEEVVDKGASAQSFIERMTNFDKNLPNEKVLPKHSLLYEYFTVYNELTKVKYVTEGMRKPAFLSGEQKKAIVDLLFKTNRKVTVKQLKEDYFKKIECFDSVEISGVEDRFNASLGTYHDLLKIIKDKDFLDNEENEDILEDIVLTLTLFEDREMIEERLKTYAHLFDDKVMKQLKRRRYTGWGRLSRKLINGIRDKQSGKTILDFLKSDGFANRNFMQLIHDDSLTFKEDIQKAQVSGQGDSLHEHIANLAGSPAIKKGILQTVKVVDELVKVMGRHKPENIVIEMARENQTTQKGQKNSRERMKRIEEGIKELGSQILKEHPVENTQLQNEKLYLYYLQNGRDMYVDQELDINRLSDYDVDHIVPQSFLKDDSIDNKVLTRSDKARGKSDNVPSEEVVKKMKNYWRQLLNAKLITQRKFDNLTKAERGGLSELDKAGFIKRQLVETRQITKHVAQILDSRMNTKYDENDKLIREVKVITLKSKLVSDFRKDFQFYKVREINNYHHAHDAYLNAVVGTALIKKYPKLESEFVYGDYKVYDVRKMIAKSEQEIGKATAKYFFYSNIMNFFKTEITLANGEIRKRPLIETNGETGEIVWDKGRDFATVRKVLSMPQVNIVKKTEVQTGGFSKESILPKRNSDKLIARKKDWDPKKYGGFDSPTVAYSVLVVAKVEKGKSKKLKSVKELLGITIMERSSFEKNPIDFLEAKGYKEVKKDLIIKLPKYSLFELENGRKRMLASAGELQKGNELALPSKYVNFLYLASHYEKLKGSPEDNEQKQLFVEQHKHYLDEIIEQISEFSKRVILADANLDKVLSAYNKHRDKPIREQAENIIHLFTLTNLGAPAAFKYFDTTIDRKRYTSTKEVLDATLIHQSITGLYETRIDLSQLGGDGGPAPAPAPAPAPAPGGTLGDQGSRGSDPLPEPRVTLTVEGIPTEFLVNTGAEHSVLTKPMGKMGSKRTVVAGATGSKVYPWTTKRLLKIGQKQVTHSFLVIPECPAPLLGRDLLTKLKAQIQFSTEGPQVTWEDRPAMCLVLNLEEEYRLHEKPVPPSIDPSWLQLFPMVWAEKAGMGLANQVPPVVVELKSDASPVAVRQYPMSKEAREGIRPHIQRFLDLGILVPCQSPWNTPLLPVKKPGTNDYRPVQDLREVNKRVQDIHPTVPNPYNLLSSLPPSHTWYSVLDLKDAFFCLKLHPNSQPLFAFEWRDPEKGNTGQLTWTRLPQGFKNSPTLFNEALHRDLASFRALNPQVVMLQYVDDLLVAAPTYRDCKEGTRRLLQELSKLGYRVSAKKAQLCREEVTYLGYLLKGGKRWLTPARKATVMKIPTPTTPRQVREFLGTAGFCRLWIPGFASLAAPLYPLTRPKVPFTWTEAHQEAFGRIKEALLSAPALALPDLTKPFALYVDEKEGVARGVLTQTLGPWRRPVAYLSKKLDPVASGWPTCLKAIAAVALLLKDADKLTLGQNVLVIAPHNLESIVRQPPDRWMTNARMTHYQSLLLNERVSFAPPAILNPATLLPVESDDTPIHICSEILAEETGTRPDLRDQPLPGVPAWYTDGSSFIMDGRRQAGAAIVDNKRTVWASNLPEGTSAQKAELIALTQALRLAEGKSINIYTDSRYAFATAHVHGAIYKQRGWLTSAGKDIKNKEEILALLEAIHLPKRVAIIHCPGHQRGTDPVATGNRKADEAAKQAAQSTRILTETTKNAGKRTADGSEFEKRTADGSEFESPKKKAKVE

SEQ ID NO: 6561 - protein, 2098 aa, synthetic construct
MPAAKRVKLDGGDKKYSIGLDIGTNSVGWAVITDEYKVPSKKFKVLGNTDRHSIKKNLIGALLFDSGETAEATRLKRTARRRYTRRKNRICYLQEIFSNEMAKVDDSFFHRLEESFLVEEDKKHERHPIFGNIVDEVAYHEKYPTIYHLRKKLVDSTDKADLRLIYLALAHMIKFRGHFLIEGDLNPDNSDVDKLFIQLVQTYNQLFEENPINASGVDAKAILSARLSKSRRLENLIAQLPGEKKNGLFGNLIALSLGLTPNFKSNFDLAEDAKLQLSKDTYDDDLDNLLAQIGDQYADLFLAAKNLSDAILLSDILRVNTEITKAPLSASMIKRYDEHHQDLTLLKALVRQQLPEKYKEIFFDQSKNGYAGYIDGGASQEEFYKFIKPILEKMDGTEELLVKLNREDLLRKQRTFDNGSIPHQIHLGELHAILRRQEDFYPFLKDNREKIEKILTFRIPYYVGPLARGNSRFAWMTRKSEETITPWNFEEVVDKGASAQSFIERMTNFDKNLPNEKVLPKHSLLYEYFTVYNELTKVKYVTEGMRKPAFLSGEQKKAIVDLLFKTNRKVTVKQLKEDYFKKIECFDSVEISGVEDRFNASLGTYHDLLKIIKDKDFLDNEENEDILEDIVLTLTLFEDREMIEERLKTYAHLFDDKVMKQLKRRRYTGWGRLSRKLINGIRDKQSGKTILDFLKSDGFANRNFMQLIHDDSLTFKEDIQKAQVSGQGDSLHEHIANLAGSPAIKKGILQTVKVVDELVKVMGRHKPENIVIEMARENQTTQKGQKNSRERMKRIEEGIKELGSQILKEHPVENTQLQNEKLYLYYLQNGRDMYVDQELDINRLSDYDVDHIVPQSFLKDDSIDNKVLTRSDKARGKSDNVPSEEVVKKMKNYWRQLLNAKLITQRKFDNLTKAERGGLSELDKAGFIKRQLVETRQITKHVAQILDSRMNTKYDENDKLIREVKVITLKSKLVSDFRKDFQFYKVREINNYHHAHDAYLNAVVGTALIKKYPKLESEFVYGDYKVYDVRKMIAKSEQEIGKATAKYFFYSNIMNFFKTEITLANGEIRKRPLIETNGETGEIVWDKGRDFATVRKVLSMPQVNIVKKTEVQTGGFSKESILPKRNSDKLIARKKDWDPKKYGGFDSPTVAYSVLVVAKVEKGKSKKLKSVKELLGITIMERSSFEKNPIDFLEAKGYKEVKKDLIIKLPKYSLFELENGRKRMLASAGELQKGNELALPSKYVNFLYLASHYEKLKGSPEDNEQKQLFVEQHKHYLDEIIEQISEFSKRVILADANLDKVLSAYNKHRDKPIREQAENIIHLFTLTNLGAPAAFKYFDTTIDRKRYTSTKEVLDATLIHQSITGLYETRIDLSQLGGDGGPAPAPAPAPAPAPGGTLNIEDEYRLHETSKEPDVSLGSTWLSDFPQAWAETGGMGLAVRQAPLIIPLKATSTPVSIKQYPMSQEARLGIKPHIQRLLDQGILVPCQSPWNTPLLPVKKPGTNDYRPVQDLREVNKRVEDIHPTVPNPYNLLSGLPPSHQWYTVLDLKDAFFCLRLHPTSQPLFAFEWRDPEMGISGQLTWTRLPQGFKNSPTLFNEALHRDLAGFRIQHPDLILLQYVDDLLLAATSELDCQQGTRALLQTLGDLGYRASAKKAQICQKQVKYLGYLLKEGQRWLTEARKETVMGQPIPKTPRQLREFLGTAGFCRLWIPGFAEMAAPLYPLTKPGTLFNWGPDQQKAFQEIKQALLTAPALGLPDLTKPFELFVDEKQGYAKGVLTQKLGPWRRPVAYLSKKLDPVAAGWPPCLRMVAAIAVLTKDAGKLTMGQPLVILAPHAVEALVKQPPDRWLSNARMTHYQALLLDTDRVQFGPVVALNPATLLPLPEEGLQHDCLDILAEAHGTRSDLMDQPLPDADHTWYTDGSSFLQEGQRKAGAAVTTETEVIWARALPAGTSAQRAELIALTQALKMAEGKKLNVYTDSRYAFATAHIHGEIYRRRGWLTSEGKEIKNKDEILALLKALFLPKRLSIIHCPGHQKGNSAEARGNRMADQAAREVATRETPETSTLLAGKRTADGSEFEKRTADGSEFESPKKKAKVE

SEQ ID NO: 6562 - protein, 2098 aa, synthetic construct
MPAAKRVKLDGGDKKYSIGLDIGTNSVGWAVITDEYKVPSKKFKVLGNTDRHSIKKNLIGALLFDSGETAEATRLKRTARRRYTRRKNRICYLQEIFSNEMAKVDDSFFHRLEESFLVEEDKKHERHPIFGNIVDEVAYHEKYPTIYHLRKKLVDSTDKADLRLIYLALAHMIKFRGHFLIEGDLNPDNSDVDKLFIQLVQTYNQLFEENPINASGVDAKAILSARLSKSRRLENLIAQLPGEKKNGLFGNLIALSLGLTPNFKSNFDLAEDAKLQLSKDTYDDDLDNLLAQIGDQYADLFLAAKNLSDAILLSDILRVNTEITKAPLSASMIKRYDEHHQDLTLLKALVRQQLPEKYKEIFFDQSKNGYAGYIDGGASQEEFYKFIKPILEKMDGTEELLVKLNREDLLRKQRTFDNGSIPHQIHLGELHAILRRQEDFYPFLKDNREKIEKILTFRIPYYVGPLARGNSRFAWMTRKSEETITPWNFEEVVDKGASAQSFIERMTNFDKNLPNEKVLPKHSLLYEYFTVYNELTKVKYVTEGMRKPAFLSGEQKKAIVDLLFKTNRKVTVKQLKEDYFKKIECFDSVEISGVEDRFNASLGTYHDLLKIIKDKDFLDNEENEDILEDIVLTLTLFEDREMIEERLKTYAHLFDDKVMKQLKRRRYTGWGRLSRKLINGIRDKQSGKTILDFLKSDGFANRNFMQLIHDDSLTFKEDIQKAQVSGQGDSLHEHIANLAGSPAIKKGILQTVKVVDELVKVMGRHKPENIVIEMARENQTTQKGQKNSRERMKRIEEGIKELGSQILKEHPVENTQLQNEKLYLYYLQNGRDMYVDQELDINRLSDYDVDHIVPQSFLKDDSIDNKVLTRSDKARGKSDNVPSEEVVKKMKNYWRQLLNAKLITQRKFDNLTKAERGGLSELDKAGFIKRQLVETRQITKHVAQILDSRMNTKYDENDKLIREVKVITLKSKLVSDFRKDFQFYKVREINNYHHAHDAYLNAVVGTALIKKYPKLESEFVYGDYKVYDVRKMIAKSEQEIGKATAKYFFYSNIMNFFKTEITLANGEIRKRPLIETNGETGEIVWDKGRDFATVRKVLSMPQVNIVKKTEVQTGGFSKESILPKRNSDKLIARKKDWDPKKYGGFDSPTVAYSVLVVAKVEKGKSKKLKSVKELLGITIMERSSFEKNPIDFLEAKGYKEVKKDLIIKLPKYSLFELENGRKRMLASAGELQKGNELALPSKYVNFLYLASHYEKLKGSPEDNEQKQLFVEQHKHYLDEIIEQISEFSKRVILADANLDKVLSAYNKHRDKPIREQAENIIHLFTLTNLGAPAAFKYFDTTIDRKRYTSTKEVLDATLIHQSITGLYETRIDLSQLGGDGGPAPAPAPAPAPAPGGTLNIEDEHRLHETSKEPDVSLGSTWLSDFPQAWAETGGMGLAVRQAPLIIPLKATSTPVSIKQYPMSQEARLGIKPHIQRLLDQGILVPCQSPWNTPLLPVKKPGTNDYRPVQDLREVNKRVEDIHPTVPNPYNLLSGLPPSHQWYTVLDLKDAFFCLRLHPTSQPLFAFEWRDPEMGISGQLTWTRLPQGFKNSPTLFDEALHRDLADFRIQHPDLILLQYVDDLLLAATSELDCQQGTRALLQTLGNLGYRASAKKAQICQKQVKYLGYLLKEGQRWLTEARKETVMGQPTPKTPRQLREFLGTAGFCRLWIPGFAEMAAPLYPLTKTGTLFNWGPDQQKAYQEIKQALLTAPALGLPDLTKPFELFVDEKQGYAKGVLTQKLGPWRRPVAYLSKKLDPVAAGWPPCLRMVAAIAVLTKDAGKLTMGQPLVILAPHAVEALVKQPPDRWLSNARMTHYQALLLDTDRVQFGPVVALNPATLLPLPEEGLQHNCLDILAEAHGTRPDLTDQPLPDADHTWYTDGSSLLQEGQRKAGAAVTTETEVIWAKALPAGTSAQRAELIALTQALKMAEGKKLNVYTDSRYAFATAHIHGEIYRRRGLLTSEGKEIKNKDEILALLKALFLPKRLSIIHCPGHQKGHSAEARGNRMADQAARKAAITETPDTSTLLAGKRTADGSEFEKRTADGSEFESPKKKAKVE

SEQ ID NO: 6563 - protein, 2098 aa, synthetic construct; identical to SEQ ID NO: 6562

SEQ ID NO: 6564 - protein, 2092 aa, synthetic construct
MPAAKRVKLDGGDKKYSIGLDIGTNSVGWAVITDEYKVPSKKFKVLGNTDRHSIKKNLIGALLFDSGETAEATRLKRTARRRYTRRKNRICYLQEIFSNEMAKVDDSFFHRLEESFLVEEDKKHERHPIFGNIVDEVAYHEKYPTIYHLRKKLVDSTDKADLRLIYLALAHMIKFRGHFLIEGDLNPDNSDVDKLFIQLVQTYNQLFEENPINASGVDAKAILSARLSKSRRLENLIAQLPGEKKNGLFGNLIALSLGLTPNFKSNFDLAEDAKLQLSKDTYDDDLDNLLAQIGDQYADLFLAAKNLSDAILLSDILRVNTEITKAPLSASMIKRYDEHHQDLTLLKALVRQQLPEKYKEIFFDQSKNGYAGYIDGGASQEEFYKFIKPILEKMDGTEELLVKLNREDLLRKQRTFDNGSIPHQIHLGELHAILRRQEDFYPFLKDNREKIEKILTFRIPYYVGPLARGNSRFAWMTRKSEETITPWNFEEVVDKGASAQSFIERMTNFDKNLPNEKVLPKHSLLYEYFTVYNELTKVKYVTEGMRKPAFLSGEQKKAIVDLLFKTNRKVTVKQLKEDYFKKIECFDSVEISGVEDRFNASLGTYHDLLKIIKDKDFLDNEENEDILEDIVLTLTLFEDREMIEERLKTYAHLFDDKVMKQLKRRRYTGWGRLSRKLINGIRDKQSGKTILDFLKSDGFANRNFMQLIHDDSLTFKEDIQKAQVSGQGDSLHEHIANLAGSPAIKKGILQTVKVVDELVKVMGRHKPENIVIEMARENQTTQKGQKNSRERMKRIEEGIKELGSQILKEHPVENTQLQNEKLYLYYLQNGRDMYVDQELDINRLSDYDVDHIVPQSFLKDDSIDNKVLTRSDKARGKSDNVPSEEVVKKMKNYWRQLLNAKLITQRKFDNLTKAERGGLSELDKAGFIKRQLVETRQITKHVAQILDSRMNTKYDENDKLIREVKVITLKSKLVSDFRKDFQFYKVREINNYHHAHDAYLNAVVGTALIKKYPKLESEFVYGDYKVYDVRKMIAKSEQEIGKATAKYFFYSNIMNFFKTEITLANGEIRKRPLIETNGETGEIVWDKGRDFATVRKVLSMPQVNIVKKTEVQTGGFSKESILPKRNSDKLIARKKDWDPKKYGGFDSPTVAYSVLVVAKVEKGKSKKLKSVKELLGITIMERSSFEKNPIDFLEAKGYKEVKKDLIIKLPKYSLFELENGRKRMLASAGELQKGNELALPSKYVNFLYLASHYEKLKGSPEDNEQKQLFVEQHKHYLDEIIEQISEFSKRVILADANLDKVLSAYNKHRDKPIREQAENIIHLFTLTNLGAPAAFKYFDTTIDRKRYTSTKEVLDATLIHQSITGLYETRIDLSQLGGDGGPAPAPAPAPAPAPGGTLQLDDEYRLYSPLVKPDQNIQFWLEQFPQAWAETAGMGLAKQVPPQVIQLKASATPVSVRQYPLSKEAQEGIRPHVQRLIQQGILVPVQSPWNTPLLPVRKPGTNDYRPVQDLREVNKRVQDIHPTVPNPYNLLCALPPQRSWYTVLDLKDAFFCLRLHPTSQPLFAFEWRDPGTGRTGQLTWTRLPQGFKNSPTIFDEALHRDLANFRIQHPQVTLLQYVDDLLLAGATKQDCLEGTKALLLELSDLGYRASAKKAQICRREVTYLGYSLRDGQRWLTEARKKTVVQIPAPTTAKQVREFLGTAGFCRLWIPGFATLAAPLYPLTKEKGEFSWAPEHQKAFDAIKKALLSAPALALPDVTKPFTLYVDERKGVARGVLTQTLGPWRRPVAYLSKKLDPVASGWPVCLKAIAAVAILVKDADKLTLGQNITVIAPHALENIVRQPPDRWMTNARMTHYQSLLLTERVTFAPPAALNPATLLPEETDEPVTHDCHQLLIEETGVRKDLTDIPLTGEVLTWFTDGSSYVVEGKRMAGAAVVDGTRTIWASSLPEGTSAQKAELMALTQALRLAEGKSINIYTDSRYAFATAHVHGAIYKQRGLLTSAGREIKNKEEILSLLEALHLPKRLAIIHCPGHQKAKDPISRGNQMADRVAKQAAQGVNLLAGKRTADGSEFEKRTADGSEFESPKKKAKVE

SEQ ID NO: 6565 - protein, 2092 aa, synthetic construct; identical to SEQ ID NO: 6564

SEQ ID NO: 6566 - protein, 2178 aa, synthetic construct
MPAAKRVKLDGGDKKYSIGLDIGTNSVGWAVITDEYKVPSKKFKVLGNTDRHSIKKNLIGALLFDSGETAEATRLKRTARRRYTRRKNRICYLQEIFSNEMAKVDDSFFHRLEESFLVEEDKKHERHPIFGNIVDEVAYHEKYPTIYHLRKKLVDSTDKADLRLIYLALAHMIKFRGHFLIEGDLNPDNSDVDKLFIQLVQTYNQLFEENPINASGVDAKAILSARLSKSRRLENLIAQLPGEKKNGLFGNLIALSLGLTPNFKSNFDLAEDAKLQLSKDTYDDDLDNLLAQIGDQYADLFLAAKNLSDAILLSDILRVNTEITKAPLSASMIKRYDEHHQDLTLLKALVRQQLPEKYKEIFFDQSKNGYAGYIDGGASQEEFYKFIKPILEKMDGTEELLVKLNREDLLRKQRTFDNGSIPHQIHLGELHAILRRQEDFYPFLKDNREKIEKILTFRIPYYVGPLARGNSRFAWMTRKSEETITPWNFEEVVDKGASAQSFIERMTNFDKNLPNEKVLPKHSLLYEYFTVYNELTKVKYVTEGMRKPAFLSGEQKKAIVDLLFKTNRKVTVKQLKEDYFKKIECFDSVEISGVEDRFNASLGTYHDLLKIIKDKDFLDNEENEDILEDIVLTLTLFEDREMIEERLKTYAHLFDDKVMKQLKRRRYTGWGRLSRKLINGIRDKQSGKTILDFLKSDGFANRNFMQLIHDDSLTFKEDIQKAQVSGQGDSLHEHIANLAGSPAIKKGILQTVKVVDELVKVMGRHKPENIVIEMARENQTTQKGQKNSRERMKRIEEGIKELGSQILKEHPVENTQLQNEKLYLYYLQNGRDMYVDQELDINRLSDYDVDHIVPQSFLKDDSIDNKVLTRSDKARGKSDNVPSEEVVKKMKNYWRQLLNAKLITQRKFDNLTKAERGGLSELDKAGFIKRQLVETRQITKHVAQILDSRMNTKYDENDKLIREVKVITLKSKLVSDFRKDFQFYKVREINNYHHAHDAYLNAVVGTALIKKYPKLESEFVYGDYKVYDVRKMIAKSEQEIGKATAKYFFYSNIMNFFKTEITLANGEIRKRPLIETNGETGEIVWDKGRDFATVRKVLSMPQVNIVKKTEVQTGGFSKESILPKRNSDKLIARKKDWDPKKYGGFDSPTVAYSVLVVAKVEKGKSKKLKSVKELLGITIMERSSFEKNPIDFLEAKGYKEVKKDLIIKLPKYSLFELENGRKRMLASAGELQKGNELALPSKYVNFLYLASHYEKLKGSPEDNEQKQLFVEQHKHYLDEIIEQISEFSKRVILADANLDKVLSAYNKHRDKPIREQAENIIHLFTLTNLGAPAAFKYFDTTIDRKRYTSTKEVLDATLIHQSITGLYETRIDLSQLGGDGGPAPAPAPAPAPAPGGMDPLQLLQPLEAEIKGTKLKAHWNSGATITCVPQAFLEEEVPIKNIWIKTIHGEKEQPVYYLTFKIQGRKVEAEVISSPYDYILVSPSDIPWLMKKPLQLTTLVPLQEYEERLLKQTMLTGSYKEKLQSLFLKYDALWQHWENQVGHRRIKPHHIATGTVNPRPQKQYPINPKAKASIQTVINDLLKQGVLIQQNSIMNTPVYPVPKPDGKWRMVLDYREVNKTIPLIAAQNQHSAGILSSIFRGKYKTTLDLSNGFWAHSITPESYWLTAFTWLGQQYCWTRLPQGFLNSPALFNADVVDLLKEVPNVQVYVDDIYISHDDPREHLEQLEKVFSLLLNAGYVVSLKKSEIAQHEVEFLGFNITKEGRGLTETFKQKLLNITPPRDLKQLQSILGLLNFARNFIPNFSELVKPLYNIIATAPGKYITWTTDNSQQLQNIISMLNSAENLEERNPEVRLIMKVNTSPSAGYIRFYNEFAKRPIMYLNYVYTKAEVKFTNTEKLLTTIHKGLIKALDLGMGQEILVYSPIVSMTKIQKTPLPERKALPIRWITWMSYLEDPRIQFHYDKTLPELQQVPTVTDDIIAKIKHPSEFSMVFYTDGSAIKHPNVNKSHNAGMGIAQVQFKPEFTVINTWSIPLGDHTAQLAEVAAVEFACKKALKIDGPVLIVTDSFYVAESVNKELPYWQSNGFFNNKKKPLKHVSKWKSIADCIQLKPDIIIIHEKGHQPTASTFHTEGNNLADKLATQGSYVVNAGKRTADGSEFEKRTADGSEFESPKKKAKVE

SEQ ID NO: 6567 - protein, 2096 aa, synthetic construct; identical to SEQ ID NO: 4509

SEQ ID NO: 6568 - protein, 2098 aa, synthetic construct; identical to SEQ ID NO: 4510

SEQ ID NO: 6569 - protein, 2093 aa, synthetic construct
MPAAKRVKLDGGDKKYSIGLDIGTNSVGWAVITDEYKVPSKKFKVLGNTDRHSIKKNLIGALLFDSGETAEATRLKRTARRRYTRRKNRICYLQEIFSNEMAKVDDSFFHRLEESFLVEEDKKHERHPIFGNIVDEVAYHEKYPTIYHLRKKLVDSTDKADLRLIYLALAHMIKFRGHFLIEGDLNPDNSDVDKLFIQLVQTYNQLFEENPINASGVDAKAILSARLSKSRRLENLIAQLPGEKKNGLFGNLIALSLGLTPNFKSNFDLAEDAKLQLSKDTYDDDLDNLLAQIGDQYADLFLAAKNLSDAILLSDILRVNTEITKAPLSASMIKRYDEHHQDLTLLKALVRQQLPEKYKEIFFDQSKNGYAGYIDGGASQEEFYKFIKPILEKMDGTEELLVKLNREDLLRKQRTFDNGSIPHQIHLGELHAILRRQEDFYPFLKDNREKIEKILTFRIPYYVGPLARGNSRFAWMTRKSEETITPWNFEEVVDKGASAQSFIERMTNFDKNLPNEKVLPKHSLLYEYFTVYNELTKVKYVTEGMRKPAFLSGEQKKAIVDLLFKTNRKVTVKQLKEDYFKKIECFDSVEISGVEDRFNASLGTYHDLLKIIKDKDFLDNEENEDILEDIVLTLTLFEDREMIEERLKTYAHLFDDKVMKQLKRRRYTGWGRLSRKLINGIRDKQSGKTILDFLKSDGFANRNFMQLIHDDSLTFKEDIQKAQVSGQGDSLHEHIANLAGSPAIKKGILQTVKVVDELVKVMGRHKPENIVIEMARENQTTQKGQKNSRERMKRIEEGIKELGSQILKEHPVENTQLQNEKLYLYYLQNGRDMYVDQELDINRLSDYDVDHIVPQSFLKDDSIDNKVLTRSDKARGKSDNVPSEEVVKKMKNYWRQLLNAKLITQRKFDNLTKAERGGLSELDKAGFIKRQLVETRQITKHVAQILDSRMNTKYDENDKLIREVKVITLKSKLVSDFRKDFQFYKVREINNYHHAHDAYLNAVVGTALIKKYPKLESEFVYGDYKVYDVRKMIAKSEQEIGKATAKYFFYSNIMNFFKTEITLANGEIRKRPLIETNGETGEIVWDKGRDFATVRKVLSMPQVNIVKKTEVQTGGFSKESILPKRNSDKLIARKKDWDPKKYGGFDSPTVAYSVLVVAKVEKGKSKKLKSVKELLGITIMERSSFEKNPIDFLEAKGYKEVKKDLIIKLPKYSLFELENGRKRMLASAGELQKGNELALPSKYVNFLYLASHYEKLKGSPEDNEQKQLFVEQHKHYLDEIIEQISEFSKRVILADANLDKVLSAYNKHRDKPIREQAENIIHLFTLTNLGAPAAFKYFDTTIDRKRYTSTKEVLDATLIHQSITGLYETRIDLSQLGGDGGGGSGGGGGTAPLEEEYRLFLEAPIQNVTLLEQWKREIPKVWAEINPPGLASTQAPIHVQLLSTALPVRVRQYPITLEAKRSLRETIRKFRAAGILRPVHSPWNTPLLPVRKSGTSEYRMVQDLREVNKRVETIHPTVPNPYTLLSLLPPDRIWYSVLDLKDAFFCIPLAPESQLIFAFEWADAEEGESGQLTWTRLPQGFKNSPTLFNEALNRDLQGFRLDHPSVSLLQYVDDLLIAADTQAACLSATRDLLMTLAELGYRVSGKKAQLCQEEVTYLGFKIHKGSRSLSNSRTQAILQIPVPKTKRQVREFLGTIGYCRLWIPGFAELAQPLYAATRPGNDPLVWGEKEEEAFQSLKLALTQPPALALPSLDKPFQLFVEETSGAAKGVLTQALGPWKRPVAYLSKRLDPVAAGWPRCLRAIAAAALLTREASKLTFGQDIEITSSHNLESLLRSPPDKWLTNARITQYQVLLLDPPRVRFKQTAALNPATLLPETDDTLPIHHCLDTLDSLTSTRPDLTDQPLAQAEATLFTDGSSYIRDGKRYAGAAVVTLDSVIWAEPLPIGTSAQKAELIALTKALEWSKDKSVNIYTDSRYAFATLHVHGMIYRERGWLTAGGKAIKNAPEILALLTAVWLPKRVAVMHCKGHQKDDAPTSTGNRRADEVAREVAIRPLSTQATISAGKRTADGSEFEKRTADGSEFESPKKKAKVE

SEQ ID NO: 6570 - protein, 2082 aa, synthetic construct
MPAAKRVKLDGGDKKYSIGLDIGTNSVGWAVITDEYKVPSKKFKVLGNTDRHSIKKNLIGALLFDSGETAEATRLKRTARRRYTRRKNRICYLQEIFSNEMAKVDDSFFHRLEESFLVEEDKKHERHPIFGNIVDEVAYHEKYPTIYHLRKKLVDSTDKADLRLIYLALAHMIKFRGHFLIEGDLNPDNSDVDKLFIQLVQTYNQLFEENPINASGVDAKAILSARLSKSRRLENLIAQLPGEKKNGLFGNLIALSLGLTPNFKSNFDLAEDAKLQLSKDTYDDDLDNLLAQIGDQYADLFLAAKNLSDAILLSDILRVNTEITKAPLSASMIKRYDEHHQDLTLLKALVRQQLPEKYKEIFFDQSKNGYAGYIDGGASQEEFYKFIKPILEKMDGTEELLVKLNREDLLRKQRTFDNGSIPHQIHLGELHAILRRQEDFYPFLKDNREKIEKILTFRIPYYVGPLARGNSRFAWMTRKSEETITPWNFEEVVDKGASAQSFIERMTNFDKNLPNEKVLPKHSLLYEYFTVYNELTKVKYVTEGMRKPAFLSGEQKKAIVDLLFKTNRKVTVKQLKEDYFKKIECFDSVEISGVEDRFNASLGTYHDLLKIIKDKDFLDNEENEDILEDIVLTLTLFEDREMIEERLKTYAHLFDDKVMKQLKRRRYTGWGRLSRKLINGIRDKQSGKTILDFLKSDGFANRNFMQLIHDDSLTFKEDIQKAQVSGQGDSLHEHIANLAGSPAIKKGILQTVKVVDELVKVMGRHKPENIVIEMARENQTTQKGQKNSRERMKRIEEGIKELGSQILKEHPVENTQLQNEKLYLYYLQNGRDMYVDQELDINRLSDYDVDHIVPQSFLKDDSIDNKVLTRSDKARGKSDNVPSEEVVKKMKNYWRQLLNAKLITQRKFDNLTKAERGGLSELDKAGFIKRQLVETRQITKHVAQILDSRMNTKYDENDKLIREVKVITLKSKLVSDFRKDFQFYKVREINNYHHAHDAYLNAVVGTALIKKYPKLESEFVYGDYKVYDVRKMIAKSEQEIGKATAKYFFYSNIMNFFKTEITLANGEIRKRPLIETNGETGEIVWDKGRDFATVRKVLSMPQVNIVKKTEVQTGGFSKESILPKRNSDKLIARKKDWDPKKYGGFDSPTVAYSVLVVAKVEKGKSKKLKSVKELLGITIMERSSFEKNPIDFLEAKGYKEVKKDLIIKLPKYSLFELENGRKRMLASAGELQKGNELALPSKYVNFLYLASHYEKLKGSPEDNEQKQLFVEQHKHYLDEIIEQISEFSKRVILADANLDKVLSAYNKHRDKPIREQAENIIHLFTLTNLGAPAAFKYFDTTIDRKRYTSTKEVLDATLIHQSITGLYETRIDLSQLGGDGGGGSGGGGGVPWILKKPLELTIKLDLEEQQGTLLNNSILSKKGKEELKQLFEKYSALWQSWENQVGHRRIRPHKIATGTVKPTPQKQYHINPKAKPDIQIVINDLLKQGVLIQKESTMNTPVYPVPKPNGRWRMVLDYRAVNKVTPLIAVQNQHSYGILGSLFKGRYKTTIDLSNGFWAHPIVPEDYWITAFTWQGKQYCWTVLPQGFLNSPGLFTGDVVDLLQGIPNVEVYVDDVYISHDSEKEHLEYLDILFNRLKEAGYIISLKKSNIANSIVDFLGFQITNEGRGLTDTFKEKLENITAPTTLKQLQSILGLLNFARNFIPDFTELIAPLYALIPKSTKNYVPWQIEHSTTLETLITKLNGAEYLQGRKGDKTLIMKVNASYTTGYIRYYNEGEKKPISYVSIVFSKTELKFTELEKLLTTVHKGLLKALDLSMGQNIHVYSPIVSMQNIQKTPQTAKKALASRWLSWLSYLEDPRIRFFYDPQMPALKDLPAVDTGKDNKKHPSNFQHIFYTDGSAITSPTKEGHLNAGMGIVYFINKDGNLQKQQEWSISLGNHTAQFAEIAAFEFALKKCLPLGGNILVVTDSNYVAKAYNEELDVWASNGFVNNRKKPLKHISKWKSVADLKRLRPDVVVTHEPGHQKLDSSPHAYGNNLADQLATQASFKVHAGKRTADGSEFEKRTADGSEFESPKKKAKVE

SEQ ID NO: 6571 - protein, 2082 aa, synthetic construct
MPAAKRVKLDGGDKKYSIGLDIGTNSVGWAVITDEYKVPSKKFKVLGNTDRHSIKKNLIGALLFDSGETAEATRLKRTARRRYTRRKNRICYLQEIFSNEMAKVDDSFFHRLEESFLVEEDKKHERHPIFGNIVDEVAYHEKYPTIYHLRKKLVDSTDKADLRLIYLALAHMIKFRGHFLIEGDLNPDNSDVDKLFIQLVQTYNQLFEENPINASGVDAKAILSARLSKSRRLENLIAQLPGEKKNGLFGNLIALSLGLTPNFKSNFDLAEDAKLQLSKDTYDDDLDNLLAQIGDQYADLFLAAKNLSDAILLSDILRVNTEITKAPLSASMIKRYDEHHQDLTLLKALVRQQLPEKYKEIFFDQSKNGYAGYIDGGASQEEFYKFIKPILEKMDGTEELLVKLNREDLLRKQRTFDNGSIPHQIHLGELHAILRRQEDFYPFLKDNREKIEKILTFRIPYYVGPLARGNSRFAWMTRKSEETITPWNFEEVVDKGASAQSFIERMTNFDKNLPNEKVLPKHSLLYEYFTVYNELTKVKYVTEGMRKPAFLSGEQKKAIVDLLFKTNRKVTVKQLKEDYFKKIECFDSVEISGVEDRFNASLGTYHDLLKIIKDKDFLDNEENEDILEDIVLTLTLFEDREMIEERLKTYAHLFDDKVMKQLKRRRYTGWGRLSRKLINGIRDKQSGKTILDFLKSDGFANRNFMQLIHDDSLTFKEDIQKAQVSGQGDSLHEHIANLAGSPAIKKGILQTVKVVDELVKVMGRHKPENIVIEMARENQTTQKGQKNSRERMKRIEEGIKELGSQILKEHPVENTQLQNEKLYLYYLQNGRDMYVDQELDINRLSDYDVDHIVPQSFLKDDSIDNKVLTRSDKARGKSDNVPSEEVVKKMKNYWRQLLNAKLITQRKFDNLTKAERGGLSELDKAGFIKRQLVETRQITKHVAQILDSRMNTKYDENDKLIREVKVITLKSKLVSDFRKDFQFYKVREINNYHHAHDAYLNAVVGTALIKKYPKLESEFVYGDYKVYDVRKMIAKSEQEIGKATAKYFFYSNIMNFFKTEITLANGEIRKRPLIETNGETGEIVWDKGRDFATVRKVLSMPQVNIVKKTEVQTGGFSKESILPKRNSDKLIARKKDWDPKKYGGFDSPTVAYSVLVVAKVEKGKSKKLKSVKELLGITIMERSSFEKNPIDFLEAKGYKEVKKDLIIKLPKYSLFELENGRKRMLASAGELQKGNELALPSKYVNFLYLASHYEKLKGSPEDNEQKQLFVEQHKHYLDEIIEQISEFSKRVILADANLDKVLSAYNKHRDKPIREQAENIIHLFTLTNLGAPAAFKYFDTTIDRKRYTSTKEVLDATLIHQSITGLYETRIDLSQLGGDGGGGSGGGGGVPWILKKPLELTIKLDLEEQQGTLLNNSILSKKGKEELKQLFEKYSALWQSWENQVGHRRIRPHKIATGTVKPTPQKQYHINPKAKPDIQIVINDLLKQGVLIQKESTMNTPVYPVPKPNGRWRMVLDYRAVNKVTPLIAVQNQHSYGILGSLFKGRYKTTIDLSNGFWAHPIVPEDYWITAFTWQGKQYCWTVLPQGFLNSPGLFNGDVVDLLQGIPNVEVYVDDVYISHDSEKEHLEYLDILFNRLKEAGYIISLKKSNIANSIVDFLGFQITNEGRGLTDTFKEKLENITAPTTLKQLQSILGLLNFARNFIPDFTELIAPLYALIPKSPKNYVPWQIEHSTTLETLITKLNGAEYLQGRKGDKTLIMKVNASYTTGYIRYYNEGEKKPISYVSIVFSKTELKFTELEKLLTTVHKGLLKALDLSMGQNIHVYSPIVSMQNIQKTPQTAKKALASRWLSWLSYLEDPRIRFFYDPQMPALKDLPAVDTGKDNKKHPSNFQHIFYTDGSAITSPTKEGHLNAGMGIVYFINKDGNLQKQQEWSISLGNHTAQFAEIAAFEFALKKCLPLGGNILVVTDSNYVAKAYNEELDVWASNGFVNNRKKPLKHISKWKSVADLKRLRPDVVVTHEPGHQKLDSSPHAYGNNLADQLATQASFKVHAGKRTADGSEFEKRTADGSEFESPKKKAKVE

SEQ ID NO: 6572 - protein, 2090 aa, synthetic construct
MPAAKRVKLDGGDKKYSIGLDIGTNSVGWAVITDEYKVPSKKFKVLGNTDRHSIKKNLIGALLFDSGETAEATRLKRTARRRYTRRKNRICYLQEIFSNEMAKVDDSFFHRLEESFLVEEDKKHERHPIFGNIVDEVAYHEKYPTIYHLRKKLVDSTDKADLRLIYLALAHMIKFRGHFLIEGDLNPDNSDVDKLFIQLVQTYNQLFEENPINASGVDAKAILSARLSKSRRLENLIAQLPGEKKNGLFGNLIALSLGLTPNFKSNFDLAEDAKLQLSKDTYDDDLDNLLAQIGDQYADLFLAAKNLSDAILLSDILRVNTEITKAPLSASMIKRYDEHHQDLTLLKALVRQQLPEKYKEIFFDQSKNGYAGYIDGGASQEEFYKFIKPILEKMDGTEELLVKLNREDLLRKQRTFDNGSIPHQIHLGELHAILRRQEDFYPFLKDNREKIEKILTFRIPYYVGPLARGNSRFAWMTRKSEETITPWNFEEVVDKGASAQSFIERMTNFDKNLPNEKVLPKHSLLYEYFTVYNELTKVKYVTEGMRKPAFLSGEQKKAIVDLLFKTNRKVTVKQLKEDYFKKIECFDSVEISGVEDRFNASLGTYHDLLKIIKDKDFLDNEENEDILEDIVLTLTLFEDREMIEERLKTYAHLFDDKVMKQLKRRRYTGWGRLSRKLINGIRDKQSGKTILDFLKSDGFANRNFMQLIHDDSLTFKEDIQKAQVSGQGDSLHEHIANLAGSPAIKKGILQTVKVVDELVKVMGRHKPENIVIEMARENQTTQKGQKNSRERMKRIEEGIKELGSQILKEHPVENTQLQNEKLYLYYLQNGRDMYVDQELDINRLSDYDVDHIVPQSFLKDDSIDNKVLTRSDKARGKSDNVPSEEVVKKMKNYWRQLLNAKLITQRKFDNLTKAERGGLSELDKAGFIKRQLVETRQITKHVAQILDSRMNTKYDENDKLIREVKVITLKSKLVSDFRKDFQFYKVREINNYHHAHDAYLNAVVGTALIKKYPKLESEFVYGDYKVYDVRKMIAKSEQEIGKATAKYFFYSNIMNFFKTEITLANGEIRKRPLIETNGETGEIVWDKGRDFATVRKVLSMPQVNIVKKTEVQTGGFSKESILPKRNSDKLIARKKDWDPKKYGGFDSPTVAYSVLVVAKVEKGKSKKLKSVKELLGITIMERSSFEKNPIDFLEAKGYKEVKKDLIIKLPKYSLFELENGRKRMLASAGELQKGNELALPSKYVNFLYLASHYEKLKGSPEDNEQKQLFVEQHKHYLDEIIEQISEFSKRVILADANLDKVLSAYNKHRDKPIREQAENIIHLFTLTNLGAPAAFKYFDTTIDRKRYTSTKEVLDATLIHQSITGLYETRIDLSQLGGDGGGGSGGGGGTLQLEEEYRLFEPESTQKQEMDIWLKNFPQAWAETGGMGTAHCQAPVLIQLKATATPISIRQYPMPHEAYQGIKPHIRRMLDQGILKPCQSPWNTPLLPVKKPGTEDYRPVQDLREVNKRVEDIHPTVPNPYNLLSTLPPSHPWYTVLDLKDAFFCLRLHSESQLLFAFEWRDPEIGLSGQLTWTRLPQGFKNSPTLFNEALHSDLADFRVRYPALVLLQYVDDLLLAAATRTECLEGTKALLETLGNKGYRASAKKAQICLQEVTYLGYSLKDGQRWLTKARKEAILSIPVPKNSRQVREFLGKAGYCRLFIPGFAELAAPLYPLTRPGTLFQWGTEQQLAFEDIKKALLSSPALGLPDITKPFELFIDENSGFAKGVLVQKLGPWKRPVAYLSKKLDTVASGWPPCLRMVAAIAILVKDAGKLTLGQPLTILTSHPVEALVRQPPNKWLSNARMTHYQAMLLDAERVHFGPTVSLNPATLLPLPSGGNHHDCLQILAETHGTRPDLTDQPLPDADLTWYTDGSSFIRNGEREAGAAVTTESEVIWAAPLPPGTSAQRAELIALTQALKMAEGKKLTVYTDSRYAFATTHVHGEIYRRRGWLTSEGKEIKNKNEILALLEALFLPKRLSIIHCPGHQKGDSPQAKGNRLADDTAKKAATETHSSLTVLPAGKRTADGSEFEKRTADGSEFESPKKKAKVE

SEQ ID NO: 6573 - protein, 2082 aa, synthetic construct
MPAAKRVKLDGGDKKYSIGLDIGTNSVGWAVITDEYKVPSKKFKVLGNTDRHSIKKNLIGALLFDSGETAEATRLKRTARRRYTRRKNRICYLQEIFSNEMAKVDDSFFHRLEESFLVEEDKKHERHPIFGNIVDEVAYHEKYPTIYHLRKKLVDSTDKADLRLIYLALAHMIKFRGHFLIEGDLNPDNSDVDKLFIQLVQTYNQLFEENPINASGVDAKAILSARLSKSRRLENLIAQLPGEKKNGLFGNLIALSLGLTPNFKSNFDLAEDAKLQLSKDTYDDDLDNLLAQIGDQYADLFLAAKNLSDAILLSDILRVNTEITKAPLSASMIKRYDEHHQDLTLLKALVRQQLPEKYKEIFFDQSKNGYAGYIDGGASQEEFYKFIKPILEKMDGTEELLVKLNREDLLRKQRTFDNGSIPHQIHLGELHAILRRQEDFYPFLKDNREKIEKILTFRIPYYVGPLARGNSRFAWMTRKSEETITPWNFEEVVDKGASAQSFIERMTNFDKNLPNEKVLPKHSLLYEYFTVYNELTKVKYVTEGMRKPAFLSGEQKKAIVDLLFKTNRKVTVKQLKEDYFKKIECFDSVEISGVEDRFNASLGTYHDLLKIIKDKDFLDNEENEDILEDIVLTLTLFEDREMIEERLKTYAHLFDDKVMKQLKRRRYTGWGRLSRKLINGIRDKQSGKTILDFLKSDGFANRNFMQLIHDDSLTFKEDIQKAQVSGQGDSLHEHIANLAGSPAIKKGILQTVKVVDELVKVMGRHKPENIVIEMARENQTTQKGQKNSRERMKRIEEGIKELGSQILKEHPVENTQLQNEKLYLYYLQNGRDMYVDQELDINRLSDYDVDHIVPQSFLKDDSIDNKVLTRSDKARGKSDNVPSEEVVKKMKNYWRQLLNAKLITQRKFDNLTKAERGGLSELDKAGFIKRQLVETRQITKHVAQILDSRMNTKYDENDKLIREVKVITLKSKLVSDFRKDFQFYKVREINNYHHAHDAYLNAVVGTALIKKYPKLESEFVYGDYKVYDVRKMIAKSEQEIGKATAKYFFYSNIMNFFKTEITLANGEIRKRPLIETNGETGEIVWDKGRDFATVRKVLSMPQVNIVKKTEVQTGGFSKESILPKRNSDKLIARKKDWDPKKYGGFDSPTVAYSVLVVAKVEKGKSKKLKSVKELLGITIMERSSFEKNPIDFLEAKGYKEVKKDLIIKLPKYSLFELENGRKRMLASAGELQKGNELALPSKYVNFLYLASHYEKLKGSPEDNEQKQLFVEQHKHYLDEIIEQISEFSKRVILADANLDKVLSAYNKHRDKPIREQAENIIHLFTLTNLGAPAAFKYFDTTIDRKRYTSTKEVLDATLIHQSITGLYETRIDLSQLGGDGGGGSGGGGGVPWLTQQPLQLTILVPLQEYQEKILSKTALPEDQKQQLKTLFVKYDNLWQHWENQVGHRKIRPHNIATGDYPPRPQKQYPINPKAKPSIQIVIDDLLKQGVLTPQNSTMNTPVYPVPKPDGRWRMVLDYREVNKTIPLTAAQNQHSAGILATIVRQKYKTTLDLANGFWAHPITPESYWLTAFTWQGKQYCWTRLPQGFLNSPALFNADVVDLLKEIPNVQVYVDDIYLSHDDPKEHVQQLEKVFQILLQAGYVVSLKKSEIGQKTVEFLGFNITKEGRGLTDTFKTKLLNITPPKDLKQLQSILGLLNFARNFIPNFAELVQPLYNLIAPAKGKYIEWSEENTKQLNMVIEALNTASNLEERLPEQRLVIKVNTSPSAGYVRYYNETGKKPIMYLNYVFSKAELKFSMLEKLLTTMHKALIKAMDLAMGQEILVYSPIVSMTKIQKTPLPERKALPIRWITWMTYLEDPRIQFHYDKTLPELKHIPDVYTSSQSPVKHPSQYEGVFYTDGSAIKSPDPTKSNNAGMGIVHATYKPEYQVLNQWSIPLGNHTAQMAEIAAVEFACKKALKIPGPVLVITDSFYVAESANKELPYWKSNGFVNNKKKPLKHISKWKSIAECLSMKPDITIQHEKGISLQIPVFILKGNALADKLATQGSYVVNAGKRTADGSEFEKRTADGSEFESPKKKAKVE

SEQ ID NO: 6574 - protein, 2171 aa, synthetic construct
MPAAKRVKLDGGDKKYSIGLDIGTNSVGWAVITDEYKVPSKKFKVLGNTDRHSIKKNLIGALLFDSGETAEATRLKRTARRRYTRRKNRICYLQEIFSNEMAKVDDSFFHRLEESFLVEEDKKHERHPIFGNIVDEVAYHEKYPTIYHLRKKLVDSTDKADLRLIYLALAHMIKFRGHFLIEGDLNPDNSDVDKLFIQLVQTYNQLFEENPINASGVDAKAILSARLSKSRRLENLIAQLPGEKKNGLFGNLIALSLGLTPNFKSNFDLAEDAKLQLSKDTYDDDLDNLLAQIGDQYADLFLAAKNLSDAILLSDILRVNTEITKAPLSASMIKRYDEHHQDLTLLKALVRQQLPEKYKEIFFDQSKNGYAGYIDGGASQEEFYKFIKPILEKMDGTEELLVKLNREDLLRKQRTFDNGSIPHQIHLGELHAILRRQEDFYPFLKDNREKIEKILTFRIPYYVGPLARGNSRFAWMTRKSEETITPWNFEEVVDKGASAQSFIERMTNFDKNLPNEKVLPKHSLLYEYFTVYNELTKVKYVTEGMRKPAFLSGEQKKAIVDLLFKTNRKVTVKQLKEDYFKKIECFDSVEISGVEDRFNASLGTYHDLLKIIKDKDFLDNEENEDILEDIVLTLTLFEDREMIEERLKTYAHLFDDKVMKQLKRRRYTGWGRLSRKLINGIRDKQSGKTILDFLKSDGFANRNFMQLIHDDSLTFKEDIQKAQVSGQGDSLHEHIANLAGSPAIKKGILQTVKVVDELVKVMGRHKPENIVIEMARENQTTQKGQKNSRERMKRIEEGIKELGSQILKEHPVENTQLQNEKLYLYYLQNGRDMYVDQELDINRLSDYDVDHIVPQSFLKDDSIDNKVLTRSDKARGKSDNVPSEEVVKKMKNYWRQLLNAKLITQRKFDNLTKAERGGLSELDKAGFIKRQLVETRQITKHVAQILDSRMNTKYDENDKLIREVKVITLKSKLVSDFRKDFQFYKVREINNYHHAHDAYLNAVVGTALIKKYPKLESEFVYGDYKVYDVRKMIAKSEQEIGKATAKYFFYSNIMNFFKTEITLANGEIRKRPLIETNGETGEIVWDKGRDFATVRKVLSMPQVNIVKKTEVQTGGFSKESILPKRNSDKLIARKKDWDPKKYGGFDSPTVAYSVLVVAKVEKGKSKKLKSVKELLGITIMERSSFEKNPIDFLEAKGYKEVKKDLIIKLPKYSLFELENGRKRMLASAGELQKGNELALPSKYVNFLYLASHYEKLKGSPEDNEQKQLFVEQHKHYLDEIIEQISEFSKRVILADANLDKVLSAYNKHRDKPIREQAENIIHLFTLTNLGAPAAFKYFDTTIDRKRYTSTKEVLDATLIHQSITGLYETRIDLSQLGGDGGGGSGGGGGMNPLQLLQPLPAEIKGTKLLAHWNSGATITCIPESFLEDEQPIKKTLIKTIHGEKQQNVYYVTFKVKGRKVEAEVIASPYEYILLSPTDVPWLTQQPLQLTILVPLQEYQEKILSKTALPEDQKQQLKTLFVKYDNLWQHWENQVGHRKIRPHNIATGDYPPRPQKQYPINPKAKPSIQIVIDDLLKQGVLTPQNSTMNTPVYPVPKPDGRWRMVLDYREVNKTIPLTAAQNQHSAGILATIVRQKYKTTLDLANGFWAHPITPESYWLTAFTWQGKQYCWTRLPQGFLNSPALFNADVVDLLKEIPNVQVYVDDIYLSHDDPKEHVQQLEKVFQILLQAGYVVSLKKSEIGQKTVEFLGFNITKEGRGLTDTFKTKLLNITPPKDLKQLQSILGKLNFARNFIPNFAELVQPLYNLIAPAKGKYIEWSEENTKQLNMVIEALNTASNLEERLPEQRLVIKVNTSPSAGYVRYYNETGKKPIMYLNYVFSKAELKFSMLEKLLTTMHKALIKAMDLAMGQEILVYSPIVSMTKIQKTPLPERKALPIRWITWMTYLEDPRIQFHYDKTLPELKHIPDVYTSSQSPVKHPSQYEGVFYTDGSAIKSPDPTKSNNAGMGIVHATYKPEYQVLNQWSIPLGNHTAQMAEIAAVEFACKKALKIPGPVLVITDSFYVAESANKELPYWKSNGFVNNKKKPLKHISKWKSIAECLSMKPDITIQHEKGISLQIPVFILKGNALADKLATQGSYVVNAGKRTADGSEFEKRTADGSEFESPKKKAKVE

SEQ ID NO: 6575 - protein, 2213 aa, synthetic construct
MPAAKRVKLDGGDKKYSIGLDIGTNSVGWAVITDEYKVPSKKFKVLGNTDRHSIKKNLIGALLFDSGETAEATRLKRTARRRYTRRKNRICYLQEIFSNEMAKVDDSFFHRLEESFLVEEDKKHERHPIFGNIVDEVAYHEKYPTIYHLRKKLVDSTDKADLRLIYLALAHMIKFRGHFLIEGDLNPDNSDVDKLFIQLVQTYNQLFEENPINASGVDAKAILSARLSKSRRLENLIAQLPGEKKNGLFGNLIALSLGLTPNFKSNFDLAEDAKLQLSKDTYDDDLDNLLAQIGDQYADLFLAAKNLSDAILLSDILRVNTEITKAPLSASMIKRYDEHHQDLTLLKALVRQQLPEKYKEIFFDQSKNGYAGYIDGGASQEEFYKFIKPILEKMDGTEELLVKLNREDLLRKQRTFDNGSIPHQIHLGELHAILRRQEDFYPFLKDNREKIEKILTFRIPYYVGPLARGNSRFAWMTRKSEETITPWNFEEVVDKGASAQSFIERMTNFDKNLPNEKVLPKHSLLYEYFTVYNELTKVKYVTEGMRKPAFLSGEQKKAIVDLLFKTNRKVTVKQLKEDYFKKIECFDSVEISGVEDRFNASLGTYHDLLKIIKDKDFLDNEENEDILEDIVLTLTLFEDREMIEERLKTYAHLFDDKVMKQLKRRRYTGWGRLSRKLINGIRDKQSGKTILDFLKSDGFANRNFMQLIHDDSLTFKEDIQKAQVSGQGDSLHEHIANLAGSPAIKKGILQTVKVVDELVKVMGRHKPENIVIEMARENQTTQKGQKNSRERMKRIEEGIKELGSQILKEHPVENTQLQNEKLYLYYLQNGRDMYVDQELDINRLSDYDVDHIVPQSFLKDDSIDNKVLTRSDKARGKSDNVPSEEVVKKMKNYWRQLLNAKLITQRKFDNLTKAERGGLSELDKAGFIKRQLVETRQITKHVAQILDSRMNTKYDENDKLIREVKVITLKSKLVSDFRKDFQFYKVREINNYHHAHDAYLNAVVGTALIKKYPKLESEFVYGDYKVYDVRKMIAKSEQEIGKATAKYFFYSNIMNFFKTEITLANGEIRKRPLIETNGETGEIVWDKGRDFATVRKVLSMPQVNIVKKTEVQTGGFSKESILPKRNSDKLIARKKDWDPKKYGGFDSPTVAYSVLVVAKVEKGKSKKLKSVKELLGITIMERSSFEKNPIDFLEAKGYKEVKKDLIIKLPKYSLFELENGRKRMLASAGELQKGNELALPSKYVNFLYLASHYEKLKGSPEDNEQKQLFVEQHKHYLDEIIEQISEFSKRVILADANLDKVLSAYNKHRDKPIREQAENIIHLFTLTNLGAPAAFKYFDTTIDRKRYTSTKEVLDATLIHQSITGLYETRIDLSQLGGDGGGGSGGGGGTLGDQGSRGSDPLPEPRVTLTVEGIPTEFLVNTGAEHSVLTKPMGKMGSKRTVVAGATGSKVYPWTTKRLLKIGQKQVTHSFLVIPECPAPLLGRDLLTKLKAQIQFSTEGPQVTWEDRPAMCLVLNLEEEYRLHEKPVPPSIDPSWLQLFPMVWAEKAGMGLANQVPPVVVELKSDASPVAVRQYPMSKEAREGIRPHIQRFLDLGILVPCQSPWNTPLLPVKKPGTNDYRPVQDLREVNKRVQDIHPTVPNPYNLLSSLPPSHTWYSVLDLKDAFFCLKLHPNSQPLFAFEWRDPEKGNTGQLTWTRLPQGFKNSPTLFNEALHRDLASFRALNPQVVMLQYVDDLLVAAPTYRDCKEGTRRLLQELSKLGYRVSAKKAQLCREEVTYLGYLLKGGKRWLTPARKATVMKIPTPTTPRQVREFLGKAGFCRLFIPGFASLAAPLYPLTRPKVPFTWTEAHQEAFGRIKEALLSAPALALPDLTKPFALYVDEKEGVARGVLTQTLGPWRRPVAYLSKKLDPVASGWPTCLKAIAAVALLLKDADKLTLGQNVLVIAPHNLESIVRQPPDRWMTNARMTHYQSLLLNERVSFAPPAILNPATLLPVESDDTPIHICSEILAEETGTRPDLRDQPLPGVPAWYTDGSSFIMDGRRQAGAAIVDNKRTVWASNLPEGTSAQKAELIALTQALRLAEGKSINIYTDSRYAFATAHVHGAIYKQRGWLTSAGKDIKNKEEILALLEAIHLPKRVAIIHCPGHQRGTDPVATGNRKADEAAKQAAQSTRILTETTKNAGKRTADGSEFEKRTADGSEFESPKKKAKVE

SEQ ID NO: 6576 - protein, 2091 aa, synthetic construct
MPAAKRVKLDGGDKKYSIGLDIGTNSVGWAVITDEYKVPSKKFKVLGNTDRHSIKKNLIGALLFDSGETAEATRLKRTARRRYTRRKNRICYLQEIFSNEMAKVDDSFFHRLEESFLVEEDKKHERHPIFGNIVDEVAYHEKYPTIYHLRKKLVDSTDKADLRLIYLALAHMIKFRGHFLIEGDLNPDNSDVDKLFIQLVQTYNQLFEENPINASGVDAKAILSARLSKSRRLENLIAQLPGEKKNGLFGNLIALSLGLTPNFKSNFDLAEDAKLQLSKDTYDDDLDNLLAQIGDQYADLFLAAKNLSDAILLSDILRVNTEITKAPLSASMIKRYDEHHQDLTLLKALVRQQLPEKYKEIFFDQSKNGYAGYIDGGASQEEFYKFIKPILEKMDGTEELLVKLNREDLLRKQRTFDNGSIPHQIHLGELHAILRRQEDFYPFLKDNREKIEKILTFRIPYYVGPLARGNSRFAWMTRKSEETITPWNFEEVVDKGASAQSFIERMTNFDKNLPNEKVLPKHSLLYEYFTVYNELTKVKYVTEGMRKPAFLSGEQKKAIVDLLFKTNRKVTVKQLKEDYFKKIECFDSVEISGVEDRFNASLGTYHDLLKIIKDKDFLDNEENEDILEDIVLTLTLFEDREMIEERLKTYAHLFDDKVMKQLKRRRYTGWGRLSRKLINGIRDKQSGKTILDFLKSDGFANRNFMQLIHDDSLTFKEDIQKAQVSGQGDSLHEHIANLAGSPAIKKGILQTVKVVDELVKVMGRHKPENIVIEMARENQTTQKGQKNSRERMKRIEEGIKELGSQILKEHPVENTQLQNEKLYLYYLQNGRDMYVDQELDINRLSDYDVDHIVPQSFLKDDSIDNKVLTRSDKARGKSDNVPSEEVVKKMKNYWRQLLNAKLITQRKFDNLTKAERGGLSELDKAGFIKRQLVETRQITKHVAQILDSRMNTKYDENDKLIREVKVITLKSKLVSDFRKDFQFYKVREINNYHHAHDAYLNAVVGTALIKKYPKLESEFVYGDYKVYDVRKMIAKSEQEIGKATAKYFFYSNIMNFFKTEITLANGEIRKRPLIETNGETGEIVWDKGRDFATVRKVLSMPQVNIVKKTEVQTGGFSKESILPKRNSDKLIARKKDWDPKKYGGFDSPTVAYSVLVVAKVEKGKSKKLKSVKELLGITIMERSSFEKNPIDFLEAKGYKEVKKDLIIKLPKYSLFELENGRKRMLASAGELQKGNELALPSKYVNFLYLASHYEKLKGSPEDNEQKQLFVEQHKHYLDEIIEQISEFSKRVILADANLDKVLSAYNKHRDKPIREQAENIIHLFTLTNLGAPAAFKYFDTTIDRKRYTSTKEVLDATLIHQSITGLYETRIDLSQLGGDGGGGSGGGGGTLNLEDEYRLYETSAEPEVSPGSTWLSDFPQAWAETGGMGLAVRQAPLIIPLKATSTPVSIKQYPMSQEAKLGIKPHIQRLLDQGILVPCQSPWNTPLLPVKKPGTNDYRPVQDLREVNKRVEDIHPTVPNPYNLLSGLPPSHRWYTVLDLKDAFFCLRLHPTSQPLFAFEWRDPGMGISGQLTWTRLPQGFKNSPTLFNEALHRDLADFRIQHPDLILLQYVDDILLAATSELDCQQGTRALLLTLGNLGYRASAKKAQLCQKQVKYLGYLLKEGQRWLTEARKETVMGQPTPKTPRQLREFLGTAGFCRLWIPGFAEMAAPLYPLTKPGTLFNWGPDQQKAYQEIKQALLTAPALGLPDLTKPFELFVDEKQGYAKGVLTQKLGPWRRPVAYLSKKLDPVAAGWPPCLRMVAAIAVLRKDAGKLTMGQPLVILAPHAVEALVKQPPDRWLSNARMTHYQAMLLDTDRVQFGPVVALNPATLLPLPEEGAPHDCLEILAETHGTRPDLTDQPIPDADHTWYTDGSSFLQEGQRKAGAAVTTETEVIWARALPAGTSAQRAELIALTQALKMAEGKRLNVYTDSRYAFATAHIHGEIYRRRGWLTSEGREIKNKSEILALLKALFLPKRLSIIHCLGHQKGDSAEARGNRLADQAAREAAIKTPPDTSTLLAGKRTADGSEFEKRTADGSEFESPKKKAKVE

SEQ ID NO: 6577 - protein, 2091 aa, synthetic construct
MPAAKRVKLDGGDKKYSIGLDIGTNSVGWAVITDEYKVPSKKFKVLGNTDRHSIKKNLIGALLFDSGETAEATRLKRTARRRYTRRKNRICYLQEIFSNEMAKVDDSFFHRLEESFLVEEDKKHERHPIFGNIVDEVAYHEKYPTIYHLRKKLVDSTDKADLRLIYLALAHMIKFRGHFLIEGDLNPDNSDVDKLFIQLVQTYNQLFEENPINASGVDAKAILSARLSKSRRLENLIAQLPGEKKNGLFGNLIALSLGLTPNFKSNFDLAEDAKLQLSKDTYDDDLDNLLAQIGDQYADLFLAAKNLSDAILLSDILRVNTEITKAPLSASMIKRYDEHHQDLTLLKALVRQQLPEKYKEIFFDQSKNGYAGYIDGGASQEEFYKFIKPILEKMDGTEELLVKLNREDLLRKQRTFDNGSIPHQIHLGELHAILRRQEDFYPFLKDNREKIEKILTFRIPYYVGPLARGNSRFAWMTRKSEETITPWNFEEVVDKGASAQSFIERMTNFDKNLPNEKVLPKHSLLYEYFTVYNELTKVKYVTEGMRKPAFLSGEQKKAIVDLLFKTNRKVTVKQLKEDYFKKIECFDSVEISGVEDRFNASLGTYHDLLKIIKDKDFLDNEENEDILEDIVLTLTLFEDREMIEERLKTYAHLFDDKVMKQLKRRRYTGWGRLSRKLINGIRDKQSGKTILDFLKSDGFANRNFMQLIHDDSLTFKEDIQKAQVSGQGDSLHEHIANLAGSPAIKKGILQTVKVVDELVKVMGRHKPENIVIEMARENQTTQKGQKNSRERMKRIEEGIKELGSQILKEHPVENTQLQNEKLYLYYLQNGRDMYVDQELDINRLSDYDVDHIVPQSFLKDDSIDNKVLTRSDKARGKSDNVPSEEVVKKMKNYWRQLLNAKLITQRKFDNLTKAERGGLSELDKAGFIKRQLVETRQITKHVAQILDSRMNTKYDENDKLIREVKVITLKSKLVSDFRKDFQFYKVREINNYHHAHDAYLNAVVGTALIKKYPKLESEFVYGDYKVYDVRKMIAKSEQEIGKATAKYFFYSNIMNFFKTEITLANGEIRKRPLIETNGETGEIVWDKGRDFATVRKVLSMPQVNIVKKTEVQTGGFSKESILPKRNSDKLIARKKDWDPKKYGGFDSPTVAYSVLVVAKVEKGKSKKLKSVKELLGITIMERSSFEKNPIDFLEAKGYKEVKKDLIIKLPKYSLFELENGRKRMLASAGELQKGNELALPSKYVNFLYLASHYEKLKGSPEDNEQKQLFVEQHKHYLDEIIEQISEFSKRVILADANLDKVLSAYNKHRDKPIREQAENIIHLFTLTNLGAPAAFKYFDTTIDRKRYTSTKEVLDATLIHQSITGLYETRIDLSQLGGDGGGGSGGGGGTLGIEDEYRLHETSTEPDVSLGSTWLSDFPQAWAETGGMGLAVRQAPLIIPLKATSTPVSIQQYPMSHEARLGIKPHIQRLLDQGILVPCQSPWNTPLLPVKKPGTNDYRPVQDLREVNKRVEDIHPTVPNPYNLLSGLPPSHQWYTVLDLKDAFFCLRLHPTSQPLFAFEWRDPGMGISGQLTWTRLPQGFKNSPTLFNEALHRDLADFRIQHPDLILLQYVDDILLAATSELDCQQGTRALLQTLGDLGYRASAKKAQICQKQVKYLGYLLREGQRWLTEARKETVMGQPVPKTPRQLREFLGTAGFCRLWIPGFAEMAAPLYPLTKPGTLFSWGPDQQKAYQEIKQALLTAPALGLPDLTKPFELFVDEKQGYAKGVLTQKLGPWRRPVAYLSKKLDPVAAGWPPCLRMVAAIAVLTKDAGKLTMGQPLVILAPHAVEALVKQPPDRWLSNARMTHYQAMLLDTDRVQFGPVVALNPATLLPLPEEGAPHDCLEILAETHGTRPDLTDQPIPDADHTWYTDGSSFLQEGQRKAGAAVTTETEVIWAGALPAGTSAQRAELIALTQALKMAEGKRLNVYTDSRYAFATAHIHGEIYRRRGWLTSEGREIKNKSEILALLKALFLPKRLSIIHCLGHQKGDSAEARGNRLADQAAREAAIKTPPDTSTLLAGKRTADGSEFEKRTADGSEFESPKKKAKVE

SEQ ID NO: 6578 - protein, 2091 aa, synthetic construct
MPAAKRVKLDGGDKKYSIGLDIGTNSVGWAVITDEYKVPSKKFKVLGNTDRHSIKKNLIGALLFDSGETAEATRLKRTARRRYTRRKNRICYLQEIFSNEMAKVDDSFFHRLEESFLVEEDKKHERHPIFGNIVDEVAYHEKYPTIYHLRKKLVDSTDKADLRLIYLALAHMIKFRGHFLIEGDLNPDNSDVDKLFIQLVQTYNQLFEENPINASGVDAKAILSARLSKSRRLENLIAQLPGEKKNGLFGNLIALSLGLTPNFKSNFDLAEDAKLQLSKDTYDDDLDNLLAQIGDQYADLFLAAKNLSDAILLSDILRVNTEITKAPLSASMIKRYDEHHQDLTLLKALVRQQLPEKYKEIFFDQSKNGYAGYIDGGASQEEFYKFIKPILEKMDGTEELLVKLNREDLLRKQRTFDNGSIPHQIHLGELHAILRRQEDFYPFLKDNREKIEKILTFRIPYYVGPLARGNSRFAWMTRKSEETITPWNFEEVVDKGASAQSFIERMTNFDKNLPNEKVLPKHSLLYEYFTVYNELTKVKYVTEGMRKPAFLSGEQKKAIVDLLFKTNRKVTVKQLKEDYFKKIECFDSVEISGVEDRFNASLGTYHDLLKIIKDKDFLDNEENEDILEDIVLTLTLFEDREMIEERLKTYAHLFDDKVMKQLKRRRYTGWGRLSRKLINGIRDKQSGKTILDFLKSDGFANRNFMQLIHDDSLTFKEDIQKAQVSGQGDSLHEHIANLAGSPAIKKGILQTVKVVDELVKVMGRHKPENIVIEMARENQTTQKGQKNSRERMKRIEEGIKELGSQILKEHPVENTQLQNEKLYLYYLQNGRDMYVDQELDINRLSDYDVDHIVPQSFLKDDSIDNKVLTRSDKARGKSDNVPSEEVVKKMKNYWRQLLNAKLITQRKFDNLTKAERGGLSELDKAGFIKRQLVETRQITKHVAQILDSRMNTKYDENDKLIREVKVITLKSKLVSDFRKDFQFYKVREINNYHHAHDAYLNAVVGTALIKKYPKLESEFVYGDYKVYDVRKMIAKSEQEIGKATAKYFFYSNIMNFFKTEITLANGEIRKRPLIETNGETGEIVWDKGRDFATVRKVLSMPQVNIVKKTEVQTGGFSKESILPKRNSDKLIARKKDWDPKKYGGFDSPTVAYSVLVVAKVEKGKSKKLKSVKELLGITIMERSSFEKNPIDFLEAKGYKEVKKDLIIKLPKYSLFELENGRKRMLASAGELQKGNELALPSKYVNFLYLASHYEKLKGSPEDNEQKQLFVEQHKHYLDEIIEQISEFSKRVILADANLDKVLSAYNKHRDKPIREQAENIIHLFTLTNLGAPAAFKYFDTTIDRKRYTSTKEVLDATLIHQSITGLYETRIDLSQLGGDGGGGSGGGGGTLNIEDEHRLHETSKEPDVSLGSTWLSDFPQAWAETGGMGLAVRQAPLIIPLKATSTPVSIKQYPMSQEARLGIKPHIQRLLDQGILVPCQSPWNTPLLPVKKPGTNDYRPVQDLREVNKRVEDIHPTVPNPYNLLSGLPPSHQWYTVLDLKDAFFCLRLHPTSQPLFAFEWRDPEMGISGQLTWTRLPQGFKNSPTLFNEALHRDLADFRIQHPDLILLQYVDDLLLAATSELDCQQGTRALLQTLGNLGYRASAKKAQICQKQVKYLGYLLKEGQRWLTEARKETVMGQPTPKTPRQLREFLGTAGFCRLWIPGFAEMAAPLYPLTKPGTLFNWGPDQQKAYQEIKQALLTAPALGLPDLTKPFELFVDEKQGYAKGVLTQKLGPWRRPVAYLSKKLDPVAAGWPPCLRMVAAIAVLTKDAGKLTMGQPLVILAPHAVEALVKQPPDRWLSNARMTHYQALLLDTDRVQFGPVVALNPATLLPLPEEGLQHNCLDILAEAHGTRPDLTDQPLPDADHTWYTDGSSLLQEGQRKAGAAVTTETEVIWAKALPAGTSAQRAELIALTQALKMAEGKKLNVYTDSRYAFATAHIHGEIYRRRGWLTSEGKEIKNKDEILALLKALFLPKRLSIIHCPGHQKGHSAEARGNRMADQAARKAAITETPDTSTLLAGKRTADGSEFEKRTADGSEFESPKKKAKVE

SEQ ID NO: 6579 - protein, 2091 aa, synthetic construct; identical to SEQ ID NO: 6578

SEQ ID NO: 6580 - protein, 2082 aa, synthetic construct
MPAAKRVKLDGGDKKYSIGLDIGTNSVGWAVITDEYKVPSKKFKVLGNTDRHSIKKNLIGALLFDSGETAEATRLKRTARRRYTRRKNRICYLQEIFSNEMAKVDDSFFHRLEESFLVEEDKKHERHPIFGNIVDEVAYHEKYPTIYHLRKKLVDSTDKADLRLIYLALAHMIKFRGHFLIEGDLNPDNSDVDKLFIQLVQTYNQLFEENPINASGVDAKAILSARLSKSRRLENLIAQLPGEKKNGLFGNLIALSLGLTPNFKSNFDLAEDAKLQLSKDTYDDDLDNLLAQIGDQYADLFLAAKNLSDAILLSDILRVNTEITKAPLSASMIKRYDEHHQDLTLLKALVRQQLPEKYKEIFFDQSKNGYAGYIDGGASQEEFYKFIKPILEKMDGTEELLVKLNREDLLRKQRTFDNGSIPHQIHLGELHAILRRQEDFYPFLKDNREKIEKILTFRIPYYVGPLARGNSRFAWMTRKSEETITPWNFEEVVDKGASAQSFIERMTNFDKNLPNEKVLPKHSLLYEYFTVYNELTKVKYVTEGMRKPAFLSGEQKKAIVDLLFKTNRKVTVKQLKEDYFKKIECFDSVEISGVEDRFNASLGTYHDLLKIIKDKDFLDNEENEDILEDIVLTLTLFEDREMIEERLKTYAHLFDDKVMKQLKRRRYTGWGRLSRKLINGIRDKQSGKTILDFLKSDGFANRNFMQLIHDDSLTFKEDIQKAQVSGQGDSLHEHIANLAGSPAIKKGILQTVKVVDELVKVMGRHKPENIVIEMARENQTTQKGQKNSRERMKRIEEGIKELGSQILKEHPVENTQLQNEKLYLYYLQNGRDMYVDQELDINRLSDYDVDHIVPQSFLKDDSIDNKVLTRSDKARGKSDNVPSEEVVKKMKNYWRQLLNAKLITQRKFDNLTKAERGGLSELDKAGFIKRQLVETRQITKHVAQILDSRMNTKYDENDKLIREVKVITLKSKLVSDFRKDFQFYKVREINNYHHAHDAYLNAVVGTALIKKYPKLESEFVYGDYKVYDVRKMIAKSEQEIGKATAKYFFYSNIMNFFKTEITLANGEIRKRPLIETNGETGEIVWDKGRDFATVRKVLSMPQVNIVKKTEVQTGGFSKESILPKRNSDKLIARKKDWDPKKYGGFDSPTVAYSVLVVAKVEKGKSKKLKSVKELLGITIMERSSFEKNPIDFLEAKGYKEVKKDLIIKLPKYSLFELENGRKRMLASAGELQKGNELALPSKYVNFLYLASHYEKLKGSPEDNEQKQLFVEQHKHYLDEIIEQISEFSKRVILADANLDKVLSAYNKHRDKPIREQAENIIHLFTLTNLGAPAAFKYFDTTIDRKRYTSTKEVLDATLIHQSITGLYETRIDLSQLGGDGGGGSGGGGGIPWLMKKPLQLTTLVPLQEYEERLLKQTMLTGSYKEKLQSLFLKYDALWQHWENQVGHRRIKPHHIATGTVNPRPQKQYPINPKAKASIQTVINDLLKQGVLIQQNSIMNTPVYPVPKPDGKWRMVLDYREVNKTIPLIAAQNQHSAGILSSIFRGKYKTTLDLSNGFWAHSITPESYWLTAFTWLGQQYCWTRLPQGFLNSPALFNADVVDLLKEVPNVQVYVDDIYISHDDPREHLEQLEKVFSLLLNAGYVVSLKKSEIAQHEVEFLGFNITKEGRGLTETFKQKLLNITPPRDLKQLQSILGLLNFARNFIPNFSELVKPLYNIIATAPGKYITWTTDNSQQLQNIISMLNSAENLEERNPEVRLIMKVNTSPSAGYIRFYNEFAKRPIMYLNYVYTKAEVKFTNTEKLLTTIHKGLIKALDLGMGQEILVYSPIVSMTKIQKTPLPERKALPIRWITWMSYLEDPRIQFHYDKTLPELQQVPTVTDDIIAKIKHPSEFSMVFYTDGSAIKHPNVNKSHNAGMGIAQVQFKPEFTVINTWSIPLGDHTAQLAEVAAVEFACKKALKIDGPVLIVTDSFYVAESVNKELPYWQSNGFFNNKKKPLKHVSKWKSIADCIQLKPDIIIIHEKGHQPTASTFHTEGNNLADKLATQGSYVVNAGKRTADGSEFEKRTADGSEFESPKKKAKVE

SEQ ID NO: 6581 - protein, 2089 aa, synthetic construct
MPAAKRVKLDGGDKKYSIGLDIGTNSVGWAVITDEYKVPSKKFKVLGNTDRHSIKKNLIGALLFDSGETAEATRLKRTARRRYTRRKNRICYLQEIFSNEMAKVDDSFFHRLEESFLVEEDKKHERHPIFGNIVDEVAYHEKYPTIYHLRKKLVDSTDKADLRLIYLALAHMIKFRGHFLIEGDLNPDNSDVDKLFIQLVQTYNQLFEENPINASGVDAKAILSARLSKSRRLENLIAQLPGEKKNGLFGNLIALSLGLTPNFKSNFDLAEDAKLQLSKDTYDDDLDNLLAQIGDQYADLFLAAKNLSDAILLSDILRVNTEITKAPLSASMIKRYDEHHQDLTLLKALVRQQLPEKYKEIFFDQSKNGYAGYIDGGASQEEFYKFIKPILEKMDGTEELLVKLNREDLLRKQRTFDNGSIPHQIHLGELHAILRRQEDFYPFLKDNREKIEKILTFRIPYYVGPLARGNSRFAWMTRKSEETITPWNFEEVVDKGASAQSFIERMTNFDKNLPNEKVLPKHSLLYEYFTVYNELTKVKYVTEGMRKPAFLSGEQKKAIVDLLFKTNRKVTVKQLKEDYFKKIECFDSVEISGVEDRFNASLGTYHDLLKIIKDKDFLDNEENEDILEDIVLTLTLFEDREMIEERLKTYAHLFDDKVMKQLKRRRYTGWGRLSRKLINGIRDKQSGKTILDFLKSDGFANRNFMQLIHDDSLTFKEDIQKAQVSGQGDSLHEHIANLAGSPAIKKGILQTVKVVDELVKVMGRHKPENIVIEMARENQTTQKGQKNSRERMKRIEEGIKELGSQILKEHPVENTQLQNEKLYLYYLQNGRDMYVDQELDINRLSDYDVDHIVPQSFLKDDSIDNKVLTRSDKARGKSDNVPSEEVVKKMKNYWRQLLNAKLITQRKFDNLTKAERGGLSELDKAGFIKRQLVETRQITKHVAQILDSRMNTKYDENDKLIREVKVITLKSKLVSDFRKDFQFYKVREINNYHHAHDAYLNAVVGTALIKKYPKLESEFVYGDYKVYDVRKMIAKSEQEIGKATAKYFFYSNIMNFFKTEITLANGEIRKRPLIETNGETGEIVWDKGRDFATVRKVLSMPQVNIVKKTEVQTGGFSKESILPKRNSDKLIARKKDWDPKKYGGFDSPTVAYSVLVVAKVEKGKSKKLKSVKELLGITIMERSSFEKNPIDFLEAKGYKEVKKDLIIKLPKYSLFELENGRKRMLASAGELQKGNELALPSKYVNFLYLASHYEKLKGSPEDNEQKQLFVEQHKHYLDEIIEQISEFSKRVILADANLDKVLSAYNKHRDKPIREQAENIIHLFTLTNLGAPAAFKYFDTTIDRKRYTSTKEVLDATLIHQSITGLYETRIDLSQLGGDGGGGSGGGGGVLNLEEEYRLHEKPVPSSIDPSWLQLFPTVWAERAGMGLANQVPPVVVELRSGASPVAVRQYPMSKEAREGIRPHIQRFLDLGVLVPCQSPWNTPLLPVKKPGTNDYRPVQDLREINKRVQDIHPTVPNPYNLLSSLPPSHTWYSVLDLKDAFFCLKLHPNSQPLFAFEWRDPEKGNTGQLTWTRLPQGFKNSPTLFNEALHRDLAPFRALNPQVVLLQYVDDLLVAAPTYRDCKEGTQKLLQELSKLGYRVSAKKAQLCQKEVTYLGYLLKEGKRWLTPARKATVMKIPPPTTPRQVREFLGKAGFCRLFIPGFASLAAPLYPLTKPSIPFIWTEEHQKAFDRIKEALLSAPALALPDLTKPFTLYVDERAGVARGVLTQTLGPWRRPVAYLSKKLDPVASGWPTCLKAVAAVALLLKDADKLTLGQNVTVIASHSLESIVRQPPDRWMTNARMTHYQSLLLNERVSFAPPAVLNPATLLPVESEATPVHRCSEILAEETGTRRDLKDQPLPGVPAWYTDGSSFIAEGKRRAGAAIVDGKRTVWASSLPEGTSAQKAELVALTQALRLAEGKDINIYTDSRYAFATAHIHGAIYKQRGWLTSAGKDIKNKEEILALLEAIHLPKRVAIIHCPGHQKGNDPVATGNRRADEAAKQAALSTRVLAETTKPAGKRTADGSEFEKRTADGSEFESPKKKAKVE

SEQ ID NO: 6582 - protein, 2091 aa, synthetic construct
MPAAKRVKLDGGDKKYSIGLDIGTNSVGWAVITDEYKVPSKKFKVLGNTDRHSIKKNLIGALLFDSGETAEATRLKRTARRRYTRRKNRICYLQEIFSNEMAKVDDSFFHRLEESFLVEEDKKHERHPIFGNIVDEVAYHEKYPTIYHLRKKLVDSTDKADLRLIYLALAHMIKFRGHFLIEGDLNPDNSDVDKLFIQLVQTYNQLFEENPINASGVDAKAILSARLSKSRRLENLIAQLPGEKKNGLFGNLIALSLGLTPNFKSNFDLAEDAKLQLSKDTYDDDLDNLLAQIGDQYADLFLAAKNLSDAILLSDILRVNTEITKAPLSASMIKRYDEHHQDLTLLKALVRQQLPEKYKEIFFDQSKNGYAGYIDGGASQEEFYKFIKPILEKMDGTEELLVKLNREDLLRKQRTFDNGSIPHQIHLGELHAILRRQEDFYPFLKDNREKIEKILTFRIPYYVGPLARGNSRFAWMTRKSEETITPWNFEEVVDKGASAQSFIERMTNFDKNLPNEKVLPKHSLLYEYFTVYNELTKVKYVTEGMRKPAFLSGEQKKAIVDLLFKTNRKVTVKQLKEDYFKKIECFDSVEISGVEDRFNASLGTYHDLLKIIKDKDFLDNEENEDILEDIVLTLTLFEDREMIEERLKTYAHLFDDKVMKQLKRRRYTGWGRLSRKLINGIRDKQSGKTILDFLKSDGFANRNFMQLIHDDSLTFKEDIQKAQVSGQGDSLHEHIANLAGSPAIKKGILQTVKVVDELVKVMGRHKPENIVIEMARENQTTQKGQKNSRERMKRIEEGIKELGSQILKEHPVENTQLQNEKLYLYYLQNGRDMYVDQELDINRLSDYDVDHIVPQSFLKDDSIDNKVLTRSDKARGKSDNVPSEEVVKKMKNYWRQLLNAKLITQRKFDNLTKAERGGLSELDKAGFIKRQLVETRQITKHVAQILDSRMNTKYDENDKLIREVKVITLKSKLVSDFRKDFQFYKVREINNYHHAHDAYLNAVVGTALIKKYPKLESEFVYGDYKVYDVRKMIAKSEQEIGKATAKYFFYSNIMNFFKTEITLANGEIRKRPLIETNGETGEIVWDKGRDFATVRKVLSMPQVNIVKKTEVQTGGFSKESILPKRNSDKLIARKKDWDPKKYGGFDSPTVAYSVLVVAKVEKGKSKKLKSVKELLGITIMERSSFEKNPIDFLEAKGYKEVKKDLIIKLPKYSLFELENGRKRMLASAGELQKGNELALPSKYVNFLYLASHYEKLKGSPEDNEQKQLFVEQHKHYLDEIIEQISEFSKRVILADANLDKVLSAYNKHRDKPIREQAENIIHLFTLTNLGAPAAFKYFDTTIDRKRYTSTKEVLDATLIHQSITGLYETRIDLSQLGGDGGGGSGGGGGTLNIEDEYRLHETSKEPDVPLGSTWLSDFPQAWAETGGMGLAVRQAPLIIPLKATSTPVSIKQYPMSQEARLGIKPHIQRLLDQGILVPCQSPWNTPLLPVKKPGTNDYRPVQDLREVNKRVEDIHPTVPNPYNLLSGLPPSHQWYTVLDLKDAFFCLRLHPTSQPLFAFEWRDPEMGISGQLTWTRLPQGFKNSPTLFNEALHRDLADFRIQHPDLILLQYVDDLLLAATSEQDCQRGTRALLQTLGNLGYRASAKKAQICQKQVKYLGYLLKEGQRWLTEARKETVMGQPTPKTPRQLREFLGTAGFCRLWIPGFAEMAAPLYPLTKPGTLFNWGPDQQKAYQEIKQALLTAPALGLPDLTKPFELFVDEKQGYAKGVLTQKLGPWRRPVAYLSKKLDPVAAGWPPCLRMVAAIAVLTKDAGKLTMGQPLVILAPHAVEALVKQPPDRWLSNARMTHYQAMLLDTDRVQFGPVVALNPATLLPLPEKEAPHDCLEILAETHGTRPDLTDQPIPDADYTWYTDGSSFLQEGQRRAGAAVTTETEVIWARALPAGTSAQRAELIALTQALKMAEGKKLNVYTDSRYAFATAHVHGEIYRRRGWLTSEGREIKNKNEILALLKALFLPKRLSIIHCPGHQKGNSAEARGNRMADQAAREAAMKAVLETSTLLAGKRTADGSEFEKRTADGSEFESPKKKAKVE

SEQ ID NO: 6583 - protein, 2091 aa, synthetic construct
MPAAKRVKLDGGDKKYSIGLDIGTNSVGWAVITDEYKVPSKKFKVLGNTDRHSIKKNLIGALLFDSGETAEATRLKRTARRRYTRRKNRICYLQEIFSNEMAKVDDSFFHRLEESFLVEEDKKHERHPIFGNIVDEVAYHEKYPTIYHLRKKLVDSTDKADLRLIYLALAHMIKFRGHFLIEGDLNPDNSDVDKLFIQLVQTYNQLFEENPINASGVDAKAILSARLSKSRRLENLIAQLPGEKKNGLFGNLIALSLGLTPNFKSNFDLAEDAKLQLSKDTYDDDLDNLLAQIGDQYADLFLAAKNLSDAILLSDILRVNTEITKAPLSASMIKRYDEHHQDLTLLKALVRQQLPEKYKEIFFDQSKNGYAGYIDGGASQEEFYKFIKPILEKMDGTEELLVKLNREDLLRKQRTFDNGSIPHQIHLGELHAILRRQEDFYPFLKDNREKIEKILTFRIPYYVGPLARGNSRFAWMTRKSEETITPWNFEEVVDKGASAQSFIERMTNFDKNLPNEKVLPKHSLLYEYFTVYNELTKVKYVTEGMRKPAFLSGEQKKAIVDLLFKTNRKVTVKQLKEDYFKKIECFDSVEISGVEDRFNASLGTYHDLLKIIKDKDFLDNEENEDILEDIVLTLTLFEDREMIEERLKTYAHLFDDKVMKQLKRRRYTGWGRLSRKLINGIRDKQSGKTILDFLKSDGFANRNFMQLIHDDSLTFKEDIQKAQVSGQGDSLHEHIANLAGSPAIKKGILQTVKVVDELVKVMGRHKPENIVIEMARENQTTQKGQKNSRERMKRIEEGIKELGSQILKEHPVENTQLQNEKLYLYYLQNGRDMYVDQELDINRLSDYDVDHIVPQSFLKDDSIDNKVLTRSDKARGKSDNVPSEEVVKKMKNYWRQLLNAKLITQRKFDNLTKAERGGLSELDKAGFIKRQLVETRQITKHVAQILDSRMNTKYDENDKLIREVKVITLKSKLVSDFRKDFQFYKVREINNYHHAHDAYLNAVVGTALIKKYPKLESEFVYGDYKVYDVRKMIAKSEQEIGKATAKYFFYSNIMNFFKTEITLANGEIRKRPLIETNGETGEIVWDKGRDFATVRKVLSMPQVNIVKKTEVQTGGFSKESILPKRNSDKLIARKKDWDPKKYGGFDSPTVAYSVLVVAKVEKGKSKKLKSVKELLGITIMERSSFEKNPIDFLEAKGYKEVKKDLIIKLPKYSLFELENGRKRMLASAGELQKGNELALPSKYVNFLYLASHYEKLKGSPEDNEQKQLFVEQHKHYLDEIIEQISEFSKRVILADANLDKVLSAYNKHRDKPIREQAENIIHLFTLTNLGAPAAFKYFDTTIDRKRYTSTKEVLDATLIHQSITGLYETRIDLSQLGGDGGGGSGGGGGTLNIEDEYRLHETSKEPDVPLGSTWLSDFPQAWAETGGMGLAVRQAPLIIPLKATSTPVSIKQYPMSQEARLGIKPHIQRLLDQGILVPCQSPWNTPLLPVKKPGTNDYRPVQDLREVNKRVEDIHPTVPNPYNLLSGLPPSHQWYTVLDLKDAFFCLRLHPTSQPLFAFEWRDPEMGISGQLTWTRLPQGFKNSPTLFNEALHRDLADFRIQHPDLILLQYVDDLLLAATSEQDCQRGTRALLQTLGNLGYRASAKKAQICQKQVKYLGYLLKEGQRWLTEARKETVMGQPTPKTPRQLREFLGKAGFCRLFIPGFAEMAAPLYPLTKPGTLFNWGPDQQKAYQEIKQALLTAPALGLPDLTKPFELFVDEKQGYAKGVLTQKLGPWRRPVAYLSKKLDPVAAGWPPCLRMVAAIAVLTKDAGKLTMGQPLVILAPHAVEALVKQPPDRWLSNARMTHYQAMLLDTDRVQFGPVVALNPATLLPLPEKEAPHDCLEILAETHGTRPDLTDQPIPDADYTWYTDGSSFLQEGQRRAGAAVTTETEVIWARALPAGTSAQRAELIALTQALKMAEGKKLNVYTDSRYAFATAHVHGEIYRRRGWLTSEGREIKNKNEILALLKALFLPKRLSIIHCPGHQKGNSAEARGNRMADQAAREAAMKAVLETSTLLAGKRTADGSEFEKRTADGSEFESPKKKAKVE

SEQ ID NO: 6584 - protein, 2093 aa, synthetic construct
MPAAKRVKLDGGDKKYSIGLDIGTNSVGWAVITDEYKVPSKKFKVLGNTDRHSIKKNLIGALLFDSGETAEATRLKRTARRRYTRRKNRICYLQEIFSNEMAKVDDSFFHRLEESFLVEEDKKHERHPIFGNIVDEVAYHEKYPTIYHLRKKLVDSTDKADLRLIYLALAHMIKFRGHFLIEGDLNPDNSDVDKLFIQLVQTYNQLFEENPINASGVDAKAILSARLSKSRRLENLIAQLPGEKKNGLFGNLIALSLGLTPNFKSNFDLAEDAKLQLSKDTYDDDLDNLLAQIGDQYADLFLAAKNLSDAILLSDILRVNTEITKAPLSASMIKRYDEHHQDLTLLKALVRQQLPEKYKEIFFDQSKNGYAGYIDGGASQEEFYKFIKPILEKMDGTEELLVKLNREDLLRKQRTFDNGSIPHQIHLGELHAILRRQEDFYPFLKDNREKIEKILTFRIPYYVGPLARGNSRFAWMTRKSEETITPWNFEEVVDKGASAQSFIERMTNFDKNLPNEKVLPKHSLLYEYFTVYNELTKVKYVTEGMRKPAFLSGEQKKAIVDLLFKTNRKVTVKQLKEDYFKKIECFDSVEISGVEDRFNASLGTYHDLLKIIKDKDFLDNEENEDILEDIVLTLTLFEDREMIEERLKTYAHLFDDKVMKQLKRRRYTGWGRLSRKLINGIRDKQSGKTILDFLKSDGFANRNFMQLIHDDSLTFKEDIQKAQVSGQGDSLHEHIANLAGSPAIKKGILQTVKVVDELVKVMGRHKPENIVIEMARENQTTQKGQKNSRERMKRIEEGIKELGSQILKEHPVENTQLQNEKLYLYYLQNGRDMYVDQELDINRLSDYDVDHIVPQSFLKDDSIDNKVLTRSDKARGKSDNVPSEEVVKKMKNYWRQLLNAKLITQRKFDNLTKAERGGLSELDKAGFIKRQLVETRQITKHVAQILDSRMNTKYDENDKLIREVKVITLKSKLVSDFRKDFQFYKVREINNYHHAHDAYLNAVVGTALIKKYPKLESEFVYGDYKVYDVRKMIAKSEQEIGKATAKYFFYSNIMNFFKTEITLANGEIRKRPLIETNGETGEIVWDKGRDFATVRKVLSMPQVNIVKKTEVQTGGFSKESILPKRNSDKLIARKKDWDPKKYGGFDSPTVAYSVLVVAKVEKGKSKKLKSVKELLGITIMERSSFEKNPIDFLEAKGYKEVKKDLIIKLPKYSLFELENGRKRMLASAGELQKGNELALPSKYVNFLYLASHYEKLKGSPEDNEQKQLFVEQHKHYLDEIIEQISEFSKRVILADANLDKVLSAYNKHRDKPIREQAENIIHLFTLTNLGAPAAFKYFDTTIDRKRYTSTKEVLDATLIHQSITGLYETRIDLSQLGGDGGGGGGGSGGTAPLEEEYRLFLEAPIQNVTLLEQWKREIPKVWAEINPPGLASTQAPIHVQLLSTALPVRVRQYPITLEAKRSLRETIRKFRAAGILRPVHSPWNTPLLPVRKSGTSEYRMVQDLREVNKRVETIHPTVPNPYTLLSLLPPDRIWYSVLDLKDAFFCIPLAPESQLIFAFEWADAEEGESGQLTWTRLPQGFKNSPTLFNEALNRDLQGFRLDHPSVSLLQYVDDLLIAADTQAACLSATRDLLMTLAELGYRVSGKKAQLCQEEVTYLGFKIHKGSRSLSNSRTQAILQIPVPKTKRQVREFLGTIGYCRLWIPGFAELAQPLYAATRPGNDPLVWGEKEEEAFQSLKLALTQPPALALPSLDKPFQLFVEETSGAAKGVLTQALGPWKRPVAYLSKRLDPVAAGWPRCLRAIAAAALLTREASKLTFGQDIEITSSHNLESLLRSPPDKWLTNARITQYQVLLLDPPRVRFKQTAALNPATLLPETDDTLPIHHCLDTLDSLTSTRPDLTDQPLAQAEATLFTDGSSYIRDGKRYAGAAVVTLDSVIWAEPLPIGTSAQKAELIALTKALEWSKDKSVNIYTDSRYAFATLHVHGMIYRERGWLTAGGKAIKNAPEILALLTAVWLPKRVAVMHCKGHQKDDAPTSTGNRRADEVAREVAIRPLSTQATISAGKRTADGSEFEKRTADGSEFESPKKKAKVE

SEQ ID NO: 6585 - protein, 2093 aa, synthetic construct
MPAAKRVKLDGGDKKYSIGLDIGTNSVGWAVITDEYKVPSKKFKVLGNTDRHSIKKNLIGALLFDSGETAEATRLKRTARRRYTRRKNRICYLQEIFSNEMAKVDDSFFHRLEESFLVEEDKKHERHPIFGNIVDEVAYHEKYPTIYHLRKKLVDSTDKADLRLIYLALAHMIKFRGHFLIEGDLNPDNSDVDKLFIQLVQTYNQLFEENPINASGVDAKAILSARLSKSRRLENLIAQLPGEKKNGLFGNLIALSLGLTPNFKSNFDLAEDAKLQLSKDTYDDDLDNLLAQIGDQYADLFLAAKNLSDAILLSDILRVNTEITKAPLSASMIKRYDEHHQDLTLLKALVRQQLPEKYKEIFFDQSKNGYAGYIDGGASQEEFYKFIKPILEKMDGTEELLVKLNREDLLRKQRTFDNGSIPHQIHLGELHAILRRQEDFYPFLKDNREKIEKILTFRIPYYVGPLARGNSRFAWMTRKSEETITPWNFEEVVDKGASAQSFIERMTNFDKNLPNEKVLPKHSLLYEYFTVYNELTKVKYVTEGMRKPAFLSGEQKKAIVDLLFKTNRKVTVKQLKEDYFKKIECFDSVEISGVEDRFNASLGTYHDLLKIIKDKDFLDNEENEDILEDIVLTLTLFEDREMIEERLKTYAHLFDDKVMKQLKRRRYTGWGRLSRKLINGIRDKQSGKTILDFLKSDGFANRNFMQLIHDDSLTFKEDIQKAQVSGQGDSLHEHIANLAGSPAIKKGILQTVKVVDELVKVMGRHKPENIVIEMARENQTTQKGQKNSRERMKRIEEGIKELGSQILKEHPVENTQLQNEKLYLYYLQNGRDMYVDQELDINRLSDYDVDHIVPQSFLKDDSIDNKVLTRSDKARGKSDNVPSEEVVKKMKNYWRQLLNAKLITQRKFDNLTKAERGGLSELDKAGFIKRQLVETRQITKHVAQILDSRMNTKYDENDKLIREVKVITLKSKLVSDFRKDFQFYKVREINNYHHAHDAYLNAVVGTALIKKYPKLESEFVYGDYKVYDVRKMIAKSEQEIGKATAKYFFYSNIMNFFKTEITLANGEIRKRPLIETNGETGEIVWDKGRDFATVRKVLSMPQVNIVKKTEVQTGGFSKESILPKRNSDKLIARKKDWDPKKYGGFDSPTVAYSVLVVAKVEKGKSKKLKSVKELLGITIMERSSFEKNPIDFLEAKGYKEVKKDLIIKLPKYSLFELENGRKRMLASAGELQKGNELALPSKYVNFLYLASHYEKLKGSPEDNEQKQLFVEQHKHYLDEIIEQISEFSKRVILADANLDKVLSAYNKHRDKPIREQAENIIHLFTLTNLGAPAAFKYFDTTIDRKRYTSTKEVLDATLIHQSITGLYETRIDLSQLGGDGGGGGGGSGGTAPLEEEYRLFLEAPIQNVTLLEQWKREIPKVWAEINPPGLASTQAPIHVQLLSTALPVRVRQYPITLEAKRSLRETIRKFRAAGILRPVHSPWNTPLLPVRKSGTSEYRMVQDLREVNKRVETIHPTVPNPYTLLSLLPPDRIWYSVLDLKDAFFCIPLAPESQLIFAFEWADAEEGESGQLTWTRLPQGFKNSPTLFNEALNRDLQGFRLDHPSVSLLQYVDDLLIAADTQAACLSATRDLLMTLAELGYRVSGKKAQLCQEEVTYLGFKIHKGSRSLSNSRTQAILQIPVPKTKRQVREFLGKIGYCRLFIPGFAELAQPLYAATRPGNDPLVWGEKEEEAFQSLKLALTQPPALALPSLDKPFQLFVEETSGAAKGVLTQALGPWKRPVAYLSKRLDPVAAGWPRCLRAIAAAALLTREASKLTFGQDIEITSSHNLESLLRSPPDKWLTNARITQYQVLLLDPPRVRFKQTAALNPATLLPETDDTLPIHHCLDTLDSLTSTRPDLTDQPLAQAEATLFTDGSSYIRDGKRYAGAAVVTLDSVIWAEPLPIGTSAQKAELIALTKALEWSKDKSVNIYTDSRYAFATLHVHGMIYRERGWLTAGGKAIKNAPEILALLTAVWLPKRVAVMHCKGHQKDDAPTSTGNRRADEVAREVAIRPLSTQATISAGKRTADGSEFEKRTADGSEFESPKKKAKVE

SEQ ID NO: 6586 - protein, 2097 aa, synthetic construct
MPAAKRVKLDGGDKKYSIGLDIGTNSVGWAVITDEYKVPSKKFKVLGNTDRHSIKKNLIGALLFDSGETAEATRLKRTARRRYTRRKNRICYLQEIFSNEMAKVDDSFFHRLEESFLVEEDKKHERHPIFGNIVDEVAYHEKYPTIYHLRKKLVDSTDKADLRLIYLALAHMIKFRGHFLIEGDLNPDNSDVDKLFIQLVQTYNQLFEENPINASGVDAKAILSARLSKSRRLENLIAQLPGEKKNGLFGNLIALSLGLTPNFKSNFDLAEDAKLQLSKDTYDDDLDNLLAQIGDQYADLFLAAKNLSDAILLSDILRVNTEITKAPLSASMIKRYDEHHQDLTLLKALVRQQLPEKYKEIFFDQSKNGYAGYIDGGASQEEFYKFIKPILEKMDGTEELLVKLNREDLLRKQRTFDNGSIPHQIHLGELHAILRRQEDFYPFLKDNREKIEKILTFRIPYYVGPLARGNSRFAWMTRKSEETITPWNFEEVVDKGASAQSFIERMTNFDKNLPNEKVLPKHSLLYEYFTVYNELTKVKYVTEGMRKPAFLSGEQKKAIVDLLFKTNRKVTVKQLKEDYFKKIECFDSVEISGVEDRFNASLGTYHDLLKIIKDKDFLDNEENEDILEDIVLTLTLFEDREMIEERLKTYAHLFDDKVMKQLKRRRYTGWGRLSRKLINGIRDKQSGKTILDFLKSDGFANRNFMQLIHDDSLTFKEDIQKAQVSGQGDSLHEHIANLAGSPAIKKGILQTVKVVDELVKVMGRHKPENIVIEMARENQTTQKGQKNSRERMKRIEEGIKELGSQILKEHPVENTQLQNEKLYLYYLQNGRDMYVDQELDINRLSDYDVDHIVPQSFLKDDSIDNKVLTRSDKARGKSDNVPSEEVVKKMKNYWRQLLNAKLITQRKFDNLTKAERGGLSELDKAGFIKRQLVETRQITKHVAQILDSRMNTKYDENDKLIREVKVITLKSKLVSDFRKDFQFYKVREINNYHHAHDAYLNAVVGTALIKKYPKLESEFVYGDYKVYDVRKMIAKSEQEIGKATAKYFFYSNIMNFFKTEITLANGEIRKRPLIETNGETGEIVWDKGRDFATVRKVLSMPQVNIVKKTEVQTGGFSKESILPKRNSDKLIARKKDWDPKKYGGFDSPTVAYSVLVVAKVEKGKSKKLKSVKELLGITIMERSSFEKNPIDFLEAKGYKEVKKDLIIKLPKYSLFELENGRKRMLASAGELQKGNELALPSKYVNFLYLASHYEKLKGSPEDNEQKQLFVEQHKHYLDEIIEQISEFSKRVILADANLDKVLSAYNKHRDKPIREQAENIIHLFTLTNLGAPAAFKYFDTTIDRKRYTSTKEVLDATLIHQSITGLYETRIDLSQLGGDGGGGGGGSGGTVSLQDEHRLFDIPVTTSLPDVWLQDFPQAWAETGGLGRAKCQAPIIIDLKPTAVPVSIKQYPMSLEAHMGIRQHIIKFLELGVLRPCRSPWNTPLLPVKKPGTQDYRPVQDLREINKRTVDIHPTVPNPYNLLSTLKPDYSWYTVLDLKDAFFCLPLAPQSQELFAFEWKDPERGISGQLTWTRLPQGFKNSPTLFNEALHRDLTDFRTQHPEVTLLQYVDDLLLAAPTKKACTQGTRHLLQELGEKGYRASAKKAQICQTKVTYLGYILSEGKRWLTPGRIETVARIPPPRNPREVREFLGTAGFCRLWIPGFAELAAPLYALTKPSTPFTWQTEHQLAFEALKKALLSAPALGLPDTSKPFTLFLDERQGIAKGVLTQKLGPWKRPVAYLSKKLDPVAAGWPPCLRIMAATAMLVKDSAKLTLGQPLTVITPHTLEAIVRQPPDRWITNARLTHYQALLLDTDRVQFGPPVTLNPATLLPVPENQPSPHDCRQVLAETHGTREDLKDQELPDADHTWYTDGSSYLDSGTRRAGAAVVDGHNTIWAQSLPPGTSAQKAELIALTKALELSKGKKANIYTDSRYAFATAHTHGSIYERRGWLTSEGKEIKNKAEIIALLKALFLPQEVAIIHCPGHQKGQDPVAVGNRQADRVARQAAMAEVLTLATEPDNTSHITAGKRTADGSEFEKRTADGSEFESPKKKAKVE

SEQ ID NO: 6587 - protein, 2090 aa, synthetic construct
MPAAKRVKLDGGDKKYSIGLDIGTNSVGWAVITDEYKVPSKKFKVLGNTDRHSIKKNLIGALLFDSGETAEATRLKRTARRRYTRRKNRICYLQEIFSNEMAKVDDSFFHRLEESFLVEEDKKHERHPIFGNIVDEVAYHEKYPTIYHLRKKLVDSTDKADLRLIYLALAHMIKFRGHFLIEGDLNPDNSDVDKLFIQLVQTYNQLFEENPINASGVDAKAILSARLSKSRRLENLIAQLPGEKKNGLFGNLIALSLGLTPNFKSNFDLAEDAKLQLSKDTYDDDLDNLLAQIGDQYADLFLAAKNLSDAILLSDILRVNTEITKAPLSASMIKRYDEHHQDLTLLKALVRQQLPEKYKEIFFDQSKNGYAGYIDGGASQEEFYKFIKPILEKMDGTEELLVKLNREDLLRKQRTFDNGSIPHQIHLGELHAILRRQEDFYPFLKDNREKIEKILTFRIPYYVGPLARGNSRFAWMTRKSEETITPWNFEEVVDKGASAQSFIERMTNFDKNLPNEKVLPKHSLLYEYFTVYNELTKVKYVTEGMRKPAFLSGEQKKAIVDLLFKTNRKVTVKQLKEDYFKKIECFDSVEISGVEDRFNASLGTYHDLLKIIKDKDFLDNEENEDILEDIVLTLTLFEDREMIEERLKTYAHLFDDKVMKQLKRRRYTGWGRLSRKLINGIRDKQSGKTILDFLKSDGFANRNFMQLIHDDSLTFKEDIQKAQVSGQGDSLHEHIANLAGSPAIKKGILQTVKVVDELVKVMGRHKPENIVIEMARENQTTQKGQKNSRERMKRIEEGIKELGSQILKEHPVENTQLQNEKLYLYYLQNGRDMYVDQELDINRLSDYDVDHIVPQSFLKDDSIDNKVLTRSDKARGKSDNVPSEEVVKKMKNYWRQLLNAKLITQRKFDNLTKAERGGLSELDKAGFIKRQLVETRQITKHVAQILDSRMNTKYDENDKLIREVKVITLKSKLVSDFRKDFQFYKVREINNYHHAHDAYLNAVVGTALIKKYPKLESEFVYGDYKVYDVRKMIAKSEQEIGKATAKYFFYSNIMNFFKTEITLANGEIRKRPLIETNGETGEIVWDKGRDFATVRKVLSMPQVNIVKKTEVQTGGFSKESILPKRNSDKLIARKKDWDPKKYGGFDSPTVAYSVLVVAKVEKGKSKKLKSVKELLGITIMERSSFEKNPIDFLEAKGYKEVKKDLIIKLPKYSLFELENGRKRMLASAGELQKGNELALPSKYVNFLYLASHYEKLKGSPEDNEQKQLFVEQHKHYLDEIIEQISEFSKRVILADANLDKVLSAYNKHRDKPIREQAENIIHLFTLTNLGAPAAFKYFDTTIDRKRYTSTKEVLDATLIHQSITGLYETRIDLSQLGGDGGGGGGGSGGTLQLEEEYRLFEPESTQKQEMDIWLKNFPQAWAETGGMGTAHCQAPVLIQLKATATPISIRQYPMPHEAYQGIKPHIRRMLDQGILKPCQSPWNTPLLPVKKPGTEDYRPVQDLREVNKRVEDIHPTVPNPYNLLSTLPPSHPWYTVLDLKDAFFCLRLHSESQLLFAFEWRDPEIGLSGQLTWTRLPQGFKNSPTLFNEALHSDLADFRVRYPALVLLQYVDDLLLAAATRTECLEGTKALLETLGNKGYRASAKKAQICLQEVTYLGYSLKDGQRWLTKARKEAILSIPVPKNSRQVREFLGTAGYCRLWIPGFAELAAPLYPLTRPGTLFQWGTEQQLAFEDIKKALLSSPALGLPDITKPFELFIDENSGFAKGVLVQKLGPWKRPVAYLSKKLDTVASGWPPCLRMVAAIAILVKDAGKLTLGQPLTILTSHPVEALVRQPPNKWLSNARMTHYQAMLLDAERVHFGPTVSLNPATLLPLPSGGNHHDCLQILAETHGTRPDLTDQPLPDADLTWYTDGSSFIRNGEREAGAAVTTESEVIWAAPLPPGTSAQRAELIALTQALKMAEGKKLTVYTDSRYAFATTHVHGEIYRRRGWLTSEGKEIKNKNEILALLEALFLPKRLSIIHCPGHQKGDSPQAKGNRLADDTAKKAATETHSSLTVLPAGKRTADGSEFEKRTADGSEFESPKKKAKVE

SEQ ID NO: 6588 - protein, 2213 aa, synthetic construct
MPAAKRVKLDGGDKKYSIGLDIGTNSVGWAVITDEYKVPSKKFKVLGNTDRHSIKKNLIGALLFDSGETAEATRLKRTARRRYTRRKNRICYLQEIFSNEMAKVDDSFFHRLEESFLVEEDKKHERHPIFGNIVDEVAYHEKYPTIYHLRKKLVDSTDKADLRLIYLALAHMIKFRGHFLIEGDLNPDNSDVDKLFIQLVQTYNQLFEENPINASGVDAKAILSARLSKSRRLENLIAQLPGEKKNGLFGNLIALSLGLTPNFKSNFDLAEDAKLQLSKDTYDDDLDNLLAQIGDQYADLFLAAKNLSDAILLSDILRVNTEITKAPLSASMIKRYDEHHQDLTLLKALVRQQLPEKYKEIFFDQSKNGYAGYIDGGASQEEFYKFIKPILEKMDGTEELLVKLNREDLLRKQRTFDNGSIPHQIHLGELHAILRRQEDFYPFLKDNREKIEKILTFRIPYYVGPLARGNSRFAWMTRKSEETITPWNFEEVVDKGASAQSFIERMTNFDKNLPNEKVLPKHSLLYEYFTVYNELTKVKYVTEGMRKPAFLSGEQKKAIVDLLFKTNRKVTVKQLKEDYFKKIECFDSVEISGVEDRFNASLGTYHDLLKIIKDKDFLDNEENEDILEDIVLTLTLFEDREMIEERLKTYAHLFDDKVMKQLKRRRYTGWGRLSRKLINGIRDKQSGKTILDFLKSDGFANRNFMQLIHDDSLTFKEDIQKAQVSGQGDSLHEHIANLAGSPAIKKGILQTVKVVDELVKVMGRHKPENIVIEMARENQTTQKGQKNSRERMKRIEEGIKELGSQILKEHPVENTQLQNEKLYLYYLQNGRDMYVDQELDINRLSDYDVDHIVPQSFLKDDSIDNKVLTRSDKARGKSDNVPSEEVVKKMKNYWRQLLNAKLITQRKFDNLTKAERGGLSELDKAGFIKRQLVETRQITKHVAQILDSRMNTKYDENDKLIREVKVITLKSKLVSDFRKDFQFYKVREINNYHHAHDAYLNAVVGTALIKKYPKLESEFVYGDYKVYDVRKMIAKSEQEIGKATAKYFFYSNIMNFFKTEITLANGEIRKRPLIETNGETGEIVWDKGRDFATVRKVLSMPQVNIVKKTEVQTGGFSKESILPKRNSDKLIARKKDWDPKKYGGFDSPTVAYSVLVVAKVEKGKSKKLKSVKELLGITIMERSSFEKNPIDFLEAKGYKEVKKDLIIKLPKYSLFELENGRKRMLASAGELQKGNELALPSKYVNFLYLASHYEKLKGSPEDNEQKQLFVEQHKHYLDEIIEQISEFSKRVILADANLDKVLSAYNKHRDKPIREQAENIIHLFTLTNLGAPAAFKYFDTTIDRKRYTSTKEVLDATLIHQSITGLYETRIDLSQLGGDGGGGGGGSGGTLGDQGSRGSDPLPEPRVTLTVEGIPTEFLVNTGAEHSVLTKPMGKMGSKRTVVAGATGSKVYPWTTKRLLKIGQKQVTHSFLVIPECPAPLLGRDLLTKLKAQIQFSTEGPQVTWEDRPAMCLVLNLEEEYRLHEKPVPPSIDPSWLQLFPMVWAEKAGMGLANQVPPVVVELKSDASPVAVRQYPMSKEAREGIRPHIQRFLDLGILVPCQSPWNTPLLPVKKPGTNDYRPVQDLREVNKRVQDIHPTVPNPYNLLSSLPPSHTWYSVLDLKDAFFCLKLHPNSQPLFAFEWRDPEKGNTGQLTWTRLPQGFKNSPTLFNEALHRDLASFRALNPQVVMLQYVDDLLVAAPTYRDCKEGTRRLLQELSKLGYRVSAKKAQLCREEVTYLGYLLKGGKRWLTPARKATVMKIPTPTTPRQVREFLGKAGFCRLFIPGFASLAAPLYPLTRPKVPFTWTEAHQEAFGRIKEALLSAPALALPDLTKPFALYVDEKEGVARGVLTQTLGPWRRPVAYLSKKLDPVASGWPTCLKAIAAVALLLKDADKLTLGQNVLVIAPHNLESIVRQPPDRWMTNARMTHYQSLLLNERVSFAPPAILNPATLLPVESDDTPIHICSEILAEETGTRPDLRDQPLPGVPAWYTDGSSFIMDGRRQAGAAIVDNKRTVWASNLPEGTSAQKAELIALTQALRLAEGKSINIYTDSRYAFATAHVHGAIYKQRGWLTSAGKDIKNKEEILALLEAIHLPKRVAIIHCPGHQRGTDPVATGNRKADEAAKQAAQSTRILTETTKNAGKRTADGSEFEKRTADGSEFESPKKKAKVE

SEQ ID NO: 6589 - protein, 2091 aa, synthetic construct; identical to SEQ ID NO: 4511

SEQ ID NO: 6590 - protein, 2091 aa, synthetic construct
MPAAKRVKLDGGDKKYSIGLDIGTNSVGWAVITDEYKVPSKKFKVLGNTDRHSIKKNLIGALLFDSGETAEATRLKRTARRRYTRRKNRICYLQEIFSNEMAKVDDSFFHRLEESFLVEEDKKHERHPIFGNIVDEVAYHEKYPTIYHLRKKLVDSTDKADLRLIYLALAHMIKFRGHFLIEGDLNPDNSDVDKLFIQLVQTYNQLFEENPINASGVDAKAILSARLSKSRRLENLIAQLPGEKKNGLFGNLIALSLGLTPNFKSNFDLAEDAKLQLSKDTYDDDLDNLLAQIGDQYADLFLAAKNLSDAILLSDILRVNTEITKAPLSASMIKRYDEHHQDLTLLKALVRQQLPEKYKEIFFDQSKNGYAGYIDGGASQEEFYKFIKPILEKMDGTEELLVKLNREDLLRKQRTFDNGSIPHQIHLGELHAILRRQEDFYPFLKDNREKIEKILTFRIPYYVGPLARGNSRFAWMTRKSEETITPWNFEEVVDKGASAQSFIERMTNFDKNLPNEKVLPKHSLLYEYFTVYNELTKVKYVTEGMRKPAFLSGEQKKAIVDLLFKTNRKVTVKQLKEDYFKKIECFDSVEISGVEDRFNASLGTYHDLLKIIKDKDFLDNEENEDILEDIVLTLTLFEDREMIEERLKTYAHLFDDKVMKQLKRRRYTGWGRLSRKLINGIRDKQSGKTILDFLKSDGFANRNFMQLIHDDSLTFKEDIQKAQVSGQGDSLHEHIANLAGSPAIKKGILQTVKVVDELVKVMGRHKPENIVIEMARENQTTQKGQKNSRERMKRIEEGIKELGSQILKEHPVENTQLQNEKLYLYYLQNGRDMYVDQELDINRLSDYDVDHIVPQSFLKDDSIDNKVLTRSDKARGKSDNVPSEEVVKKMKNYWRQLLNAKLITQRKFDNLTKAERGGLSELDKAGFIKRQLVETRQITKHVAQILDSRMNTKYDENDKLIREVKVITLKSKLVSDFRKDFQFYKVREINNYHHAHDAYLNAVVGTALIKKYPKLESEFVYGDYKVYDVRKMIAKSEQEIGKATAKYFFYSNIMNFFKTEITLANGEIRKRPLIETNGETGEIVWDKGRDFATVRKVLSMPQVNIVKKTEVQTGGFSKESILPKRNSDKLIARKKDWDPKKYGGFDSPTVAYSVLVVAKVEKGKSKKLKSVKELLGITIMERSSFEKNPIDFLEAKGYKEVKKDLIIKLPKYSLFELENGRKRMLASAGELQKGNELALPSKYVNFLYLASHYEKLKGSPEDNEQKQLFVEQHKHYLDEIIEQISEFSKRVILADANLDKVLSAYNKHRDKPIREQAENIIHLFTLTNLGAPAAFKYFDTTIDRKRYTSTKEVLDATLIHQSITGLYETRIDLSQLGGDGGGGGGGSGGTLGIEDEYRLHETSTEPDVSLGSTWLSDFPQAWAETGGMGLAVRQAPLIIPLKATSTPVSIQQYPMSHEARLGIKPHIQRLLDQGILVPCQSPWNTPLLPVKKPGTNDYRPVQDLREVNKRVEDIHPTVPNPYNLLSGLPPSHQWYTVLDLKDAFFCLRLHPTSQPLFAFEWRDPGMGISGQLTWTRLPQGFKNSPTLFNEALHRDLADFRIQHPDLILLQYVDDILLAATSELDCQQGTRALLQTLGDLGYRASAKKAQICQKQVKYLGYLLREGQRWLTEARKETVMGQPVPKTPRQLREFLGTAGFCRLWIPGFAEMAAPLYPLTKPGTLFSWGPDQQKAYQEIKQALLTAPALGLPDLTKPFELFVDEKQGYAKGVLTQKLGPWRRPVAYLSKKLDPVAAGWPPCLRMVAAIAVLTKDAGKLTMGQPLVILAPHAVEALVKQPPDRWLSNARMTHYQAMLLDTDRVQFGPVVALNPATLLPLPEEGAPHDCLEILAETHGTRPDLTDQPIPDADHTWYTDGSSFLQEGQRKAGAAVTTETEVIWAGALPAGTSAQRAELIALTQALKMAEGKRLNVYTDSRYAFATAHIHGEIYRRRGWLTSEGREIKNKSEILALLKALFLPKRLSIIHCLGHQKGDSAEARGNRLADQAAREAAIKTPPDTSTLLAGKRTADGSEFEKRTADGSEFESPKKKAKVE

SEQ ID NO: 6591 - protein, 2091 aa, synthetic construct; identical to SEQ ID NO: 4511

SEQ ID NO: 6592 - protein, 2091 aa, synthetic construct
MPAAKRVKLDGGDKKYSIGLDIGTNSVGWAVITDEYKVPSKKFKVLGNTDRHSIKKNLIGALLFDSGETAEATRLKRTARRRYTRRKNRICYLQEIFSNEMAKVDDSFFHRLEESFLVEEDKKHERHPIFGNIVDEVAYHEKYPTIYHLRKKLVDSTDKADLRLIYLALAHMIKFRGHFLIEGDLNPDNSDVDKLFIQLVQTYNQLFEENPINASGVDAKAILSARLSKSRRLENLIAQLPGEKKNGLFGNLIALSLGLTPNFKSNFDLAEDAKLQLSKDTYDDDLDNLLAQIGDQYADLFLAAKNLSDAILLSDILRVNTEITKAPLSASMIKRYDEHHQDLTLLKALVRQQLPEKYKEIFFDQSKNGYAGYIDGGASQEEFYKFIKPILEKMDGTEELLVKLNREDLLRKQRTFDNGSIPHQIHLGELHAILRRQEDFYPFLKDNREKIEKILTFRIPYYVGPLARGNSRFAWMTRKSEETITPWNFEEVVDKGASAQSFIERMTNFDKNLPNEKVLPKHSLLYEYFTVYNELTKVKYVTEGMRKPAFLSGEQKKAIVDLLFKTNRKVTVKQLKEDYFKKIECFDSVEISGVEDRFNASLGTYHDLLKIIKDKDFLDNEENEDILEDIVLTLTLFEDREMIEERLKTYAHLFDDKVMKQLKRRRYTGWGRLSRKLINGIRDKQSGKTILDFLKSDGFANRNFMQLIHDDSLTFKEDIQKAQVSGQGDSLHEHIANLAGSPAIKKGILQTVKVVDELVKVMGRHKPENIVIEMARENQTTQKGQKNSRERMKRIEEGIKELGSQILKEHPVENTQLQNEKLYLYYLQNGRDMYVDQELDINRLSDYDVDHIVPQSFLKDDSIDNKVLTRSDKARGKSDNVPSEEVVKKMKNYWRQLLNAKLITQRKFDNLTKAERGGLSELDKAGFIKRQLVETRQITKHVAQILDSRMNTKYDENDKLIREVKVITLKSKLVSDFRKDFQFYKVREINNYHHAHDAYLNAVVGTALIKKYPKLESEFVYGDYKVYDVRKMIAKSEQEIGKATAKYFFYSNIMNFFKTEITLANGEIRKRPLIETNGETGEIVWDKGRDFATVRKVLSMPQVNIVKKTEVQTGGFSKESILPKRNSDKLIARKKDWDPKKYGGFDSPTVAYSVLVVAKVEKGKSKKLKSVKELLGITIMERSSFEKNPIDFLEAKGYKEVKKDLIIKLPKYSLFELENGRKRMLASAGELQKGNELALPSKYVNFLYLASHYEKLKGSPEDNEQKQLFVEQHKHYLDEIIEQISEFSKRVILADANLDKVLSAYNKHRDKPIREQAENIIHLFTLTNLGAPAAFKYFDTTIDRKRYTSTKEVLDATLIHQSITGLYETRIDLSQLGGDGGGGGGGSGGTLNIEDEYRLHETSKGPDVPLGSTWLSDFPQAWAETGGMGLAFRQAPLIISLKATSTPVSIKQYPMSQEARLGIKPHIQRLLDQGILVPCQSPWNTPLLPVKKPGTNDYRPVQDLREVNKRVEDIHPTVPNPYNLLSGLPPSHQWYTVLDLKDAFFCLRLHPTSQSLFAFEWKDPEMGISGQLTWTRLPQGFKNSPTLFDEALHRDLADFRIQHPDLILLQYVDDLLLAATSELDCQQGTRALLQTLGDLGYRASAKKAQICQKQVKYLGYLLKEGQRWLTEARKETVMGQPTPKTPRQLREFLGTAGLCRLWIPGFAEMAAPLYPLTKTGTLFKWGPDQQKAYQEIKQALLTAPALGLPDLTKPFELFVDEKQGYAKGVLTQKLGPWRRPVAYLSKKLDPVAAGWPPCLRMVAAIAVLTKDVGKLTMGQPLVILAPHAVEALVKQPPDRWLSNARMTHYQALLLDTDRVQFGPIVALNPATLLPLPEEGLQHDCLDILAEAHGTRPDLTDQPLPDADHTWYTDGSSFLQEGQRRAGAAVTTETEVIWAKALPAGTSAQRAELIALTQALKMAAGKKLNVYTDSRYAFATAHIHGEIYRRRGLLTSEGKEIKNKDEILALLKALFLPKRLSIIHCPGHQKGNHAEARGNRMADQAAREVATRETPETSTLLAGKRTADGSEFEKRTADGSEFESPKKKAKVE

SEQ ID NO: 6593 - protein, 2091 aa, synthetic construct
MPAAKRVKLDGGDKKYSIGLDIGTNSVGWAVITDEYKVPSKKFKVLGNTDRHSIKKNLIGALLFDSGETAEATRLKRTARRRYTRRKNRICYLQEIFSNEMAKVDDSFFHRLEESFLVEEDKKHERHPIFGNIVDEVAYHEKYPTIYHLRKKLVDSTDKADLRLIYLALAHMIKFRGHFLIEGDLNPDNSDVDKLFIQLVQTYNQLFEENPINASGVDAKAILSARLSKSRRLENLIAQLPGEKKNGLFGNLIALSLGLTPNFKSNFDLAEDAKLQLSKDTYDDDLDNLLAQIGDQYADLFLAAKNLSDAILLSDILRVNTEITKAPLSASMIKRYDEHHQDLTLLKALVRQQLPEKYKEIFFDQSKNGYAGYIDGGASQEEFYKFIKPILEKMDGTEELLVKLNREDLLRKQRTFDNGSIPHQIHLGELHAILRRQEDFYPFLKDNREKIEKILTFRIPYYVGPLARGNSRFAWMTRKSEETITPWNFEEVVDKGASAQSFIERMTNFDKNLPNEKVLPKHSLLYEYFTVYNELTKVKYVTEGMRKPAFLSGEQKKAIVDLLFKTNRKVTVKQLKEDYFKKIECFDSVEISGVEDRFNASLGTYHDLLKIIKDKDFLDNEENEDILEDIVLTLTLFEDREMIEERLKTYAHLFDDKVMKQLKRRRYTGWGRLSRKLINGIRDKQSGKTILDFLKSDGFANRNFMQLIHDDSLTFKEDIQKAQVSGQGDSLHEHIANLAGSPAIKKGILQTVKVVDELVKVMGRHKPENIVIEMARENQTTQKGQKNSRERMKRIEEGIKELGSQILKEHPVENTQLQNEKLYLYYLQNGRDMYVDQELDINRLSDYDVDHIVPQSFLKDDSIDNKVLTRSDKARGKSDNVPSEEVVKKMKNYWRQLLNAKLITQRKFDNLTKAERGGLSELDKAGFIKRQLVETRQITKHVAQILDSRMNTKYDENDKLIREVKVITLKSKLVSDFRKDFQFYKVREINNYHHAHDAYLNAVVGTALIKKYPKLESEFVYGDYKVYDVRKMIAKSEQEIGKATAKYFFYSNIMNFFKTEITLANGEIRKRPLIETNGETGEIVWDKGRDFATVRKVLSMPQVNIVKKTEVQTGGFSKESILPKRNSDKLIARKKDWDPKKYGGFDSPTVAYSVLVVAKVEKGKSKKLKSVKELLGITIMERSSFEKNPIDFLEAKGYKEVKKDLIIKLPKYSLFELENGRKRMLASAGELQKGNELALPSKYVNFLYLASHYEKLKGSPEDNEQKQLFVEQHKHYLDEIIEQISEFSKRVILADANLDKVLSAYNKHRDKPIREQAENIIHLFTLTNLGAPAAFKYFDTTIDRKRYTSTKEVLDATLIHQSITGLYETRIDLSQLGGDGGGGGGGSGGTLNIEDEYRLHETSKGPDVPLGSTWLSDFPQAWAETGGMGLAVRQAPLIIPLKATSTPVSIKQYPMSQEARLGIKPHIQRLLDQGILVPCQSPWNTPLLPVKKPGTNDYRPVQDLREVNKRVEDIHPTVPNPYNLLSGLPPSHQWYTVLDLKDAFFCLRLHPTSQSLFAFEWRDPEMGISGQLTWTRLPQGFKNSPTLFNEALHRDLADFRIQHPDLILLQYVDDLLLAATSELDCQQGTRALLQTLGDLGYRASAKKAQICQKQVKYLGYLLKEGQRWLTEARKETVMGQPTPKTPRQLREFLGTAGFCRLWIPGFAEMAAPLYPLTKPGTLFEWGPDQQKAYQEIKQALLTAPALGLPDLTKPFELFVDEKQGYAKGVLTQKLGPWRRPVAYLSKKLDPVAAGWPPCLRMVAAIAVLTKDAGKLTMGQPLVILAPHAVEALVKQPPDRWLSNARMTHYQALLLDTDRVQFGPIVALNPATLLPLPEEGLQHDCLDILAEAHGTRPDLTDQPLPDADHTWYTDGSSFLQEGQRKAGAAVTTETEVVWAKALPAGTSAQRAELIALTQALKMAEGKKLNVYTDSRYAFATAHIHGEIYRRRGWLTSEGKEIKNKDEILALLKALFLPKRLSIIHCPGHQKGNRAEARGNRMADQAAREVATRETPETSTLLAGKRTADGSEFEKRTADGSEFESPKKKAKVE

SEQ ID NO: 6594 - protein, 2091 aa, synthetic construct
MPAAKRVKLDGGDKKYSIGLDIGTNSVGWAVITDEYKVPSKKFKVLGNTDRHSIKKNLIGALLFDSGETAEATRLKRTARRRYTRRKNRICYLQEIFSNEMAKVDDSFFHRLEESFLVEEDKKHERHPIFGNIVDEVAYHEKYPTIYHLRKKLVDSTDKADLRLIYLALAHMIKFRGHFLIEGDLNPDNSDVDKLFIQLVQTYNQLFEENPINASGVDAKAILSARLSKSRRLENLIAQLPGEKKNGLFGNLIALSLGLTPNFKSNFDLAEDAKLQLSKDTYDDDLDNLLAQIGDQYADLFLAAKNLSDAILLSDILRVNTEITKAPLSASMIKRYDEHHQDLTLLKALVRQQLPEKYKEIFFDQSKNGYAGYIDGGASQEEFYKFIKPILEKMDGTEELLVKLNREDLLRKQRTFDNGSIPHQIHLGELHAILRRQEDFYPFLKDNREKIEKILTFRIPYYVGPLARGNSRFAWMTRKSEETITPWNFEEVVDKGASAQSFIERMTNFDKNLPNEKVLPKHSLLYEYFTVYNELTKVKYVTEGMRKPAFLSGEQKKAIVDLLFKTNRKVTVKQLKEDYFKKIECFDSVEISGVEDRFNASLGTYHDLLKIIKDKDFLDNEENEDILEDIVLTLTLFEDREMIEERLKTYAHLFDDKVMKQLKRRRYTGWGRLSRKLINGIRDKQSGKTILDFLKSDGFANRNFMQLIHDDSLTFKEDIQKAQVSGQGDSLHEHIANLAGSPAIKKGILQTVKVVDELVKVMGRHKPENIVIEMARENQTTQKGQKNSRERMKRIEEGIKELGSQILKEHPVENTQLQNEKLYLYYLQNGRDMYVDQELDINRLSDYDVDHIVPQSFLKDDSIDNKVLTRSDKARGKSDNVPSEEVVKKMKNYWRQLLNAKLITQRKFDNLTKAERGGLSELDKAGFIKRQLVETRQITKHVAQILDSRMNTKYDENDKLIREVKVITLKSKLVSDFRKDFQFYKVREINNYHHAHDAYLNAVVGTALIKKYPKLESEFVYGDYKVYDVRKMIAKSEQEIGKATAKYFFYSNIMNFFKTEITLANGEIRKRPLIETNGETGEIVWDKGRDFATVRKVLSMPQVNIVKKTEVQTGGFSKESILPKRNSDKLIARKKDWDPKKYGGFDSPTVAYSVLVVAKVEKGKSKKLKSVKELLGITIMERSSFEKNPIDFLEAKGYKEVKKDLIIKLPKYSLFELENGRKRMLASAGELQKGNELALPSKYVNFLYLASHYEKLKGSPEDNEQKQLFVEQHKHYLDEIIEQISEFSKRVILADANLDKVLSAYNKHRDKPIREQAENIIHLFTLTNLGAPAAFKYFDTTIDRKRYTSTKEVLDATLIHQSITGLYETRIDLSQLGGDGGGGGGGSGGTLNIEDEYRLHETSKGPDVPLGSTWLSDFPQAWAETGGMGLAVRQAPLIIPLKATSTPVSIKQYPMSQEARLGIKPHIQRLLDQGILVPCQSPWNTPLLPVKKPGTNDYRPVQDLREVNKRVEDIHPTVPNPYNLLSGLPPSHQWYTVLDLKDAFFCLRLHPTSQSLFAFEWRDPEMGISGQLTWTRLPQGFKNSPTLFNEALHRDLADFRIQHPDLILLQYVDDLLLAATSELDCQQGTRALLQTLGDLGYRASAKKAQICQKQVKYLGYLLKEGQRWLTEARKETVMGQPTPKTPRQLREFLGKAGFCRLFIPGFAEMAAPLYPLTKPGTLFEWGPDQQKAYQEIKQALLTAPALGLPDLTKPFELFVDEKQGYAKGVLTQKLGPWRRPVAYLSKKLDPVAAGWPPCLRMVAAIAVLTKDAGKLTMGQPLVILAPHAVEALVKQPPDRWLSNARMTHYQALLLDTDRVQFGPIVALNPATLLPLPEEGLQHDCLDILAEAHGTRPDLTDQPLPDADHTWYTDGSSFLQEGQRKAGAAVTTETEVVWAKALPAGTSAQRAELIALTQALKMAEGKKLNVYTDSRYAFATAHIHGEIYRRRGWLTSEGKEIKNKDEILALLKALFLPKRLSIIHCPGHQKGNRAEARGNRMADQAAREVATRETPETSTLLAGKRTADGSEFEKRTADGSEFESPKKKAKVE

SEQ ID NO: 6595 - protein, 2111 aa, synthetic construct
MPAAKRVKLDGGDKKYSIGLDIGTNSVGWAVITDEYKVPSKKFKVLGNTDRHSIKKNLIGALLFDSGETAEATRLKRTARRRYTRRKNRICYLQEIFSNEMAKVDDSFFHRLEESFLVEEDKKHERHPIFGNIVDEVAYHEKYPTIYHLRKKLVDSTDKADLRLIYLALAHMIKFRGHFLIEGDLNPDNSDVDKLFIQLVQTYNQLFEENPINASGVDAKAILSARLSKSRRLENLIAQLPGEKKNGLFGNLIALSLGLTPNFKSNFDLAEDAKLQLSKDTYDDDLDNLLAQIGDQYADLFLAAKNLSDAILLSDILRVNTEITKAPLSASMIKRYDEHHQDLTLLKALVRQQLPEKYKEIFFDQSKNGYAGYIDGGASQEEFYKFIKPILEKMDGTEELLVKLNREDLLRKQRTFDNGSIPHQIHLGELHAILRRQEDFYPFLKDNREKIEKILTFRIPYYVGPLARGNSRFAWMTRKSEETITPWNFEEVVDKGASAQSFIERMTNFDKNLPNEKVLPKHSLLYEYFTVYNELTKVKYVTEGMRKPAFLSGEQKKAIVDLLFKTNRKVTVKQLKEDYFKKIECFDSVEISGVEDRFNASLGTYHDLLKIIKDKDFLDNEENEDILEDIVLTLTLFEDREMIEERLKTYAHLFDDKVMKQLKRRRYTGWGRLSRKLINGIRDKQSGKTILDFLKSDGFANRNFMQLIHDDSLTFKEDIQKAQVSGQGDSLHEHIANLAGSPAIKKGILQTVKVVDELVKVMGRHKPENIVIEMARENQTTQKGQKNSRERMKRIEEGIKELGSQILKEHPVENTQLQNEKLYLYYLQNGRDMYVDQELDINRLSDYDVDHIVPQSFLKDDSIDNKVLTRSDKARGKSDNVPSEEVVKKMKNYWRQLLNAKLITQRKFDNLTKAERGGLSELDKAGFIKRQLVETRQITKHVAQILDSRMNTKYDENDKLIREVKVITLKSKLVSDFRKDFQFYKVREINNYHHAHDAYLNAVVGTALIKKYPKLESEFVYGDYKVYDVRKMIAKSEQEIGKATAKYFFYSNIMNFFKTEITLANGEIRKRPLIETNGETGEIVWDKGRDFATVRKVLSMPQVNIVKKTEVQTGGFSKESILPKRNSDKLIARKKDWDPKKYGGFDSPTVAYSVLVVAKVEKGKSKKLKSVKELLGITIMERSSFEKNPIDFLEAKGYKEVKKDLIIKLPKYSLFELENGRKRMLASAGELQKGNELALPSKYVNFLYLASHYEKLKGSPEDNEQKQLFVEQHKHYLDEIIEQISEFSKRVILADANLDKVLSAYNKHRDKPIREQAENIIHLFTLTNLGAPAAFKYFDTTIDRKRYTSTKEVLDATLIHQSITGLYETRIDLSQLGGDGGGGGGGSGGTLNIEDEYRLHETSKEPDVSLGSTWLSDFPQAWAETGGMGLAVRQAPLIIPLKATSTPVSIKQYPMSQEARLGIKPHIQRLLDQGILVPCQSPWNTPLLPVKKPGTNDYRPVQDLREVNKRVEDIHPTVPNPYNLLSGLPPSHQWYTVLDLKDAFFCLRLHPTSQPLFAFEWRDPEMGISGQLTWTRLPQGFKNSPTLFNEALHRDLADFRIQHPDLILLQYVDDLLLAATSELDCQQGTRALLQTLGNLGYRASAKKAQICQKQVKYLGYLLKEGQRWLTEARKETVMGQPTPKTPRQLREFLGKAGFCRLFIPGFAEMAAPLYPLTKPGTLFNWGPDQQKAYQEIKQALLTAPALGLPDLTKPFELFVDEKQGYAKGVLTQKLGPWRRPVAYLSKKLDPVAAGWPPCLRMVAAIAVLTKDAGKLTMGQPLVILAPHAVEALVKQPPDRWLSNARMTHYQALLLDTDRVQFGPVVALNPATLLPLPEEGLQHNCLDILAEAHGTRPDLTDQPLPDADHTWYTDGSSLLQEGQRKAGAAVTTETEVIWAKALPAGTSAQRAELIALTQALKMAEGKKLNVYTDSRYAFATAHIHGEIYRRRGWLTSEGKEIKNKDEILALLKALFLPKRLSIIHCPGHQKGHSAEARGNRMADQAARKAAITETPDTSTLLIENSSPSGGSKRTADGSEFEAGKRTADGSEFEKRTADGSEFESPKKKAKVE

SEQ ID NO: 6596 - protein, 2111 aa, synthetic construct; identical to SEQ ID NO: 6595

SEQ ID NO: 6597 - protein, 2091 aa, synthetic construct
MPAAKRVKLDGGDKKYSIGLDIGTNSVGWAVITDEYKVPSKKFKVLGNTDRHSIKKNLIGALLFDSGETAEATRLKRTARRRYTRRKNRICYLQEIFSNEMAKVDDSFFHRLEESFLVEEDKKHERHPIFGNIVDEVAYHEKYPTIYHLRKKLVDSTDKADLRLIYLALAHMIKFRGHFLIEGDLNPDNSDVDKLFIQLVQTYNQLFEENPINASGVDAKAILSARLSKSRRLENLIAQLPGEKKNGLFGNLIALSLGLTPNFKSNFDLAEDAKLQLSKDTYDDDLDNLLAQIGDQYADLFLAAKNLSDAILLSDILRVNTEITKAPLSASMIKRYDEHHQDLTLLKALVRQQLPEKYKEIFFDQSKNGYAGYIDGGASQEEFYKFIKPILEKMDGTEELLVKLNREDLLRKQRTFDNGSIPHQIHLGELHAILRRQEDFYPFLKDNREKIEKILTFRIPYYVGPLARGNSRFAWMTRKSEETITPWNFEEVVDKGASAQSFIERMTNFDKNLPNEKVLPKHSLLYEYFTVYNELTKVKYVTEGMRKPAFLSGEQKKAIVDLLFKTNRKVTVKQLKEDYFKKIECFDSVEISGVEDRFNASLGTYHDLLKIIKDKDFLDNEENEDILEDIVLTLTLFEDREMIEERLKTYAHLFDDKVMKQLKRRRYTGWGRLSRKLINGIRDKQSGKTILDFLKSDGFANRNFMQLIHDDSLTFKEDIQKAQVSGQGDSLHEHIANLAGSPAIKKGILQTVKVVDELVKVMGRHKPENIVIEMARENQTTQKGQKNSRERMKRIEEGIKELGSQILKEHPVENTQLQNEKLYLYYLQNGRDMYVDQELDINRLSDYDVDHIVPQSFLKDDSIDNKVLTRSDKARGKSDNVPSEEVVKKMKNYWRQLLNAKLITQRKFDNLTKAERGGLSELDKAGFIKRQLVETRQITKHVAQILDSRMNTKYDENDKLIREVKVITLKSKLVSDFRKDFQFYKVREINNYHHAHDAYLNAVVGTALIKKYPKLESEFVYGDYKVYDVRKMIAKSEQEIGKATAKYFFYSNIMNFFKTEITLANGEIRKRPLIETNGETGEIVWDKGRDFATVRKVLSMPQVNIVKKTEVQTGGFSKESILPKRNSDKLIARKKDWDPKKYGGFDSPTVAYSVLVVAKVEKGKSKKLKSVKELLGITIMERSSFEKNPIDFLEAKGYKEVKKDLIIKLPKYSLFELENGRKRMLASAGELQKGNELALPSKYVNFLYLASHYEKLKGSPEDNEQKQLFVEQHKHYLDEIIEQISEFSKRVILADANLDKVLSAYNKHRDKPIREQAENIIHLFTLTNLGAPAAFKYFDTTIDRKRYTSTKEVLDATLIHQSITGLYETRIDLSQLGGDGGGGGGGSGGTLNIEDEYRLHEISTEPDVSPGSTWLSDFPQAWAETGGMGLAVRQAPLIIPLKATSTPVSIKQYPMSQEAKLGIKPHIQRLLDQGILVPCQSPWNTPLLPVKKPGTNDYRPVQGLREVNKRVEDIHPTVPNPYNLLSGLPTSHRWYTVLDLKDAFFCLRLHPTSQPLFASEWRDPGMGISGQLTWTRLPQGFKNSPTLFNEALHRGLADFRIQHPDLILLQYVDDLLLAATSELDCQQGTRALLKTLGNLGYRASAKKAQICQKQVKYLGYLLREGQRWLTEARKETVMGQPTPKTPRQLREFLGTAGFCRLWIPRFAEMAAPLYPLTKPGTLFNWGPDQQKAYHEIKQALLTAPALGLPDLTKPFELFVDEKQGYAKGVLTQKLGPWRRPVAYLSKKLDPVAAGWPPCLRMVAAIAVLTKDAGKLTMGQPLVILAPHAVEALVKQPPDRWLSNARMTHYQAMLLDTDRVQFGPVVALNPATLLPLPEEGAPHDCLEILAETHGTEPDLTDQPIPDADHTWYTDGSSFLQEGQRKAGAAVTTETEVIWARALPAGTSAQRAELIALTQALKMAEGKRLNVYTDSRYAFATAHIHGEIYKRRGWLTSEGREIKNKSEILALLKALFLPKRLSIIHCLGHQKGDSAEARGNRLADQAAREAAIKTPPDTSTLLAGKRTADGSEFEKRTADGSEFESPKKKAKVE

SEQ ID NO: 6598 - protein, 2082 aa, synthetic construct
MPAAKRVKLDGGDKKYSIGLDIGTNSVGWAVITDEYKVPSKKFKVLGNTDRHSIKKNLIGALLFDSGETAEATRLKRTARRRYTRRKNRICYLQEIFSNEMAKVDDSFFHRLEESFLVEEDKKHERHPIFGNIVDEVAYHEKYPTIYHLRKKLVDSTDKADLRLIYLALAHMIKFRGHFLIEGDLNPDNSDVDKLFIQLVQTYNQLFEENPINASGVDAKAILSARLSKSRRLENLIAQLPGEKKNGLFGNLIALSLGLTPNFKSNFDLAEDAKLQLSKDTYDDDLDNLLAQIGDQYADLFLAAKNLSDAILLSDILRVNTEITKAPLSASMIKRYDEHHQDLTLLKALVRQQLPEKYKEIFFDQSKNGYAGYIDGGASQEEFYKFIKPILEKMDGTEELLVKLNREDLLRKQRTFDNGSIPHQIHLGELHAILRRQEDFYPFLKDNREKIEKILTFRIPYYVGPLARGNSRFAWMTRKSEETITPWNFEEVVDKGASAQSFIERMTNFDKNLPNEKVLPKHSLLYEYFTVYNELTKVKYVTEGMRKPAFLSGEQKKAIVDLLFKTNRKVTVKQLKEDYFKKIECFDSVEISGVEDRFNASLGTYHDLLKIIKDKDFLDNEENEDILEDIVLTLTLFEDREMIEERLKTYAHLFDDKVMKQLKRRRYTGWGRLSRKLINGIRDKQSGKTILDFLKSDGFANRNFMQLIHDDSLTFKEDIQKAQVSGQGDSLHEHIANLAGSPAIKKGILQTVKVVDELVKVMGRHKPENIVIEMARENQTTQKGQKNSRERMKRIEEGIKELGSQILKEHPVENTQLQNEKLYLYYLQNGRDMYVDQELDINRLSDYDVDHIVPQSFLKDDSIDNKVLTRSDKARGKSDNVPSEEVVKKMKNYWRQLLNAKLITQRKFDNLTKAERGGLSELDKAGFIKRQLVETRQITKHVAQILDSRMNTKYDENDKLIREVKVITLKSKLVSDFRKDFQFYKVREINNYHHAHDAYLNAVVGTALIKKYPKLESEFVYGDYKVYDVRKMIAKSEQEIGKATAKYFFYSNIMNFFKTEITLANGEIRKRPLIETNGETGEIVWDKGRDFATVRKVLSMPQVNIVKKTEVQTGGFSKESILPKRNSDKLIARKKDWDPKKYGGFDSPTVAYSVLVVAKVEKGKSKKLKSVKELLGITIMERSSFEKNPIDFLEAKGYKEVKKDLIIKLPKYSLFELENGRKRMLASAGELQKGNELALPSKYVNFLYLASHYEKLKGSPEDNEQKQLFVEQHKHYLDEIIEQISEFSKRVILADANLDKVLSAYNKHRDKPIREQAENIIHLFTLTNLGAPAAFKYFDTTIDRKRYTSTKEVLDATLIHQSITGLYETRIDLSQLGGDGGGGGGGSGGIPWLMKKPLQLTTLVPLQEYEERLLKQTMLTGSYKEKLQSLFLKYDALWQHWENQVGHRRIKPHHIATGTVNPRPQKQYPINPKAKASIQTVINDLLKQGVLIQQNSIMNTPVYPVPKPDGKWRMVLDYREVNKTIPLIAAQNQHSAGILSSIFRGKYKTTLDLSNGFWAHSITPESYWLTAFTWLGQQYCWTRLPQGFLNSPALFNADVVDLLKEVPNVQVYVDDIYISHDDPREHLEQLEKVFSLLLNAGYVVSLKKSEIAQHEVEFLGFNITKEGRGLTETFKQKLLNITPPRDLKQLQSILGKLNFARNFIPNFSELVKPLYNIIATAPGKYITWTTDNSQQLQNIISMLNSAENLEERNPEVRLIMKVNTSPSAGYIRFYNEFAKRPIMYLNYVYTKAEVKFTNTEKLLTTIHKGLIKALDLGMGQEILVYSPIVSMTKIQKTPLPERKALPIRWITWMSYLEDPRIQFHYDKTLPELQQVPTVTDDIIAKIKHPSEFSMVFYTDGSAIKHPNVNKSHNAGMGIAQVQFKPEFTVINTWSIPLGDHTAQLAEVAAVEFACKKALKIDGPVLIVTDSFYVAESVNKELPYWQSNGFFNNKKKPLKHVSKWKSIADCIQLKPDIIIIHEKGHQPTASTFHTEGNNLADKLATQGSYVVNAGKRTADGSEFEKRTADGSEFESPKKKAKVE

SEQ ID NO: 6599 - protein, 2089 aa, synthetic construct
MPAAKRVKLDGGDKKYSIGLDIGTNSVGWAVITDEYKVPSKKFKVLGNTDRHSIKKNLIGALLFDSGETAEATRLKRTARRRYTRRKNRICYLQEIFSNEMAKVDDSFFHRLEESFLVEEDKKHERHPIFGNIVDEVAYHEKYPTIYHLRKKLVDSTDKADLRLIYLALAHMIKFRGHFLIEGDLNPDNSDVDKLFIQLVQTYNQLFEENPINASGVDAKAILSARLSKSRRLENLIAQLPGEKKNGLFGNLIALSLGLTPNFKSNFDLAEDAKLQLSKDTYDDDLDNLLAQIGDQYADLFLAAKNLSDAILLSDILRVNTEITKAPLSASMIKRYDEHHQDLTLLKALVRQQLPEKYKEIFFDQSKNGYAGYIDGGASQEEFYKFIKPILEKMDGTEELLVKLNREDLLRKQRTFDNGSIPHQIHLGELHAILRRQEDFYPFLKDNREKIEKILTFRIPYYVGPLARGNSRFAWMTRKSEETITPWNFEEVVDKGASAQSFIERMTNFDKNLPNEKVLPKHSLLYEYFTVYNELTKVKYVTEGMRKPAFLSGEQKKAIVDLLFKTNRKVTVKQLKEDYFKKIECFDSVEISGVEDRFNASLGTYHDLLKIIKDKDFLDNEENEDILEDIVLTLTLFEDREMIEERLKTYAHLFDDKVMKQLKRRRYTGWGRLSRKLINGIRDKQSGKTILDFLKSDGFANRNFMQLIHDDSLTFKEDIQKAQVSGQGDSLHEHIANLAGSPAIKKGILQTVKVVDELVKVMGRHKPENIVIEMARENQTTQKGQKNSRERMKRIEEGIKELGSQILKEHPVENTQLQNEKLYLYYLQNGRDMYVDQELDINRLSDYDVDHIVPQSFLKDDSIDNKVLTRSDKARGKSDNVPSEEVVKKMKNYWRQLLNAKLITQRKFDNLTKAERGGLSELDKAGFIKRQLVETRQITKHVAQILDSRMNTKYDENDKLIREVKVITLKSKLVSDFRKDFQFYKVREINNYHHAHDAYLNAVVGTALIKKYPKLESEFVYGDYKVYDVRKMIAKSEQEIGKATAKYFFYSNIMNFFKTEITLANGEIRKRPLIETNGETGEIVWDKGRDFATVRKVLSMPQVNIVKKTEVQTGGFSKESILPKRNSDKLIARKKDWDPKKYGGFDSPTVAYSVLVVAKVEKGKSKKLKSVKELLGITIMERSSFEKNPIDFLEAKGYKEVKKDLIIKLPKYSLFELENGRKRMLASAGELQKGNELALPSKYVNFLYLASHYEKLKGSPEDNEQKQLFVEQHKHYLDEIIEQISEFSKRVILADANLDKVLSAYNKHRDKPIREQAENIIHLFTLTNLGAPAAFKYFDTTIDRKRYTSTKEVLDATLIHQSITGLYETRIDLSQLGGDGGGGGGGSGGVLNLEEEYRLHEKPVPSSIDPSWLQLFPTVWAERAGMGLANQVPPVVVELRSGASPVAVRQYPMSKEAREGIRPHIQRFLDLGVLVPCQSPWNTPLLPVKKPGTNDYRPVQDLREINKRVQDIHPTVPNPYNLLSSLPPSHTWYSVLDLKDAFFCLKLHPNSQPLFAFEWRDPEKGNTGQLTWTRLPQGFKNSPTLFNEALHRDLAPFRALNPQVVLLQYVDDLLVAAPTYRDCKEGTQKLLQELSKLGYRVSAKKAQLCQKEVTYLGYLLKEGKRWLTPARKATVMKIPPPTTPRQVREFLGTAGFCRLWIPGFASLAAPLYPLTKPSIPFIWTEEHQKAFDRIKEALLSAPALALPDLTKPFTLYVDERAGVARGVLTQTLGPWRRPVAYLSKKLDPVASGWPTCLKAVAAVALLLKDADKLTLGQNVTVIASHSLESIVRQPPDRWMTNARMTHYQSLLLNERVSFAPPAVLNPATLLPVESEATPVHRCSEILAEETGTRRDLKDQPLPGVPAWYTDGSSFIAEGKRRAGAAIVDGKRTVWASSLPEGTSAQKAELVALTQALRLAEGKDINIYTDSRYAFATAHIHGAIYKQRGWLTSAGKDIKNKEEILALLEAIHLPKRVAIIHCPGHQKGNDPVATGNRRADEAAKQAALSTRVLAETTKPAGKRTADGSEFEKRTADGSEFESPKKKAKVE

SEQ ID NO: 6600 - protein, 2089 aa, synthetic construct
MPAAKRVKLDGGDKKYSIGLDIGTNSVGWAVITDEYKVPSKKFKVLGNTDRHSIKKNLIGALLFDSGETAEATRLKRTARRRYTRRKNRICYLQEIFSNEMAKVDDSFFHRLEESFLVEEDKKHERHPIFGNIVDEVAYHEKYPTIYHLRKKLVDSTDKADLRLIYLALAHMIKFRGHFLIEGDLNPDNSDVDKLFIQLVQTYNQLFEENPINASGVDAKAILSARLSKSRRLENLIAQLPGEKKNGLFGNLIALSLGLTPNFKSNFDLAEDAKLQLSKDTYDDDLDNLLAQIGDQYADLFLAAKNLSDAILLSDILRVNTEITKAPLSASMIKRYDEHHQDLTLLKALVRQQLPEKYKEIFFDQSKNGYAGYIDGGASQEEFYKFIKPILEKMDGTEELLVKLNREDLLRKQRTFDNGSIPHQIHLGELHAILRRQEDFYPFLKDNREKIEKILTFRIPYYVGPLARGNSRFAWMTRKSEETITPWNFEEVVDKGASAQSFIERMTNFDKNLPNEKVLPKHSLLYEYFTVYNELTKVKYVTEGMRKPAFLSGEQKKAIVDLLFKTNRKVTVKQLKEDYFKKIECFDSVEISGVEDRFNASLGTYHDLLKIIKDKDFLDNEENEDILEDIVLTLTLFEDREMIEERLKTYAHLFDDKVMKQLKRRRYTGWGRLSRKLINGIRDKQSGKTILDFLKSDGFANRNFMQLIHDDSLTFKEDIQKAQVSGQGDSLHEHIANLAGSPAIKKGILQTVKVVDELVKVMGRHKPENIVIEMARENQTTQKGQKNSRERMKRIEEGIKELGSQILKEHPVENTQLQNEKLYLYYLQNGRDMYVDQELDINRLSDYDVDHIVPQSFLKDDSIDNKVLTRSDKARGKSDNVPSEEVVKKMKNYWRQLLNAKLITQRKFDNLTKAERGGLSELDKAGFIKRQLVETRQITKHVAQILDSRMNTKYDENDKLIREVKVITLKSKLVSDFRKDFQFYKVREINNYHHAHDAYLNAVVGTALIKKYPKLESEFVYGDYKVYDVRKMIAKSEQEIGKATAKYFFYSNIMNFFKTEITLANGEIRKRPLIETNGETGEIVWDKGRDFATVRKVLSMPQVNIVKKTEVQTGGFSKESILPKRNSDKLIARKKDWDPKKYGGFDSPTVAYSVLVVAKVEKGKSKKLKSVKELLGITIMERSSFEKNPIDFLEAKGYKEVKKDLIIKLPKYSLFELENGRKRMLASAGELQKGNELALPSKYVNFLYLASHYEKLKGSPEDNEQKQLFVEQHKHYLDEIIEQISEFSKRVILADANLDKVLSAYNKHRDKPIREQAENIIHLFTLTNLGAPAAFKYFDTTIDRKRYTSTKEVLDATLIHQSITGLYETRIDLSQLGGDGGGGGGGSGGVLNLEEEYRLHEKPVPSSIDPSWLQLFPTVWAERAGMGLANQVPPVVVELRSGASPVAVRQYPMSKEAREGIRPHIQRFLDLGVLVPCQSPWNTPLLPVKKPGTNDYRPVQDLREINKRVQDIHPTVPNPYNLLSSLPPSHTWYSVLDLKDAFFCLKLHPNSQPLFAFEWRDPEKGNTGQLTWTRLPQGFKNSPTLFNEALHRDLAPFRALNPQVVLLQYVDDLLVAAPTYRDCKEGTQKLLQELSKLGYRVSAKKAQLCQKEVTYLGYLLKEGKRWLTPARKATVMKIPPPTTPRQVREFLGKAGFCRLFIPGFASLAAPLYPLTKPSIPFIWTEEHQKAFDRIKEALLSAPALALPDLTKPFTLYVDERAGVARGVLTQTLGPWRRPVAYLSKKLDPVASGWPTCLKAVAAVALLLKDADKLTLGQNVTVIASHSLESIVRQPPDRWMTNARMTHYQSLLLNERVSFAPPAVLNPATLLPVESEATPVHRCSEILAEETGTRRDLKDQPLPGVPAWYTDGSSFIAEGKRRAGAAIVDGKRTVWASSLPEGTSAQKAELVALTQALRLAEGKDINIYTDSRYAFATAHIHGAIYKQRGWLTSAGKDIKNKEEILALLEAIHLPKRVAIIHCPGHQKGNDPVATGNRRADEAAKQAALSTRVLAETTKPAGKRTADGSEFEKRTADGSEFESPKKKAKVE

SEQ ID NO: 6601 - protein, 2091 aa, synthetic construct
MPAAKRVKLDGGDKKYSIGLDIGTNSVGWAVITDEYKVPSKKFKVLGNTDRHSIKKNLIGALLFDSGETAEATRLKRTARRRYTRRKNRICYLQEIFSNEMAKVDDSFFHRLEESFLVEEDKKHERHPIFGNIVDEVAYHEKYPTIYHLRKKLVDSTDKADLRLIYLALAHMIKFRGHFLIEGDLNPDNSDVDKLFIQLVQTYNQLFEENPINASGVDAKAILSARLSKSRRLENLIAQLPGEKKNGLFGNLIALSLGLTPNFKSNFDLAEDAKLQLSKDTYDDDLDNLLAQIGDQYADLFLAAKNLSDAILLSDILRVNTEITKAPLSASMIKRYDEHHQDLTLLKALVRQQLPEKYKEIFFDQSKNGYAGYIDGGASQEEFYKFIKPILEKMDGTEELLVKLNREDLLRKQRTFDNGSIPHQIHLGELHAILRRQEDFYPFLKDNREKIEKILTFRIPYYVGPLARGNSRFAWMTRKSEETITPWNFEEVVDKGASAQSFIERMTNFDKNLPNEKVLPKHSLLYEYFTVYNELTKVKYVTEGMRKPAFLSGEQKKAIVDLLFKTNRKVTVKQLKEDYFKKIECFDSVEISGVEDRFNASLGTYHDLLKIIKDKDFLDNEENEDILEDIVLTLTLFEDREMIEERLKTYAHLFDDKVMKQLKRRRYTGWGRLSRKLINGIRDKQSGKTILDFLKSDGFANRNFMQLIHDDSLTFKEDIQKAQVSGQGDSLHEHIANLAGSPAIKKGILQTVKVVDELVKVMGRHKPENIVIEMARENQTTQKGQKNSRERMKRIEEGIKELGSQILKEHPVENTQLQNEKLYLYYLQNGRDMYVDQELDINRLSDYDVDHIVPQSFLKDDSIDNKVLTRSDKARGKSDNVPSEEVVKKMKNYWRQLLNAKLITQRKFDNLTKAERGGLSELDKAGFIKRQLVETRQITKHVAQILDSRMNTKYDENDKLIREVKVITLKSKLVSDFRKDFQFYKVREINNYHHAHDAYLNAVVGTALIKKYPKLESEFVYGDYKVYDVRKMIAKSEQEIGKATAKYFFYSNIMNFFKTEITLANGEIRKRPLIETNGETGEIVWDKGRDFATVRKVLSMPQVNIVKKTEVQTGGFSKESILPKRNSDKLIARKKDWDPKKYGGFDSPTVAYSVLVVAKVEKGKSKKLKSVKELLGITIMERSSFEKNPIDFLEAKGYKEVKKDLIIKLPKYSLFELENGRKRMLASAGELQKGNELALPSKYVNFLYLASHYEKLKGSPEDNEQKQLFVEQHKHYLDEIIEQISEFSKRVILADANLDKVLSAYNKHRDKPIREQAENIIHLFTLTNLGAPAAFKYFDTTIDRKRYTSTKEVLDATLIHQSITGLYETRIDLSQLGGDGGGGGGGSGGTLNIEDEYRLHETSKEPDVPLGSTWLSDFPQAWAETGGMGLAVRQAPLIIPLKATSTPVSIKQYPMSQEARLGIKPHIQRLLDQGILVPCQSPWNTPLLPVKKPGTNDYRPVQDLREVNKRVEDIHPTVPNPYNLLSGLPPSHQWYTVLDLKDAFFCLRLHPTSQPLFAFEWRDPEMGISGQLTWTRLPQGFKNSPTLFNEALHRDLADFRIQHPDLILLQYVDDLLLAATSEQDCQRGTRALLQTLGNLGYRASAKKAQICQKQVKYLGYLLKEGQRWLTEARKETVMGQPTPKTPRQLREFLGKAGFCRLFIPGFAEMAAPLYPLTKPGTLFNWGPDQQKAYQEIKQALLTAPALGLPDLTKPFELFVDEKQGYAKGVLTQKLGPWRRPVAYLSKKLDPVAAGWPPCLRMVAAIAVLTKDAGKLTMGQPLVILAPHAVEALVKQPPDRWLSNARMTHYQAMLLDTDRVQFGPVVALNPATLLPLPEKEAPHDCLEILAETHGTRPDLTDQPIPDADYTWYTDGSSFLQEGQRRAGAAVTTETEVIWARALPAGTSAQRAELIALTQALKMAEGKKLNVYTDSRYAFATAHVHGEIYRRRGWLTSEGREIKNKNEILALLKALFLPKRLSIIHCPGHQKGNSAEARGNRMADQAAREAAMKAVLETSTLLAGKRTADGSEFEKRTADGSEFESPKKKAKVE

SEQ ID NO: 6602 - protein, 2168 aa, synthetic construct
MPAAKRVKLDGGDKKYSIGLDIGTNSVGWAVITDEYKVPSKKFKVLGNTDRHSIKKNLIGALLFDSGETAEATRLKRTARRRYTRRKNRICYLQEIFSNEMAKVDDSFFHRLEESFLVEEDKKHERHPIFGNIVDEVAYHEKYPTIYHLRKKLVDSTDKADLRLIYLALAHMIKFRGHFLIEGDLNPDNSDVDKLFIQLVQTYNQLFEENPINASGVDAKAILSARLSKSRRLENLIAQLPGEKKNGLFGNLIALSLGLTPNFKSNFDLAEDAKLQLSKDTYDDDLDNLLAQIGDQYADLFLAAKNLSDAILLSDILRVNTEITKAPLSASMIKRYDEHHQDLTLLKALVRQQLPEKYKEIFFDQSKNGYAGYIDGGASQEEFYKFIKPILEKMDGTEELLVKLNREDLLRKQRTFDNGSIPHQIHLGELHAILRRQEDFYPFLKDNREKIEKILTFRIPYYVGPLARGNSRFAWMTRKSEETITPWNFEEVVDKGASAQSFIERMTNFDKNLPNEKVLPKHSLLYEYFTVYNELTKVKYVTEGMRKPAFLSGEQKKAIVDLLFKTNRKVTVKQLKEDYFKKIECFDSVEISGVEDRFNASLGTYHDLLKIIKDKDFLDNEENEDILEDIVLTLTLFEDREMIEERLKTYAHLFDDKVMKQLKRRRYTGWGRLSRKLINGIRDKQSGKTILDFLKSDGFANRNFMQLIHDDSLTFKEDIQKAQVSGQGDSLHEHIANLAGSPAIKKGILQTVKVVDELVKVMGRHKPENIVIEMARENQTTQKGQKNSRERMKRIEEGIKELGSQILKEHPVENTQLQNEKLYLYYLQNGRDMYVDQELDINRLSDYDVDHIVPQSFLKDDSIDNKVLTRSDKARGKSDNVPSEEVVKKMKNYWRQLLNAKLITQRKFDNLTKAERGGLSELDKAGFIKRQLVETRQITKHVAQILDSRMNTKYDENDKLIREVKVITLKSKLVSDFRKDFQFYKVREINNYHHAHDAYLNAVVGTALIKKYPKLESEFVYGDYKVYDVRKMIAKSEQEIGKATAKYFFYSNIMNFFKTEITLANGEIRKRPLIETNGETGEIVWDKGRDFATVRKVLSMPQVNIVKKTEVQTGGFSKESILPKRNSDKLIARKKDWDPKKYGGFDSPTVAYSVLVVAKVEKGKSKKLKSVKELLGITIMERSSFEKNPIDFLEAKGYKEVKKDLIIKLPKYSLFELENGRKRMLASAGELQKGNELALPSKYVNFLYLASHYEKLKGSPEDNEQKQLFVEQHKHYLDEIIEQISEFSKRVILADANLDKVLSAYNKHRDKPIREQAENIIHLFTLTNLGAPAAFKYFDTTIDRKRYTSTKEVLDATLIHQSITGLYETRIDLSQLGGDGGGGSGSSGGMDLLKPLTVERKGVKIKGYWNSQADITCVPKDLLQGEEPVRQQNVTTIHGTQEGDVYYVNLKIDGRRINTEVIGTTLDYAIITPGDVPWILKKPLELTIKLDLEEQQGTLLNNSILSKKGKEELKQLFEKYSALWQSWENQVGHRRIRPHKIATGTVKPTPQKQYHINPKAKPDIQIVINDLLKQGVLIQKESTMNTPVYPVPKPNGRWRMVLDYRAVNKVTPLIAVQNQHSYGILGSLFKGRYKTTIDLSNGFWAHPIVPEDYWITAFTWQGKQYCWTVLPQGFLNSPGLFTGDVVDLLQGIPNVEVYVDDVYISHDSEKEHLEYLDILFNRLKEAGYIISLKKSNIANSIVDFLGFQITNEGRGLTDTFKEKLENITAPTTLKQLQSILGLLNFARNFIPDFTELIAPLYALIPKSTKNYVPWQIEHSTTLETLITKLNGAEYLQGRKGDKTLIMKVNASYTTGYIRYYNEGEKKPISYVSIVFSKTELKFTELEKLLTTVHKGLLKALDLSMGQNIHVYSPIVSMQNIQKTPQTAKKALASRWLSWLSYLEDPRIRFFYDPQMPALKDLPAVDTGKDNKKHPSNFQHIFYTDGSAITSPTKEGHLNAGMGIVYFINKDGNLQKQQEWSISLGNHTAQFAEIAAFEFALKKCLPLGGNILVVTDSNYVAKAYNEELDVWASNGFVNNRKKPLKHISKWKSVADLKRLRPDVVVTHEPGHQKLDSSPHAYGNNLADQLATQASFKVHAGKRTADGSEFEKRTADGSEFESPKKKAKVE

SEQ ID NO: 6603 - protein, 2090 aa, synthetic construct
MPAAKRVKLDGGDKKYSIGLDIGTNSVGWAVITDEYKVPSKKFKVLGNTDRHSIKKNLIGALLFDSGETAEATRLKRTARRRYTRRKNRICYLQEIFSNEMAKVDDSFFHRLEESFLVEEDKKHERHPIFGNIVDEVAYHEKYPTIYHLRKKLVDSTDKADLRLIYLALAHMIKFRGHFLIEGDLNPDNSDVDKLFIQLVQTYNQLFEENPINASGVDAKAILSARLSKSRRLENLIAQLPGEKKNGLFGNLIALSLGLTPNFKSNFDLAEDAKLQLSKDTYDDDLDNLLAQIGDQYADLFLAAKNLSDAILLSDILRVNTEITKAPLSASMIKRYDEHHQDLTLLKALVRQQLPEKYKEIFFDQSKNGYAGYIDGGASQEEFYKFIKPILEKMDGTEELLVKLNREDLLRKQRTFDNGSIPHQIHLGELHAILRRQEDFYPFLKDNREKIEKILTFRIPYYVGPLARGNSRFAWMTRKSEETITPWNFEEVVDKGASAQSFIERMTNFDKNLPNEKVLPKHSLLYEYFTVYNELTKVKYVTEGMRKPAFLSGEQKKAIVDLLFKTNRKVTVKQLKEDYFKKIECFDSVEISGVEDRFNASLGTYHDLLKIIKDKDFLDNEENEDILEDIVLTLTLFEDREMIEERLKTYAHLFDDKVMKQLKRRRYTGWGRLSRKLINGIRDKQSGKTILDFLKSDGFANRNFMQLIHDDSLTFKEDIQKAQVSGQGDSLHEHIANLAGSPAIKKGILQTVKVVDELVKVMGRHKPENIVIEMARENQTTQKGQKNSRERMKRIEEGIKELGSQILKEHPVENTQLQNEKLYLYYLQNGRDMYVDQELDINRLSDYDVDHIVPQSFLKDDSIDNKVLTRSDKARGKSDNVPSEEVVKKMKNYWRQLLNAKLITQRKFDNLTKAERGGLSELDKAGFIKRQLVETRQITKHVAQILDSRMNTKYDENDKLIREVKVITLKSKLVSDFRKDFQFYKVREINNYHHAHDAYLNAVVGTALIKKYPKLESEFVYGDYKVYDVRKMIAKSEQEIGKATAKYFFYSNIMNFFKTEITLANGEIRKRPLIETNGETGEIVWDKGRDFATVRKVLSMPQVNIVKKTEVQTGGFSKESILPKRNSDKLIARKKDWDPKKYGGFDSPTVAYSVLVVAKVEKGKSKKLKSVKELLGITIMERSSFEKNPIDFLEAKGYKEVKKDLIIKLPKYSLFELENGRKRMLASAGELQKGNELALPSKYVNFLYLASHYEKLKGSPEDNEQKQLFVEQHKHYLDEIIEQISEFSKRVILADANLDKVLSAYNKHRDKPIREQAENIIHLFTLTNLGAPAAFKYFDTTIDRKRYTSTKEVLDATLIHQSITGLYETRIDLSQLGGDGGGGSGSSGGTLQLEEEYRLFEPESTQKQEMDIWLKNFPQAWAETGGMGTAHCQAPVLIQLKATATPISIRQYPMPHEAYQGIKPHIRRMLDQGILKPCQSPWNTPLLPVKKPGTEDYRPVQDLREVNKRVEDIHPTVPNPYNLLSTLPPSHPWYTVLDLKDAFFCLRLHSESQLLFAFEWRDPEIGLSGQLTWTRLPQGFKNSPTLFNEALHSDLADFRVRYPALVLLQYVDDLLLAAATRTECLEGTKALLETLGNKGYRASAKKAQICLQEVTYLGYSLKDGQRWLTKARKEAILSIPVPKNSRQVREFLGKAGYCRLFIPGFAELAAPLYPLTRPGTLFQWGTEQQLAFEDIKKALLSSPALGLPDITKPFELFIDENSGFAKGVLVQKLGPWKRPVAYLSKKLDTVASGWPPCLRMVAAIAILVKDAGKLTLGQPLTILTSHPVEALVRQPPNKWLSNARMTHYQAMLLDAERVHFGPTVSLNPATLLPLPSGGNHHDCLQILAETHGTRPDLTDQPLPDADLTWYTDGSSFIRNGEREAGAAVTTESEVIWAAPLPPGTSAQRAELIALTQALKMAEGKKLTVYTDSRYAFATTHVHGEIYRRRGWLTSEGKEIKNKNEILALLEALFLPKRLSIIHCPGHQKGDSPQAKGNRLADDTAKKAATETHSSLTVLPAGKRTADGSEFEKRTADGSEFESPKKKAKVE

SEQ ID NO: 6604 - protein, 2213 aa, synthetic construct
MPAAKRVKLDGGDKKYSIGLDIGTNSVGWAVITDEYKVPSKKFKVLGNTDRHSIKKNLIGALLFDSGETAEATRLKRTARRRYTRRKNRICYLQEIFSNEMAKVDDSFFHRLEESFLVEEDKKHERHPIFGNIVDEVAYHEKYPTIYHLRKKLVDSTDKADLRLIYLALAHMIKFRGHFLIEGDLNPDNSDVDKLFIQLVQTYNQLFEENPINASGVDAKAILSARLSKSRRLENLIAQLPGEKKNGLFGNLIALSLGLTPNFKSNFDLAEDAKLQLSKDTYDDDLDNLLAQIGDQYADLFLAAKNLSDAILLSDILRVNTEITKAPLSASMIKRYDEHHQDLTLLKALVRQQLPEKYKEIFFDQSKNGYAGYIDGGASQEEFYKFIKPILEKMDGTEELLVKLNREDLLRKQRTFDNGSIPHQIHLGELHAILRRQEDFYPFLKDNREKIEKILTFRIPYYVGPLARGNSRFAWMTRKSEETITPWNFEEVVDKGASAQSFIERMTNFDKNLPNEKVLPKHSLLYEYFTVYNELTKVKYVTEGMRKPAFLSGEQKKAIVDLLFKTNRKVTVKQLKEDYFKKIECFDSVEISGVEDRFNASLGTYHDLLKIIKDKDFLDNEENEDILEDIVLTLTLFEDREMIEERLKTYAHLFDDKVMKQLKRRRYTGWGRLSRKLINGIRDKQSGKTILDFLKSDGFANRNFMQLIHDDSLTFKEDIQKAQVSGQGDSLHEHIANLAGSPAIKKGILQTVKVVDELVKVMGRHKPENIVIEMARENQTTQKGQKNSRERMKRIEEGIKELGSQILKEHPVENTQLQNEKLYLYYLQNGRDMYVDQELDINRLSDYDVDHIVPQSFLKDDSIDNKVLTRSDKARGKSDNVPSEEVVKKMKNYWRQLLNAKLITQRKFDNLTKAERGGLSELDKAGFIKRQLVETRQITKHVAQILDSRMNTKYDENDKLIREVKVITLKSKLVSDFRKDFQFYKVREINNYHHAHDAYLNAVVGTALIKKYPKLESEFVYGDYKVYDVRKMIAKSEQEIGKATAKYFFYSNIMNFFKTEITLANGEIRKRPLIETNGETGEIVWDKGRDFATVRKVLSMPQVNIVKKTEVQTGGFSKESILPKRNSDKLIARKKDWDPKKYGGFDSPTVAYSVLVVAKVEKGKSKKLKSVKELLGITIMERSSFEKNPIDFLEAKGYKEVKKDLIIKLPKYSLFELENGRKRMLASAGELQKGNELALPSKYVNFLYLASHYEKLKGSPEDNEQKQLFVEQHKHYLDEIIEQISEFSKRVILADANLDKVLSAYNKHRDKPIREQAENIIHLFTLTNLGAPAAFKYFDTTIDRKRYTSTKEVLDATLIHQSITGLYETRIDLSQLGGDGGGGSGSSGGTLGDQGSRGSDPLPEPRVTLTVEGIPTEFLVNTGAEHSVLTKPMGKMGSKRTVVAGATGSKVYPWTTKRLLKIGQKQVTHSFLVIPECPAPLLGRDLLTKLKAQIQFSTEGPQVTWEDRPAMCLVLNLEEEYRLHEKPVPPSIDPSWLQLFPMVWAEKAGMGLANQVPPVVVELKSDASPVAVRQYPMSKEAREGIRPHIQRFLDLGILVPCQSPWNTPLLPVKKPGTNDYRPVQDLREVNKRVQDIHPTVPNPYNLLSSLPPSHTWYSVLDLKDAFFCLKLHPNSQPLFAFEWRDPEKGNTGQLTWTRLPQGFKNSPTLFDEALHRDLASFRALNPQVVMLQYVDDLLVAAPTYRDCKEGTRRLLQELSKLGYRVSAKKAQLCREEVTYLGYLLKGGKRWLTPARKATVMKIPTPTTPRQVREFLGTAGFCRLWIPGFASLAAPLYPLTREKVPFTWTEAHQEAFGRIKEALLSAPALALPDLTKPFALYVDEKEGVARGVLTQTLGPWRRPVAYLSKKLDPVASGWPTCLKAIAAVALLLKDADKLTLGQNVLVIAPHNLESIVRQPPDRWMTNARMTHYQSLLLNERVSFAPPAILNPATLLPVESDDTPIHICSEILAEETGTRPDLRDQPLPGVPAWYTDGSSFIMDGRRQAGAAIVDNKRTVWASNLPEGTSAQKAELIALTQALRLAEGKSINIYTDSRYAFATAHVHGAIYKQRGLLTSAGKDIKNKEEILALLEAIHLPKRVAIIHCPGHQRGTDPVATGNRKADEAAKQAAQSTRILTETTKNAGKRTADGSEFEKRTADGSEFESPKKKAKVE

SEQ ID NO: 6605 - protein, 2091 aa, synthetic construct
MPAAKRVKLDGGDKKYSIGLDIGTNSVGWAVITDEYKVPSKKFKVLGNTDRHSIKKNLIGALLFDSGETAEATRLKRTARRRYTRRKNRICYLQEIFSNEMAKVDDSFFHRLEESFLVEEDKKHERHPIFGNIVDEVAYHEKYPTIYHLRKKLVDSTDKADLRLIYLALAHMIKFRGHFLIEGDLNPDNSDVDKLFIQLVQTYNQLFEENPINASGVDAKAILSARLSKSRRLENLIAQLPGEKKNGLFGNLIALSLGLTPNFKSNFDLAEDAKLQLSKDTYDDDLDNLLAQIGDQYADLFLAAKNLSDAILLSDILRVNTEITKAPLSASMIKRYDEHHQDLTLLKALVRQQLPEKYKEIFFDQSKNGYAGYIDGGASQEEFYKFIKPILEKMDGTEELLVKLNREDLLRKQRTFDNGSIPHQIHLGELHAILRRQEDFYPFLKDNREKIEKILTFRIPYYVGPLARGNSRFAWMTRKSEETITPWNFEEVVDKGASAQSFIERMTNFDKNLPNEKVLPKHSLLYEYFTVYNELTKVKYVTEGMRKPAFLSGEQKKAIVDLLFKTNRKVTVKQLKEDYFKKIECFDSVEISGVEDRFNASLGTYHDLLKIIKDKDFLDNEENEDILEDIVLTLTLFEDREMIEERLKTYAHLFDDKVMKQLKRRRYTGWGRLSRKLINGIRDKQSGKTILDFLKSDGFANRNFMQLIHDDSLTFKEDIQKAQVSGQGDSLHEHIANLAGSPAIKKGILQTVKVVDELVKVMGRHKPENIVIEMARENQTTQKGQKNSRERMKRIEEGIKELGSQILKEHPVENTQLQNEKLYLYYLQNGRDMYVDQELDINRLSDYDVDHIVPQSFLKDDSIDNKVLTRSDKARGKSDNVPSEEVVKKMKNYWRQLLNAKLITQRKFDNLTKAERGGLSELDKAGFIKRQLVETRQITKHVAQILDSRMNTKYDENDKLIREVKVITLKSKLVSDFRKDFQFYKVREINNYHHAHDAYLNAVVGTALIKKYPKLESEFVYGDYKVYDVRKMIAKSEQEIGKATAKYFFYSNIMNFFKTEITLANGEIRKRPLIETNGETGEIVWDKGRDFATVRKVLSMPQVNIVKKTEVQTGGFSKESILPKRNSDKLIARKKDWDPKKYGGFDSPTVAYSVLVVAKVEKGKSKKLKSVKELLGITIMERSSFEKNPIDFLEAKGYKEVKKDLIIKLPKYSLFELENGRKRMLASAGELQKGNELALPSKYVNFLYLASHYEKLKGSPEDNEQKQLFVEQHKHYLDEIIEQISEFSKRVILADANLDKVLSAYNKHRDKPIREQAENIIHLFTLTNLGAPAAFKYFDTTIDRKRYTSTKEVLDATLIHQSITGLYETRIDLSQLGGDGGGGSGSSGGTLGIEDEYRLHETSTEPDVSLGSTWLSDFPQAWAETGGMGLAVRQAPLIIPLKATSTPVSIQQYPMSHEARLGIKPHIQRLLDQGILVPCQSPWNTPLLPVKKPGTNDYRPVQDLREVNKRVEDIHPTVPNPYNLLSGLPPSHQWYTVLDLKDAFFCLRLHPTSQPLFAFEWRDPGMGISGQLTWTRLPQGFKNSPTLFDEALHRDLADFRIQHPDLILLQYVDDILLAATSELDCQQGTRALLQTLGDLGYRASAKKAQICQKQVKYLGYLLREGQRWLTEARKETVMGQPVPKTPRQLREFLGTAGFCRLWIPGFAEMAAPLYPLTKTGTLFSWGPDQQKAYQEIKQALLTAPALGLPDLTKPFELFVDEKQGYAKGVLTQKLGPWRRPVAYLSKKLDPVAAGWPPCLRMVAAIAVLTKDAGKLTMGQPLVILAPHAVEALVKQPPDRWLSNARMTHYQAMLLDTDRVQFGPVVALNPATLLPLPEEGAPHDCLEILAETHGTRPDLTDQPIPDADHTWYTDGSSFLQEGQRKAGAAVTTETEVIWAGALPAGTSAQRAELIALTQALKMAEGKRLNVYTDSRYAFATAHIHGEIYRRRGLLTSEGREIKNKSEILALLKALFLPKRLSIIHCLGHQKGDSAEARGNRLADQAAREAAIKTPPDTSTLLAGKRTADGSEFEKRTADGSEFESPKKKAKVE

SEQ ID NO: 6606 - protein, 2091 aa, synthetic construct
MPAAKRVKLDGGDKKYSIGLDIGTNSVGWAVITDEYKVPSKKFKVLGNTDRHSIKKNLIGALLFDSGETAEATRLKRTARRRYTRRKNRICYLQEIFSNEMAKVDDSFFHRLEESFLVEEDKKHERHPIFGNIVDEVAYHEKYPTIYHLRKKLVDSTDKADLRLIYLALAHMIKFRGHFLIEGDLNPDNSDVDKLFIQLVQTYNQLFEENPINASGVDAKAILSARLSKSRRLENLIAQLPGEKKNGLFGNLIALSLGLTPNFKSNFDLAEDAKLQLSKDTYDDDLDNLLAQIGDQYADLFLAAKNLSDAILLSDILRVNTEITKAPLSASMIKRYDEHHQDLTLLKALVRQQLPEKYKEIFFDQSKNGYAGYIDGGASQEEFYKFIKPILEKMDGTEELLVKLNREDLLRKQRTFDNGSIPHQIHLGELHAILRRQEDFYPFLKDNREKIEKILTFRIPYYVGPLARGNSRFAWMTRKSEETITPWNFEEVVDKGASAQSFIERMTNFDKNLPNEKVLPKHSLLYEYFTVYNELTKVKYVTEGMRKPAFLSGEQKKAIVDLLFKTNRKVTVKQLKEDYFKKIECFDSVEISGVEDRFNASLGTYHDLLKIIKDKDFLDNEENEDILEDIVLTLTLFEDREMIEERLKTYAHLFDDKVMKQLKRRRYTGWGRLSRKLINGIRDKQSGKTILDFLKSDGFANRNFMQLIHDDSLTFKEDIQKAQVSGQGDSLHEHIANLAGSPAIKKGILQTVKVVDELVKVMGRHKPENIVIEMARENQTTQKGQKNSRERMKRIEEGIKELGSQILKEHPVENTQLQNEKLYLYYLQNGRDMYVDQELDINRLSDYDVDHIVPQSFLKDDSIDNKVLTRSDKARGKSDNVPSEEVVKKMKNYWRQLLNAKLITQRKFDNLTKAERGGLSELDKAGFIKRQLVETRQITKHVAQILDSRMNTKYDENDKLIREVKVITLKSKLVSDFRKDFQFYKVREINNYHHAHDAYLNAVVGTALIKKYPKLESEFVYGDYKVYDVRKMIAKSEQEIGKATAKYFFYSNIMNFFKTEITLANGEIRKRPLIETNGETGEIVWDKGRDFATVRKVLSMPQVNIVKKTEVQTGGFSKESILPKRNSDKLIARKKDWDPKKYGGFDSPTVAYSVLVVAKVEKGKSKKLKSVKELLGITIMERSSFEKNPIDFLEAKGYKEVKKDLIIKLPKYSLFELENGRKRMLASAGELQKGNELALPSKYVNFLYLASHYEKLKGSPEDNEQKQLFVEQHKHYLDEIIEQISEFSKRVILADANLDKVLSAYNKHRDKPIREQAENIIHLFTLTNLGAPAAFKYFDTTIDRKRYTSTKEVLDATLIHQSITGLYETRIDLSQLGGDGGGGSGSSGGTLGIEDEYRLHETSTEPDVSLGSTWLSDFPQAWAETGGMGLAVRQAPLIIPLKATSTPVSIQQYPMSHEARLGIKPHIQRLLDQGILVPCQSPWNTPLLPVKKPGTNDYRPVQDLREVNKRVEDIHPTVPNPYNLLSGLPPSHQWYTVLDLKDAFFCLRLHPTSQPLFAFEWRDPGMGISGQLTWTRLPQGFKNSPTLFNEALHRDLADFRIQHPDLILLQYVDDILLAATSELDCQQGTRALLQTLGDLGYRASAKKAQICQKQVKYLGYLLREGQRWLTEARKETVMGQPVPKTPRQLREFLGTAGFCRLWIPGFAEMAAPLYPLTKPGTLFSWGPDQQKAYQEIKQALLTAPALGLPDLTKPFELFVDEKQGYAKGVLTQKLGPWRRPVAYLSKKLDPVAAGWPPCLRMVAAIAVLTKDAGKLTMGQPLVILAPHAVEALVKQPPDRWLSNARMTHYQAMLLDTDRVQFGPVVALNPATLLPLPEEGAPHDCLEILAETHGTRPDLTDQPIPDADHTWYTDGSSFLQEGQRKAGAAVTTETEVIWAGALPAGTSAQRAELIALTQALKMAEGKRLNVYTDSRYAFATAHIHGEIYRRRGWLTSEGREIKNKSEILALLKALFLPKRLSIIHCLGHQKGDSAEARGNRLADQAAREAAIKTPPDTSTLLAGKRTADGSEFEKRTADGSEFESPKKKAKVE

SEQ ID NO: 6607 - protein, 2091 aa, synthetic construct
MPAAKRVKLDGGDKKYSIGLDIGTNSVGWAVITDEYKVPSKKFKVLGNTDRHSIKKNLIGALLFDSGETAEATRLKRTARRRYTRRKNRICYLQEIFSNEMAKVDDSFFHRLEESFLVEEDKKHERHPIFGNIVDEVAYHEKYPTIYHLRKKLVDSTDKADLRLIYLALAHMIKFRGHFLIEGDLNPDNSDVDKLFIQLVQTYNQLFEENPINASGVDAKAILSARLSKSRRLENLIAQLPGEKKNGLFGNLIALSLGLTPNFKSNFDLAEDAKLQLSKDTYDDDLDNLLAQIGDQYADLFLAAKNLSDAILLSDILRVNTEITKAPLSASMIKRYDEHHQDLTLLKALVRQQLPEKYKEIFFDQSKNGYAGYIDGGASQEEFYKFIKPILEKMDGTEELLVKLNREDLLRKQRTFDNGSIPHQIHLGELHAILRRQEDFYPFLKDNREKIEKILTFRIPYYVGPLARGNSRFAWMTRKSEETITPWNFEEVVDKGASAQSFIERMTNFDKNLPNEKVLPKHSLLYEYFTVYNELTKVKYVTEGMRKPAFLSGEQKKAIVDLLFKTNRKVTVKQLKEDYFKKIECFDSVEISGVEDRFNASLGTYHDLLKIIKDKDFLDNEENEDILEDIVLTLTLFEDREMIEERLKTYAHLFDDKVMKQLKRRRYTGWGRLSRKLINGIRDKQSGKTILDFLKSDGFANRNFMQLIHDDSLTFKEDIQKAQVSGQGDSLHEHIANLAGSPAIKKGILQTVKVVDELVKVMGRHKPENIVIEMARENQTTQKGQKNSRERMKRIEEGIKELGSQILKEHPVENTQLQNEKLYLYYLQNGRDMYVDQELDINRLSDYDVDHIVPQSFLKDDSIDNKVLTRSDKARGKSDNVPSEEVVKKMKNYWRQLLNAKLITQRKFDNLTKAERGGLSELDKAGFIKRQLVETRQITKHVAQILDSRMNTKYDENDKLIREVKVITLKSKLVSDFRKDFQFYKVREINNYHHAHDAYLNAVVGTALIKKYPKLESEFVYGDYKVYDVRKMIAKSEQEIGKATAKYFFYSNIMNFFKTEITLANGEIRKRPLIETNGETGEIVWDKGRDFATVRKVLSMPQVNIVKKTEVQTGGFSKESILPKRNSDKLIARKKDWDPKKYGGFDSPTVAYSVLVVAKVEKGKSKKLKSVKELLGITIMERSSFEKNPIDFLEAKGYKEVKKDLIIKLPKYSLFELENGRKRMLASAGELQKGNELALPSKYVNFLYLASHYEKLKGSPEDNEQKQLFVEQHKHYLDEIIEQISEFSKRVILADANLDKVLSAYNKHRDKPIREQAENIIHLFTLTNLGAPAAFKYFDTTIDRKRYTSTKEVLDATLIHQSITGLYETRIDLSQLGGDGGGGSGSSGGTLNIEDEYRLHETSKGPDVPLGSTWLSDFPQAWAETGGMGLAVRQAPLIIPLKATSTPVSIKQYPMSQEARLGIKPHIQRLLDQGILVPCQSPWNTPLLPVKKPGTNDYRPVQDLREVNKRVEDIHPTVPNPYNLLSGLPPSHQWYTVLDLKDAFFCLRLHPTSQSLFAFEWRDPEMGISGQLTWTRLPQGFKNSPTLFNEALHRDLADFRIQHPDLILLQYVDDLLLAATSELDCQQGTRALLQTLGDLGYRASAKKAQICQKQVKYLGYLLKEGQRWLTEARKETVMGQPTPKTPRQLREFLGKAGFCRLFIPGFAEMAAPLYPLTKPGTLFEWGPDQQKAYQEIKQALLTAPALGLPDLTKPFELFVDEKQGYAKGVLTQKLGPWRRPVAYLSKKLDPVAAGWPPCLRMVAAIAVLTKDAGKLTMGQPLVILAPHAVEALVKQPPDRWLSNARMTHYQALLLDTDRVQFGPIVALNPATLLPLPEEGLQHDCLDILAEAHGTRPDLTDQPLPDADHTWYTDGSSFLQEGQRKAGAAVTTETEVVWAKALPAGTSAQRAELIALTQALKMAEGKKLNVYTDSRYAFATAHIHGEIYRRRGWLTSEGKEIKNKDEILALLKALFLPKRLSIIHCPGHQKGNRAEARGNRMADQAAREVATRETPETSTLLAGKRTADGSEFEKRTADGSEFESPKKKAKVE

SEQ ID NO: 6608 - protein, 2082 aa, synthetic construct
MPAAKRVKLDGGDKKYSIGLDIGTNSVGWAVITDEYKVPSKKFKVLGNTDRHSIKKNLIGALLFDSGETAEATRLKRTARRRYTRRKNRICYLQEIFSNEMAKVDDSFFHRLEESFLVEEDKKHERHPIFGNIVDEVAYHEKYPTIYHLRKKLVDSTDKADLRLIYLALAHMIKFRGHFLIEGDLNPDNSDVDKLFIQLVQTYNQLFEENPINASGVDAKAILSARLSKSRRLENLIAQLPGEKKNGLFGNLIALSLGLTPNFKSNFDLAEDAKLQLSKDTYDDDLDNLLAQIGDQYADLFLAAKNLSDAILLSDILRVNTEITKAPLSASMIKRYDEHHQDLTLLKALVRQQLPEKYKEIFFDQSKNGYAGYIDGGASQEEFYKFIKPILEKMDGTEELLVKLNREDLLRKQRTFDNGSIPHQIHLGELHAILRRQEDFYPFLKDNREKIEKILTFRIPYYVGPLARGNSRFAWMTRKSEETITPWNFEEVVDKGASAQSFIERMTNFDKNLPNEKVLPKHSLLYEYFTVYNELTKVKYVTEGMRKPAFLSGEQKKAIVDLLFKTNRKVTVKQLKEDYFKKIECFDSVEISGVEDRFNASLGTYHDLLKIIKDKDFLDNEENEDILEDIVLTLTLFEDREMIEERLKTYAHLFDDKVMKQLKRRRYTGWGRLSRKLINGIRDKQSGKTILDFLKSDGFANRNFMQLIHDDSLTFKEDIQKAQVSGQGDSLHEHIANLAGSPAIKKGILQTVKVVDELVKVMGRHKPENIVIEMARENQTTQKGQKNSRERMKRIEEGIKELGSQILKEHPVENTQLQNEKLYLYYLQNGRDMYVDQELDINRLSDYDVDHIVPQSFLKDDSIDNKVLTRSDKARGKSDNVPSEEVVKKMKNYWRQLLNAKLITQRKFDNLTKAERGGLSELDKAGFIKRQLVETRQITKHVAQILDSRMNTKYDENDKLIREVKVITLKSKLVSDFRKDFQFYKVREINNYHHAHDAYLNAVVGTALIKKYPKLESEFVYGDYKVYDVRKMIAKSEQEIGKATAKYFFYSNIMNFFKTEITLANGEIRKRPLIETNGETGEIVWDKGRDFATVRKVLSMPQVNIVKKTEVQTGGFSKESILPKRNSDKLIARKKDWDPKKYGGFDSPTVAYSVLVVAKVEKGKSKKLKSVKELLGITIMERSSFEKNPIDFLEAKGYKEVKKDLIIKLPKYSLFELENGRKRMLASAGELQKGNELALPSKYVNFLYLASHYEKLKGSPEDNEQKQLFVEQHKHYLDEIIEQISEFSKRVILADANLDKVLSAYNKHRDKPIREQAENIIHLFTLTNLGAPAAFKYFDTTIDRKRYTSTKEVLDATLIHQSITGLYETRIDLSQLGGDGGGGSGSSGGVPWLMKKPLQLTVLVPLHEYQERLLQQTALPKEQKELLQKLFLKYDALWQHWENQVGHRRIKPHNIATGTLAPRPQKQYPINPKAKPSIQIVIDDLLKQGVLIQQNSTMNTPVYPVPKPDGKWRMVLDYREVNKTIPLIAAQNQHSAGILSSIYRGKYKTTLDLTNGFWAHPITPESYWLTAFTWQGKQYCWTRLPQGFLNSPALFNADVVDLLKEIPNVQAYVDDIYISHDDPQEHLEQLEKIFSILLNAGYVVSLKKSEIAQREVEFLGFNITKEGRGLTDTFKQKLLNITPPKDLKQLQSILGLLNFARNFIPNYSELVKPLYTIVAPANGKFISWTEDNSNQLQHIISVLNQADNLEERNPETRLIIKVNSSPSAGYIRYYNEGSKRPIMYVNYIFSKAEAKFTQTEKLLTTMHKGLIKAMDLAMGQEILVYSPIVSMTKIQRTPLPERKALPVRWITWMTYLEDPRIQFHYDKSLPELQQIPNVTEDVIAKTKHPSEFAMVFYTDGSAIKHPDVNKSHSAGMGIAQVQFIPEYKIVHQWSIPLGDHTAQLAEIAAVEFACKKALKISGPVLIVTDSFYVAESANKELPYWKSNGFLNNKKKPLRHVSKWKSIAECLQLKPDIIIMHEKGHQQPMTTLHTEGNNLADKLATQGSYVVHAGKRTADGSEFEKRTADGSEFESPKKKAKVE

SEQ ID NO: 6609 - protein, 2082 aa, synthetic construct
MPAAKRVKLDGGDKKYSIGLDIGTNSVGWAVITDEYKVPSKKFKVLGNTDRHSIKKNLIGALLFDSGETAEATRLKRTARRRYTRRKNRICYLQEIFSNEMAKVDDSFFHRLEESFLVEEDKKHERHPIFGNIVDEVAYHEKYPTIYHLRKKLVDSTDKADLRLIYLALAHMIKFRGHFLIEGDLNPDNSDVDKLFIQLVQTYNQLFEENPINASGVDAKAILSARLSKSRRLENLIAQLPGEKKNGLFGNLIALSLGLTPNFKSNFDLAEDAKLQLSKDTYDDDLDNLLAQIGDQYADLFLAAKNLSDAILLSDILRVNTEITKAPLSASMIKRYDEHHQDLTLLKALVRQQLPEKYKEIFFDQSKNGYAGYIDGGASQEEFYKFIKPILEKMDGTEELLVKLNREDLLRKQRTFDNGSIPHQIHLGELHAILRRQEDFYPFLKDNREKIEKILTFRIPYYVGPLARGNSRFAWMTRKSEETITPWNFEEVVDKGASAQSFIERMTNFDKNLPNEKVLPKHSLLYEYFTVYNELTKVKYVTEGMRKPAFLSGEQKKAIVDLLFKTNRKVTVKQLKEDYFKKIECFDSVEISGVEDRFNASLGTYHDLLKIIKDKDFLDNEENEDILEDIVLTLTLFEDREMIEERLKTYAHLFDDKVMKQLKRRRYTGWGRLSRKLINGIRDKQSGKTILDFLKSDGFANRNFMQLIHDDSLTFKEDIQKAQVSGQGDSLHEHIANLAGSPAIKKGILQTVKVVDELVKVMGRHKPENIVIEMARENQTTQKGQKNSRERMKRIEEGIKELGSQILKEHPVENTQLQNEKLYLYYLQNGRDMYVDQELDINRLSDYDVDHIVPQSFLKDDSIDNKVLTRSDKARGKSDNVPSEEVVKKMKNYWRQLLNAKLITQRKFDNLTKAERGGLSELDKAGFIKRQLVETRQITKHVAQILDSRMNTKYDENDKLIREVKVITLKSKLVSDFRKDFQFYKVREINNYHHAHDAYLNAVVGTALIKKYPKLESEFVYGDYKVYDVRKMIAKSEQEIGKATAKYFFYSNIMNFFKTEITLANGEIRKRPLIETNGETGEIVWDKGRDFATVRKVLSMPQVNIVKKTEVQTGGFSKESILPKRNSDKLIARKKDWDPKKYGGFDSPTVAYSVLVVAKVEKGKSKKLKSVKELLGITIMERSSFEKNPIDFLEAKGYKEVKKDLIIKLPKYSLFELENGRKRMLASAGELQKGNELALPSKYVNFLYLASHYEKLKGSPEDNEQKQLFVEQHKHYLDEIIEQISEFSKRVILADANLDKVLSAYNKHRDKPIREQAENIIHLFTLTNLGAPAAFKYFDTTIDRKRYTSTKEVLDATLIHQSITGLYETRIDLSQLGGDGGGGSGSSGGIPWLMKKPLQLTTLVPLQEYEERLLKQTMLTGSYKEKLQSLFLKYDALWQHWENQVGHRRIKPHHIATGTVNPRPQKQYPINPKAKASIQTVINDLLKQGVLIQQNSIMNTPVYPVPKPDGKWRMVLDYREVNKTIPLIAAQNQHSAGILSSIFRGKYKTTLDLSNGFWAHSITPESYWLTAFTWLGQQYCWTRLPQGFLNSPALFNADVVDLLKEVPNVQVYVDDIYISHDDPREHLEQLEKVFSLLLNAGYVVSLKKSEIAQHEVEFLGFNITKEGRGLTETFKQKLLNITPPRDLKQLQSILGLLNFARNFIPNFSELVKPLYNIIATAPGKYITWTTDNSQQLQNIISMLNSAENLEERNPEVRLIMKVNTSPSAGYIRFYNEFAKRPIMYLNYVYTKAEVKFTNTEKLLTTIHKGLIKALDLGMGQEILVYSPIVSMTKIQKTPLPERKALPIRWITWMSYLEDPRIQFHYDKTLPELQQVPTVTDDIIAKIKHPSEFSMVFYTDGSAIKHPNVNKSHNAGMGIAQVQFKPEFTVINTWSIPLGDHTAQLAEVAAVEFACKKALKIDGPVLIVTDSFYVAESVNKELPYWQSNGFFNNKKKPLKHVSKWKSIADCIQLKPDIIIIHEKGHQPTASTFHTEGNNLADKLATQGSYVVNAGKRTADGSEFEKRTADGSEFESPKKKAKVE

SEQ ID NO: 6610 - protein, 2082 aa, synthetic construct
MPAAKRVKLDGGDKKYSIGLDIGTNSVGWAVITDEYKVPSKKFKVLGNTDRHSIKKNLIGALLFDSGETAEATRLKRTARRRYTRRKNRICYLQEIFSNEMAKVDDSFFHRLEESFLVEEDKKHERHPIFGNIVDEVAYHEKYPTIYHLRKKLVDSTDKADLRLIYLALAHMIKFRGHFLIEGDLNPDNSDVDKLFIQLVQTYNQLFEENPINASGVDAKAILSARLSKSRRLENLIAQLPGEKKNGLFGNLIALSLGLTPNFKSNFDLAEDAKLQLSKDTYDDDLDNLLAQIGDQYADLFLAAKNLSDAILLSDILRVNTEITKAPLSASMIKRYDEHHQDLTLLKALVRQQLPEKYKEIFFDQSKNGYAGYIDGGASQEEFYKFIKPILEKMDGTEELLVKLNREDLLRKQRTFDNGSIPHQIHLGELHAILRRQEDFYPFLKDNREKIEKILTFRIPYYVGPLARGNSRFAWMTRKSEETITPWNFEEVVDKGASAQSFIERMTNFDKNLPNEKVLPKHSLLYEYFTVYNELTKVKYVTEGMRKPAFLSGEQKKAIVDLLFKTNRKVTVKQLKEDYFKKIECFDSVEISGVEDRFNASLGTYHDLLKIIKDKDFLDNEENEDILEDIVLTLTLFEDREMIEERLKTYAHLFDDKVMKQLKRRRYTGWGRLSRKLINGIRDKQSGKTILDFLKSDGFANRNFMQLIHDDSLTFKEDIQKAQVSGQGDSLHEHIANLAGSPAIKKGILQTVKVVDELVKVMGRHKPENIVIEMARENQTTQKGQKNSRERMKRIEEGIKELGSQILKEHPVENTQLQNEKLYLYYLQNGRDMYVDQELDINRLSDYDVDHIVPQSFLKDDSIDNKVLTRSDKARGKSDNVPSEEVVKKMKNYWRQLLNAKLITQRKFDNLTKAERGGLSELDKAGFIKRQLVETRQITKHVAQILDSRMNTKYDENDKLIREVKVITLKSKLVSDFRKDFQFYKVREINNYHHAHDAYLNAVVGTALIKKYPKLESEFVYGDYKVYDVRKMIAKSEQEIGKATAKYFFYSNIMNFFKTEITLANGEIRKRPLIETNGETGEIVWDKGRDFATVRKVLSMPQVNIVKKTEVQTGGFSKESILPKRNSDKLIARKKDWDPKKYGGFDSPTVAYSVLVVAKVEKGKSKKLKSVKELLGITIMERSSFEKNPIDFLEAKGYKEVKKDLIIKLPKYSLFELENGRKRMLASAGELQKGNELALPSKYVNFLYLASHYEKLKGSPEDNEQKQLFVEQHKHYLDEIIEQISEFSKRVILADANLDKVLSAYNKHRDKPIREQAENIIHLFTLTNLGAPAAFKYFDTTIDRKRYTSTKEVLDATLIHQSITGLYETRIDLSQLGGDGGGGSGSSGGIPWLMKKPLQLTTLVPLQEYEERLLKQTMLTGSYKEKLQSLFLKYDALWQHWENQVGHRRIKPHHIATGTVNPRPQKQYPINPKAKASIQTVINDLLKQGVLIQQNSIMNTPVYPVPKPDGKWRMVLDYREVNKTIPLIAAQNQHSAGILSSIFRGKYKTTLDLSNGFWAHSITPESYWLTAFTWLGQQYCWTRLPQGFLNSPALFNADVVDLLKEVPNVQVYVDDIYISHDDPREHLEQLEKVFSLLLNAGYVVSLKKSEIAQHEVEFLGFNITKEGRGLTETFKQKLLNITPPRDLKQLQSILGKLNFARNFIPNFSELVKPLYNIIATAPGKYITWTTDNSQQLQNIISMLNSAENLEERNPEVRLIMKVNTSPSAGYIRFYNEFAKRPIMYLNYVYTKAEVKFTNTEKLLTTIHKGLIKALDLGMGQEILVYSPIVSMTKIQKTPLPERKALPIRWITWMSYLEDPRIQFHYDKTLPELQQVPTVTDDIIAKIKHPSEFSMVFYTDGSAIKHPNVNKSHNAGMGIAQVQFKPEFTVINTWSIPLGDHTAQLAEVAAVEFACKKALKIDGPVLIVTDSFYVAESVNKELPYWQSNGFFNNKKKPLKHVSKWKSIADCIQLKPDIIIIHEKGHQPTASTFHTEGNNLADKLATQGSYVVNAGKRTADGSEFEKRTADGSEFESPKKKAKVE

SEQ ID NO: 6611 - protein, 2089 aa, synthetic construct
MPAAKRVKLDGGDKKYSIGLDIGTNSVGWAVITDEYKVPSKKFKVLGNTDRHSIKKNLIGALLFDSGETAEATRLKRTARRRYTRRKNRICYLQEIFSNEMAKVDDSFFHRLEESFLVEEDKKHERHPIFGNIVDEVAYHEKYPTIYHLRKKLVDSTDKADLRLIYLALAHMIKFRGHFLIEGDLNPDNSDVDKLFIQLVQTYNQLFEENPINASGVDAKAILSARLSKSRRLENLIAQLPGEKKNGLFGNLIALSLGLTPNFKSNFDLAEDAKLQLSKDTYDDDLDNLLAQIGDQYADLFLAAKNLSDAILLSDILRVNTEITKAPLSASMIKRYDEHHQDLTLLKALVRQQLPEKYKEIFFDQSKNGYAGYIDGGASQEEFYKFIKPILEKMDGTEELLVKLNREDLLRKQRTFDNGSIPHQIHLGELHAILRRQEDFYPFLKDNREKIEKILTFRIPYYVGPLARGNSRFAWMTRKSEETITPWNFEEVVDKGASAQSFIERMTNFDKNLPNEKVLPKHSLLYEYFTVYNELTKVKYVTEGMRKPAFLSGEQKKAIVDLLFKTNRKVTVKQLKEDYFKKIECFDSVEISGVEDRFNASLGTYHDLLKIIKDKDFLDNEENEDILEDIVLTLTLFEDREMIEERLKTYAHLFDDKVMKQLKRRRYTGWGRLSRKLINGIRDKQSGKTILDFLKSDGFANRNFMQLIHDDSLTFKEDIQKAQVSGQGDSLHEHIANLAGSPAIKKGILQTVKVVDELVKVMGRHKPENIVIEMARENQTTQKGQKNSRERMKRIEEGIKELGSQILKEHPVENTQLQNEKLYLYYLQNGRDMYVDQELDINRLSDYDVDHIVPQSFLKDDSIDNKVLTRSDKARGKSDNVPSEEVVKKMKNYWRQLLNAKLITQRKFDNLTKAERGGLSELDKAGFIKRQLVETRQITKHVAQILDSRMNTKYDENDKLIREVKVITLKSKLVSDFRKDFQFYKVREINNYHHAHDAYLNAVVGTALIKKYPKLESEFVYGDYKVYDVRKMIAKSEQEIGKATAKYFFYSNIMNFFKTEITLANGEIRKRPLIETNGETGEIVWDKGRDFATVRKVLSMPQVNIVKKTEVQTGGFSKESILPKRNSDKLIARKKDWDPKKYGGFDSPTVAYSVLVVAKVEKGKSKKLKSVKELLGITIMERSSFEKNPIDFLEAKGYKEVKKDLIIKLPKYSLFELENGRKRMLASAGELQKGNELALPSKYVNFLYLASHYEKLKGSPEDNEQKQLFVEQHKHYLDEIIEQISEFSKRVILADANLDKVLSAYNKHRDKPIREQAENIIHLFTLTNLGAPAAFKYFDTTIDRKRYTSTKEVLDATLIHQSITGLYETRIDLSQLGGDGGGGSGSSGGVLNLEEEYRLHEKPVPSSIDPSWLQLFPTVWAERAGMGLANQVPPVVVELRSGASPVAVRQYPMSKEAREGIRPHIQRFLDLGVLVPCQSPWNTPLLPVKKPGTNDYRPVQDLREINKRVQDIHPTVPNPYNLLSSLPPSHTWYSVLDLKDAFFCLKLHPNSQPLFAFEWRDPEKGNTGQLTWTRLPQGFKNSPTLFNEALHRDLAPFRALNPQVVLLQYVDDLLVAAPTYRDCKEGTQKLLQELSKLGYRVSAKKAQLCQKEVTYLGYLLKEGKRWLTPARKATVMKIPPPTTPRQVREFLGTAGFCRLWIPGFASLAAPLYPLTKPSIPFIWTEEHQKAFDRIKEALLSAPALALPDLTKPFTLYVDERAGVARGVLTQTLGPWRRPVAYLSKKLDPVASGWPTCLKAVAAVALLLKDADKLTLGQNVTVIASHSLESIVRQPPDRWMTNARMTHYQSLLLNERVSFAPPAVLNPATLLPVESEATPVHRCSEILAEETGTRRDLKDQPLPGVPAWYTDGSSFIAEGKRRAGAAIVDGKRTVWASSLPEGTSAQKAELVALTQALRLAEGKDINIYTDSRYAFATAHIHGAIYKQRGWLTSAGKDIKNKEEILALLEAIHLPKRVAIIHCPGHQKGNDPVATGNRRADEAAKQAALSTRVLAETTKPAGKRTADGSEFEKRTADGSEFESPKKKAKVE

SEQ ID NO: 6612 - protein, 2091 aa, synthetic construct
MPAAKRVKLDGGDKKYSIGLDIGTNSVGWAVITDEYKVPSKKFKVLGNTDRHSIKKNLIGALLFDSGETAEATRLKRTARRRYTRRKNRICYLQEIFSNEMAKVDDSFFHRLEESFLVEEDKKHERHPIFGNIVDEVAYHEKYPTIYHLRKKLVDSTDKADLRLIYLALAHMIKFRGHFLIEGDLNPDNSDVDKLFIQLVQTYNQLFEENPINASGVDAKAILSARLSKSRRLENLIAQLPGEKKNGLFGNLIALSLGLTPNFKSNFDLAEDAKLQLSKDTYDDDLDNLLAQIGDQYADLFLAAKNLSDAILLSDILRVNTEITKAPLSASMIKRYDEHHQDLTLLKALVRQQLPEKYKEIFFDQSKNGYAGYIDGGASQEEFYKFIKPILEKMDGTEELLVKLNREDLLRKQRTFDNGSIPHQIHLGELHAILRRQEDFYPFLKDNREKIEKILTFRIPYYVGPLARGNSRFAWMTRKSEETITPWNFEEVVDKGASAQSFIERMTNFDKNLPNEKVLPKHSLLYEYFTVYNELTKVKYVTEGMRKPAFLSGEQKKAIVDLLFKTNRKVTVKQLKEDYFKKIECFDSVEISGVEDRFNASLGTYHDLLKIIKDKDFLDNEENEDILEDIVLTLTLFEDREMIEERLKTYAHLFDDKVMKQLKRRRYTGWGRLSRKLINGIRDKQSGKTILDFLKSDGFANRNFMQLIHDDSLTFKEDIQKAQVSGQGDSLHEHIANLAGSPAIKKGILQTVKVVDELVKVMGRHKPENIVIEMARENQTTQKGQKNSRERMKRIEEGIKELGSQILKEHPVENTQLQNEKLYLYYLQNGRDMYVDQELDINRLSDYDVDHIVPQSFLKDDSIDNKVLTRSDKARGKSDNVPSEEVVKKMKNYWRQLLNAKLITQRKFDNLTKAERGGLSELDKAGFIKRQLVETRQITKHVAQILDSRMNTKYDENDKLIREVKVITLKSKLVSDFRKDFQFYKVREINNYHHAHDAYLNAVVGTALIKKYPKLESEFVYGDYKVYDVRKMIAKSEQEIGKATAKYFFYSNIMNFFKTEITLANGEIRKRPLIETNGETGEIVWDKGRDFATVRKVLSMPQVNIVKKTEVQTGGFSKESILPKRNSDKLIARKKDWDPKKYGGFDSPTVAYSVLVVAKVEKGKSKKLKSVKELLGITIMERSSFEKNPIDFLEAKGYKEVKKDLIIKLPKYSLFELENGRKRMLASAGELQKGNELALPSKYVNFLYLASHYEKLKGSPEDNEQKQLFVEQHKHYLDEIIEQISEFSKRVILADANLDKVLSAYNKHRDKPIREQAENIIHLFTLTNLGAPAAFKYFDTTIDRKRYTSTKEVLDATLIHQSITGLYETRIDLSQLGGDGGGGSGSSGGTLNIEDEYRLHETSKEPDVPLGSTWLSDFPQAWAETGGMGLAVRQAPLIIPLKATSTPVSIKQYPMSQEARLGIKPHIQRLLDQGILVPCQSPWNTPLLPVKKPGTNDYRPVQDLREVNKRVEDIHPTVPNPYNLLSGLPPSHQWYTVLDLKDAFFCLRLHPTSQPLFAFEWRDPEMGISGQLTWTRLPQGFKNSPTLFNEALHRDLADFRIQHPDLILLQYVDDLLLAATSEQDCQRGTRALLQTLGNLGYRASAKKAQICQKQVKYLGYLLKEGQRWLTEARKETVMGQPTPKTPRQLREFLGTAGFCRLWIPGFAEMAAPLYPLTKPGTLFNWGPDQQKAYQEIKQALLTAPALGLPDLTKPFELFVDEKQGYAKGVLTQKLGPWRRPVAYLSKKLDPVAAGWPPCLRMVAAIAVLTKDAGKLTMGQPLVILAPHAVEALVKQPPDRWLSNARMTHYQAMLLDTDRVQFGPVVALNPATLLPLPEKEAPHDCLEILAETHGTRPDLTDQPIPDADYTWYTDGSSFLQEGQRRAGAAVTTETEVIWARALPAGTSAQRAELIALTQALKMAEGKKLNVYTDSRYAFATAHVHGEIYRRRGWLTSEGREIKNKNEILALLKALFLPKRLSIIHCPGHQKGNSAEARGNRMADQAAREAAMKAVLETSTLLAGKRTADGSEFEKRTADGSEFESPKKKAKVE

SEQ ID NO: 6613 - protein, 2093 aa, synthetic construct
MPAAKRVKLDGGDKKYSIGLDIGTNSVGWAVITDEYKVPSKKFKVLGNTDRHSIKKNLIGALLFDSGETAEATRLKRTARRRYTRRKNRICYLQEIFSNEMAKVDDSFFHRLEESFLVEEDKKHERHPIFGNIVDEVAYHEKYPTIYHLRKKLVDSTDKADLRLIYLALAHMIKFRGHFLIEGDLNPDNSDVDKLFIQLVQTYNQLFEENPINASGVDAKAILSARLSKSRRLENLIAQLPGEKKNGLFGNLIALSLGLTPNFKSNFDLAEDAKLQLSKDTYDDDLDNLLAQIGDQYADLFLAAKNLSDAILLSDILRVNTEITKAPLSASMIKRYDEHHQDLTLLKALVRQQLPEKYKEIFFDQSKNGYAGYIDGGASQEEFYKFIKPILEKMDGTEELLVKLNREDLLRKQRTFDNGSIPHQIHLGELHAILRRQEDFYPFLKDNREKIEKILTFRIPYYVGPLARGNSRFAWMTRKSEETITPWNFEEVVDKGASAQSFIERMTNFDKNLPNEKVLPKHSLLYEYFTVYNELTKVKYVTEGMRKPAFLSGEQKKAIVDLLFKTNRKVTVKQLKEDYFKKIECFDSVEISGVEDRFNASLGTYHDLLKIIKDKDFLDNEENEDILEDIVLTLTLFEDREMIEERLKTYAHLFDDKVMKQLKRRRYTGWGRLSRKLINGIRDKQSGKTILDFLKSDGFANRNFMQLIHDDSLTFKEDIQKAQVSGQGDSLHEHIANLAGSPAIKKGILQTVKVVDELVKVMGRHKPENIVIEMARENQTTQKGQKNSRERMKRIEEGIKELGSQILKEHPVENTQLQNEKLYLYYLQNGRDMYVDQELDINRLSDYDVDHIVPQSFLKDDSIDNKVLTRSDKARGKSDNVPSEEVVKKMKNYWRQLLNAKLITQRKFDNLTKAERGGLSELDKAGFIKRQLVETRQITKHVAQILDSRMNTKYDENDKLIREVKVITLKSKLVSDFRKDFQFYKVREINNYHHAHDAYLNAVVGTALIKKYPKLESEFVYGDYKVYDVRKMIAKSEQEIGKATAKYFFYSNIMNFFKTEITLANGEIRKRPLIETNGETGEIVWDKGRDFATVRKVLSMPQVNIVKKTEVQTGGFSKESILPKRNSDKLIARKKDWDPKKYGGFDSPTVAYSVLVVAKVEKGKSKKLKSVKELLGITIMERSSFEKNPIDFLEAKGYKEVKKDLIIKLPKYSLFELENGRKRMLASAGELQKGNELALPSKYVNFLYLASHYEKLKGSPEDNEQKQLFVEQHKHYLDEIIEQISEFSKRVILADANLDKVLSAYNKHRDKPIREQAENIIHLFTLTNLGAPAAFKYFDTTIDRKRYTSTKEVLDATLIHQSITGLYETRIDLSQLGGDGGGSSGGSGGTAPLEEEYRLFLEAPIQNVTLLEQWKREIPKVWAEINPPGLASTQAPIHVQLLSTALPVRVRQYPITLEAKRSLRETIRKFRAAGILRPVHSPWNTPLLPVRKSGTSEYRMVQDLREVNKRVETIHPTVPNPYTLLSLLPPDRIWYSVLDLKDAFFCIPLAPESQLIFAFEWADAEEGESGQLTWTRLPQGFKNSPTLFDEALNRDLQGFRLDHPSVSLLQYVDDLLIAADTQAACLSATRDLLMTLAELGYRVSGKKAQLCQEEVTYLGFKIHKGSRSLSNSRTQAILQIPVPKTKRQVREFLGTIGYCRLWIPGFAELAQPLYAATRGGNDPLVWGEKEEEAFQSLKLALTQPPALALPSLDKPFQLFVEETSGAAKGVLTQALGPWKRPVAYLSKRLDPVAAGWPRCLRAIAAAALLTREASKLTFGQDIEITSSHNLESLLRSPPDKWLTNARITQYQVLLLDPPRVRFKQTAALNPATLLPETDDTLPIHHCLDTLDSLTSTRPDLTDQPLAQAEATLFTDGSSYIRDGKRYAGAAVVTLDSVIWAEPLPIGTSAQKAELIALTKALEWSKDKSVNIYTDSRYAFATLHVHGMIYRERGLLTAGGKAIKNAPEILALLTAVWLPKRVAVMHCKGHQKDDAPTSTGNRRADEVAREVAIRPLSTQATISAGKRTADGSEFEKRTADGSEFESPKKKAKVE

SEQ ID NO: 6614 - protein, 2097 aa, synthetic construct
MPAAKRVKLDGGDKKYSIGLDIGTNSVGWAVITDEYKVPSKKFKVLGNTDRHSIKKNLIGALLFDSGETAEATRLKRTARRRYTRRKNRICYLQEIFSNEMAKVDDSFFHRLEESFLVEEDKKHERHPIFGNIVDEVAYHEKYPTIYHLRKKLVDSTDKADLRLIYLALAHMIKFRGHFLIEGDLNPDNSDVDKLFIQLVQTYNQLFEENPINASGVDAKAILSARLSKSRRLENLIAQLPGEKKNGLFGNLIALSLGLTPNFKSNFDLAEDAKLQLSKDTYDDDLDNLLAQIGDQYADLFLAAKNLSDAILLSDILRVNTEITKAPLSASMIKRYDEHHQDLTLLKALVRQQLPEKYKEIFFDQSKNGYAGYIDGGASQEEFYKFIKPILEKMDGTEELLVKLNREDLLRKQRTFDNGSIPHQIHLGELHAILRRQEDFYPFLKDNREKIEKILTFRIPYYVGPLARGNSRFAWMTRKSEETITPWNFEEVVDKGASAQSFIERMTNFDKNLPNEKVLPKHSLLYEYFTVYNELTKVKYVTEGMRKPAFLSGEQKKAIVDLLFKTNRKVTVKQLKEDYFKKIECFDSVEISGVEDRFNASLGTYHDLLKIIKDKDFLDNEENEDILEDIVLTLTLFEDREMIEERLKTYAHLFDDKVMKQLKRRRYTGWGRLSRKLINGIRDKQSGKTILDFLKSDGFANRNFMQLIHDDSLTFKEDIQKAQVSGQGDSLHEHIANLAGSPAIKKGILQTVKVVDELVKVMGRHKPENIVIEMARENQTTQKGQKNSRERMKRIEEGIKELGSQILKEHPVENTQLQNEKLYLYYLQNGRDMYVDQELDINRLSDYDVDHIVPQSFLKDDSIDNKVLTRSDKARGKSDNVPSEEVVKKMKNYWRQLLNAKLITQRKFDNLTKAERGGLSELDKAGFIKRQLVETRQITKHVAQILDSRMNTKYDENDKLIREVKVITLKSKLVSDFRKDFQFYKVREINNYHHAHDAYLNAVVGTALIKKYPKLESEFVYGDYKVYDVRKMIAKSEQEIGKATAKYFFYSNIMNFFKTEITLANGEIRKRPLIETNGETGEIVWDKGRDFATVRKVLSMPQVNIVKKTEVQTGGFSKESILPKRNSDKLIARKKDWDPKKYGGFDSPTVAYSVLVVAKVEKGKSKKLKSVKELLGITIMERSSFEKNPIDFLEAKGYKEVKKDLIIKLPKYSLFELENGRKRMLASAGELQKGNELALPSKYVNFLYLASHYEKLKGSPEDNEQKQLFVEQHKHYLDEIIEQISEFSKRVILADANLDKVLSAYNKHRDKPIREQAENIIHLFTLTNLGAPAAFKYFDTTIDRKRYTSTKEVLDATLIHQSITGLYETRIDLSQLGGDGGGSSGGSGGTVSLQDEHRLFDIPVTTSLPDVWLQDFPQAWAETGGLGRAKCQAPIIIDLKPTAVPVSIKQYPMSLEAHMGIRQHIIKFLELGVLRPCRSPWNTPLLPVKKPGTQDYRPVQDLREINKRTVDIHPTVPNPYNLLSTLKPDYSWYTVLDLKDAFFCLPLAPQSQELFAFEWKDPERGISGQLTWTRLPQGFKNSPTLFNEALHRDLTDFRTQHPEVTLLQYVDDLLLAAPTKKACTQGTRHLLQELGEKGYRASAKKAQICQTKVTYLGYILSEGKRWLTPGRIETVARIPPPRNPREVREFLGTAGFCRLWIPGFAELAAPLYALTKPSTPFTWQTEHQLAFEALKKALLSAPALGLPDTSKPFTLFLDERQGIAKGVLTQKLGPWKRPVAYLSKKLDPVAAGWPPCLRIMAATAMLVKDSAKLTLGQPLTVITPHTLEAIVRQPPDRWITNARLTHYQALLLDTDRVQFGPPVTLNPATLLPVPENQPSPHDCRQVLAETHGTREDLKDQELPDADHTWYTDGSSYLDSGTRRAGAAVVDGHNTIWAQSLPPGTSAQKAELIALTKALELSKGKKANIYTDSRYAFATAHTHGSIYERRGWLTSEGKEIKNKAEIIALLKALFLPQEVAIIHCPGHQKGQDPVAVGNRQADRVARQAAMAEVLTLATEPDNTSHITAGKRTADGSEFEKRTADGSEFESPKKKAKVE

SEQ ID NO: 6615 - protein, 2090 aa, synthetic construct
MPAAKRVKLDGGDKKYSIGLDIGTNSVGWAVITDEYKVPSKKFKVLGNTDRHSIKKNLIGALLFDSGETAEATRLKRTARRRYTRRKNRICYLQEIFSNEMAKVDDSFFHRLEESFLVEEDKKHERHPIFGNIVDEVAYHEKYPTIYHLRKKLVDSTDKADLRLIYLALAHMIKFRGHFLIEGDLNPDNSDVDKLFIQLVQTYNQLFEENPINASGVDAKAILSARLSKSRRLENLIAQLPGEKKNGLFGNLIALSLGLTPNFKSNFDLAEDAKLQLSKDTYDDDLDNLLAQIGDQYADLFLAAKNLSDAILLSDILRVNTEITKAPLSASMIKRYDEHHQDLTLLKALVRQQLPEKYKEIFFDQSKNGYAGYIDGGASQEEFYKFIKPILEKMDGTEELLVKLNREDLLRKQRTFDNGSIPHQIHLGELHAILRRQEDFYPFLKDNREKIEKILTFRIPYYVGPLARGNSRFAWMTRKSEETITPWNFEEVVDKGASAQSFIERMTNFDKNLPNEKVLPKHSLLYEYFTVYNELTKVKYVTEGMRKPAFLSGEQKKAIVDLLFKTNRKVTVKQLKEDYFKKIECFDSVEISGVEDRFNASLGTYHDLLKIIKDKDFLDNEENEDILEDIVLTLTLFEDREMIEERLKTYAHLFDDKVMKQLKRRRYTGWGRLSRKLINGIRDKQSGKTILDFLKSDGFANRNFMQLIHDDSLTFKEDIQKAQVSGQGDSLHEHIANLAGSPAIKKGILQTVKVVDELVKVMGRHKPENIVIEMARENQTTQKGQKNSRERMKRIEEGIKELGSQILKEHPVENTQLQNEKLYLYYLQNGRDMYVDQELDINRLSDYDVDHIVPQSFLKDDSIDNKVLTRSDKARGKSDNVPSEEVVKKMKNYWRQLLNAKLITQRKFDNLTKAERGGLSELDKAGFIKRQLVETRQITKHVAQILDSRMNTKYDENDKLIREVKVITLKSKLVSDFRKDFQFYKVREINNYHHAHDAYLNAVVGTALIKKYPKLESEFVYGDYKVYDVRKMIAKSEQEIGKATAKYFFYSNIMNFFKTEITLANGEIRKRPLIETNGETGEIVWDKGRDFATVRKVLSMPQVNIVKKTEVQTGGFSKESILPKRNSDKLIARKKDWDPKKYGGFDSPTVAYSVLVVAKVEKGKSKKLKSVKELLGITIMERSSFEKNPIDFLEAKGYKEVKKDLIIKLPKYSLFELENGRKRMLASAGELQKGNELALPSKYVNFLYLASHYEKLKGSPEDNEQKQLFVEQHKHYLDEIIEQISEFSKRVILADANLDKVLSAYNKHRDKPIREQAENIIHLFTLTNLGAPAAFKYFDTTIDRKRYTSTKEVLDATLIHQSITGLYETRIDLSQLGGDGGGSSGGSGGTLQLEEEYRLFEPESTQKQEMDIWLKNFPQAWAETGGMGTAHCQAPVLIQLKATATPISIRQYPMPHEAYQGIKPHIRRMLDQGILKPCQSPWNTPLLPVKKPGTEDYRPVQDLREVNKRVEDIHPTVPNPYNLLSTLPPSHPWYTVLDLKDAFFCLRLHSESQLLFAFEWRDPEIGLSGQLTWTRLPQGFKNSPTLFNEALHSDLADFRVRYPALVLLQYVDDLLLAAATRTECLEGTKALLETLGNKGYRASAKKAQICLQEVTYLGYSLKDGQRWLTKARKEAILSIPVPKNSRQVREFLGKAGYCRLFIPGFAELAAPLYPLTRPGTLFQWGTEQQLAFEDIKKALLSSPALGLPDITKPFELFIDENSGFAKGVLVQKLGPWKRPVAYLSKKLDTVASGWPPCLRMVAAIAILVKDAGKLTLGQPLTILTSHPVEALVRQPPNKWLSNARMTHYQAMLLDAERVHFGPTVSLNPATLLPLPSGGNHHDCLQILAETHGTRPDLTDQPLPDADLTWYTDGSSFIRNGEREAGAAVTTESEVIWAAPLPPGTSAQRAELIALTQALKMAEGKKLTVYTDSRYAFATTHVHGEIYRRRGWLTSEGKEIKNKNEILALLEALFLPKRLSIIHCPGHQKGDSPQAKGNRLADDTAKKAATETHSSLTVLPAGKRTADGSEFEKRTADGSEFESPKKKAKVE

SEQ ID NO: 6616 - protein, 2213 aa, synthetic construct
MPAAKRVKLDGGDKKYSIGLDIGTNSVGWAVITDEYKVPSKKFKVLGNTDRHSIKKNLIGALLFDSGETAEATRLKRTARRRYTRRKNRICYLQEIFSNEMAKVDDSFFHRLEESFLVEEDKKHERHPIFGNIVDEVAYHEKYPTIYHLRKKLVDSTDKADLRLIYLALAHMIKFRGHFLIEGDLNPDNSDVDKLFIQLVQTYNQLFEENPINASGVDAKAILSARLSKSRRLENLIAQLPGEKKNGLFGNLIALSLGLTPNFKSNFDLAEDAKLQLSKDTYDDDLDNLLAQIGDQYADLFLAAKNLSDAILLSDILRVNTEITKAPLSASMIKRYDEHHQDLTLLKALVRQQLPEKYKEIFFDQSKNGYAGYIDGGASQEEFYKFIKPILEKMDGTEELLVKLNREDLLRKQRTFDNGSIPHQIHLGELHAILRRQEDFYPFLKDNREKIEKILTFRIPYYVGPLARGNSRFAWMTRKSEETITPWNFEEVVDKGASAQSFIERMTNFDKNLPNEKVLPKHSLLYEYFTVYNELTKVKYVTEGMRKPAFLSGEQKKAIVDLLFKTNRKVTVKQLKEDYFKKIECFDSVEISGVEDRFNASLGTYHDLLKIIKDKDFLDNEENEDILEDIVLTLTLFEDREMIEERLKTYAHLFDDKVMKQLKRRRYTGWGRLSRKLINGIRDKQSGKTILDFLKSDGFANRNFMQLIHDDSLTFKEDIQKAQVSGQGDSLHEHIANLAGSPAIKKGILQTVKVVDELVKVMGRHKPENIVIEMARENQTTQKGQKNSRERMKRIEEGIKELGSQILKEHPVENTQLQNEKLYLYYLQNGRDMYVDQELDINRLSDYDVDHIVPQSFLKDDSIDNKVLTRSDKARGKSDNVPSEEVVKKMKNYWRQLLNAKLITQRKFDNLTKAERGGLSELDKAGFIKRQLVETRQITKHVAQILDSRMNTKYDENDKLIREVKVITLKSKLVSDFRKDFQFYKVREINNYHHAHDAYLNAVVGTALIKKYPKLESEFVYGDYKVYDVRKMIAKSEQEIGKATAKYFFYSNIMNFFKTEITLANGEIRKRPLIETNGETGEIVWDKGRDFATVRKVLSMPQVNIVKKTEVQTGGFSKESILPKRNSDKLIARKKDWDPKKYGGFDSPTVAYSVLVVAKVEKGKSKKLKSVKELLGITIMERSSFEKNPIDFLEAKGYKEVKKDLIIKLPKYSLFELENGRKRMLASAGELQKGNELALPSKYVNFLYLASHYEKLKGSPEDNEQKQLFVEQHKHYLDEIIEQISEFSKRVILADANLDKVLSAYNKHRDKPIREQAENIIHLFTLTNLGAPAAFKYFDTTIDRKRYTSTKEVLDATLIHQSITGLYETRIDLSQLGGDGGGSSGGSGGTLGDQGSRGSDPLPEPRVTLTVEGIPTEFLVNTGAEHSVLTKPMGKMGSKRTVVAGATGSKVYPWTTKRLLKIGQKQVTHSFLVIPECPAPLLGRDLLTKLKAQIQFSTEGPQVTWEDRPAMCLVLNLEEEYRLHEKPVPPSIDPSWLQLFPMVWAEKAGMGLANQVPPVVVELKSDASPVAVRQYPMSKEAREGIRPHIQRFLDLGILVPCQSPWNTPLLPVKKPGTNDYRPVQDLREVNKRVQDIHPTVPNPYNLLSSLPPSHTWYSVLDLKDAFFCLKLHPNSQPLFAFEWRDPEKGNTGQLTWTRLPQGFKNSPTLFNEALHRDLASFRALNPQVVMLQYVDDLLVAAPTYRDCKEGTRRLLQELSKLGYRVSAKKAQLCREEVTYLGYLLKGGKRWLTPARKATVMKIPTPTTPRQVREFLGKAGFCRLFIPGFASLAAPLYPLTRPKVPFTWTEAHQEAFGRIKEALLSAPALALPDLTKPFALYVDEKEGVARGVLTQTLGPWRRPVAYLSKKLDPVASGWPTCLKAIAAVALLLKDADKLTLGQNVLVIAPHNLESIVRQPPDRWMTNARMTHYQSLLLNERVSFAPPAILNPATLLPVESDDTPIHICSEILAEETGTRPDLRDQPLPGVPAWYTDGSSFIMDGRRQAGAAIVDNKRTVWASNLPEGTSAQKAELIALTQALRLAEGKSINIYTDSRYAFATAHVHGAIYKQRGWLTSAGKDIKNKEEILALLEAIHLPKRVAIIHCPGHQRGTDPVATGNRKADEAAKQAAQSTRILTETTKNAGKRTADGSEFEKRTADGSEFESPKKKAKVE

SEQ ID NO: 6617 - protein, 2091 aa, synthetic construct
MPAAKRVKLDGGDKKYSIGLDIGTNSVGWAVITDEYKVPSKKFKVLGNTDRHSIKKNLIGALLFDSGETAEATRLKRTARRRYTRRKNRICYLQEIFSNEMAKVDDSFFHRLEESFLVEEDKKHERHPIFGNIVDEVAYHEKYPTIYHLRKKLVDSTDKADLRLIYLALAHMIKFRGHFLIEGDLNPDNSDVDKLFIQLVQTYNQLFEENPINASGVDAKAILSARLSKSRRLENLIAQLPGEKKNGLFGNLIALSLGLTPNFKSNFDLAEDAKLQLSKDTYDDDLDNLLAQIGDQYADLFLAAKNLSDAILLSDILRVNTEITKAPLSASMIKRYDEHHQDLTLLKALVRQQLPEKYKEIFFDQSKNGYAGYIDGGASQEEFYKFIKPILEKMDGTEELLVKLNREDLLRKQRTFDNGSIPHQIHLGELHAILRRQEDFYPFLKDNREKIEKILTFRIPYYVGPLARGNSRFAWMTRKSEETITPWNFEEVVDKGASAQSFIERMTNFDKNLPNEKVLPKHSLLYEYFTVYNELTKVKYVTEGMRKPAFLSGEQKKAIVDLLFKTNRKVTVKQLKEDYFKKIECFDSVEISGVEDRFNASLGTYHDLLKIIKDKDFLDNEENEDILEDIVLTLTLFEDREMIEERLKTYAHLFDDKVMKQLKRRRYTGWGRLSRKLINGIRDKQSGKTILDFLKSDGFANRNFMQLIHDDSLTFKEDIQKAQVSGQGDSLHEHIANLAGSPAIKKGILQTVKVVDELVKVMGRHKPENIVIEMARENQTTQKGQKNSRERMKRIEEGIKELGSQILKEHPVENTQLQNEKLYLYYLQNGRDMYVDQELDINRLSDYDVDHIVPQSFLKDDSIDNKVLTRSDKARGKSDNVPSEEVVKKMKNYWRQLLNAKLITQRKFDNLTKAERGGLSELDKAGFIKRQLVETRQITKHVAQILDSRMNTKYDENDKLIREVKVITLKSKLVSDFRKDFQFYKVREINNYHHAHDAYLNAVVGTALIKKYPKLESEFVYGDYKVYDVRKMIAKSEQEIGKATAKYFFYSNIMNFFKTEITLANGEIRKRPLIETNGETGEIVWDKGRDFATVRKVLSMPQVNIVKKTEVQTGGFSKESILPKRNSDKLIARKKDWDPKKYGGFDSPTVAYSVLVVAKVEKGKSKKLKSVKELLGITIMERSSFEKNPIDFLEAKGYKEVKKDLIIKLPKYSLFELENGRKRMLASAGELQKGNELALPSKYVNFLYLASHYEKLKGSPEDNEQKQLFVEQHKHYLDEIIEQISEFSKRVILADANLDKVLSAYNKHRDKPIREQAENIIHLFTLTNLGAPAAFKYFDTTIDRKRYTSTKEVLDATLIHQSITGLYETRIDLSQLGGDGGGSSGGSGGTLGIEDEYRLHETSTEPDVSLGSTWLSDFPQAWAETGGMGLAVRQAPLIIPLKATSTPVSIQQYPMSHEARLGIKPHIQRLLDQGILVPCQSPWNTPLLPVKKPGTNDYRPVQDLREVNKRVEDIHPTVPNPYNLLSGLPPSHQWYTVLDLKDAFFCLRLHPTSQPLFAFEWRDPGMGISGQLTWTRLPQGFKNSPTLFNEALHRDLADFRIQHPDLILLQYVDDILLAATSELDCQQGTRALLQTLGDLGYRASAKKAQICQKQVKYLGYLLREGQRWLTEARKETVMGQPVPKTPRQLREFLGTAGFCRLWIPGFAEMAAPLYPLTKPGTLFSWGPDQQKAYQEIKQALLTAPALGLPDLTKPFELFVDEKQGYAKGVLTQKLGPWRRPVAYLSKKLDPVAAGWPPCLRMVAAIAVLTKDAGKLTMGQPLVILAPHAVEALVKQPPDRWLSNARMTHYQAMLLDTDRVQFGPVVALNPATLLPLPEEGAPHDCLEILAETHGTRPDLTDQPIPDADHTWYTDGSSFLQEGQRKAGAAVTTETEVIWAGALPAGTSAQRAELIALTQALKMAEGKRLNVYTDSRYAFATAHIHGEIYRRRGWLTSEGREIKNKSEILALLKALFLPKRLSIIHCLGHQKGDSAEARGNRLADQAAREAAIKTPPDTSTLLAGKRTADGSEFEKRTADGSEFESPKKKAKVE

SEQ ID NO: 6618 - protein, 2091 aa, synthetic construct
MPAAKRVKLDGGDKKYSIGLDIGTNSVGWAVITDEYKVPSKKFKVLGNTDRHSIKKNLIGALLFDSGETAEATRLKRTARRRYTRRKNRICYLQEIFSNEMAKVDDSFFHRLEESFLVEEDKKHERHPIFGNIVDEVAYHEKYPTIYHLRKKLVDSTDKADLRLIYLALAHMIKFRGHFLIEGDLNPDNSDVDKLFIQLVQTYNQLFEENPINASGVDAKAILSARLSKSRRLENLIAQLPGEKKNGLFGNLIALSLGLTPNFKSNFDLAEDAKLQLSKDTYDDDLDNLLAQIGDQYADLFLAAKNLSDAILLSDILRVNTEITKAPLSASMIKRYDEHHQDLTLLKALVRQQLPEKYKEIFFDQSKNGYAGYIDGGASQEEFYKFIKPILEKMDGTEELLVKLNREDLLRKQRTFDNGSIPHQIHLGELHAILRRQEDFYPFLKDNREKIEKILTFRIPYYVGPLARGNSRFAWMTRKSEETITPWNFEEVVDKGASAQSFIERMTNFDKNLPNEKVLPKHSLLYEYFTVYNELTKVKYVTEGMRKPAFLSGEQKKAIVDLLFKTNRKVTVKQLKEDYFKKIECFDSVEISGVEDRFNASLGTYHDLLKIIKDKDFLDNEENEDILEDIVLTLTLFEDREMIEERLKTYAHLFDDKVMKQLKRRRYTGWGRLSRKLINGIRDKQSGKTILDFLKSDGFANRNFMQLIHDDSLTFKEDIQKAQVSGQGDSLHEHIANLAGSPAIKKGILQTVKVVDELVKVMGRHKPENIVIEMARENQTTQKGQKNSRERMKRIEEGIKELGSQILKEHPVENTQLQNEKLYLYYLQNGRDMYVDQELDINRLSDYDVDHIVPQSFLKDDSIDNKVLTRSDKARGKSDNVPSEEVVKKMKNYWRQLLNAKLITQRKFDNLTKAERGGLSELDKAGFIKRQLVETRQITKHVAQILDSRMNTKYDENDKLIREVKVITLKSKLVSDFRKDFQFYKVREINNYHHAHDAYLNAVVGTALIKKYPKLESEFVYGDYKVYDVRKMIAKSEQEIGKATAKYFFYSNIMNFFKTEITLANGEIRKRPLIETNGETGEIVWDKGRDFATVRKVLSMPQVNIVKKTEVQTGGFSKESILPKRNSDKLIARKKDWDPKKYGGFDSPTVAYSVLVVAKVEKGKSKKLKSVKELLGITIMERSSFEKNPIDFLEAKGYKEVKKDLIIKLPKYSLFELENGRKRMLASAGELQKGNELALPSKYVNFLYLASHYEKLKGSPEDNEQKQLFVEQHKHYLDEIIEQISEFSKRVILADANLDKVLSAYNKHRDKPIREQAENIIHLFTLTNLGAPAAFKYFDTTIDRKRYTSTKEVLDATLIHQSITGLYETRIDLSQLGGDGGGSSGGSGGTLNIEDEYRLHETSKEPDVSLGSTWLSDFPQAWAETGGMGLAVRQAPLIIPLKATSTPVSIKQYPMSQEARLGIKPHIQRLLDQGILVPCQSPWNTPLLPVKKPGTNDYRPVQDLREVNKRVEDIHPTVPNPYNLLSGLPPSHQWYTVLDLKDAFFCLRLHPTSQPLFAFEWRDPEMGISGQLTWTRLPQGFKNSPTLFNEALHRDLAGFRIQHPDLILLQYVDDLLLAATSELDCQQGTRALLQTLGDLGYRASAKKAQICQKQVKYLGYLLKEGQRWLTEARKETVMGQPIPKTPRQLREFLGTAGFCRLWIPGFAEMAAPLYPLTKPGTLFNWGPDQQKAFQEIKQALLTAPALGLPDLTKPFELFVDEKQGYAKGVLTQKLGPWRRPVAYLSKKLDPVAAGWPPCLRMVAAIAVLTKDAGKLTMGQPLVILAPHAVEALVKQPPDRWLSNARMTHYQALLLDTDRVQFGPVVALNPATLLPLPEEGLQHDCLDILAEAHGTRSDLMDQPLPDADHTWYTDGSSFLQEGQRKAGAAVTTETEVIWARALPAGTSAQRAELIALTQALKMAEGKKLNVYTDSRYAFATAHIHGEIYRRRGWLTSEGKEIKNKDEILALLKALFLPKRLSIIHCPGHQKGNSAEARGNRMADQAAREVATRETPETSTLLAGKRTADGSEFEKRTADGSEFESPKKKAKVE

SEQ ID NO: 6619 - protein, 2089 aa, synthetic construct
MPAAKRVKLDGGDKKYSIGLDIGTNSVGWAVITDEYKVPSKKFKVLGNTDRHSIKKNLIGALLFDSGETAEATRLKRTARRRYTRRKNRICYLQEIFSNEMAKVDDSFFHRLEESFLVEEDKKHERHPIFGNIVDEVAYHEKYPTIYHLRKKLVDSTDKADLRLIYLALAHMIKFRGHFLIEGDLNPDNSDVDKLFIQLVQTYNQLFEENPINASGVDAKAILSARLSKSRRLENLIAQLPGEKKNGLFGNLIALSLGLTPNFKSNFDLAEDAKLQLSKDTYDDDLDNLLAQIGDQYADLFLAAKNLSDAILLSDILRVNTEITKAPLSASMIKRYDEHHQDLTLLKALVRQQLPEKYKEIFFDQSKNGYAGYIDGGASQEEFYKFIKPILEKMDGTEELLVKLNREDLLRKQRTFDNGSIPHQIHLGELHAILRRQEDFYPFLKDNREKIEKILTFRIPYYVGPLARGNSRFAWMTRKSEETITPWNFEEVVDKGASAQSFIERMTNFDKNLPNEKVLPKHSLLYEYFTVYNELTKVKYVTEGMRKPAFLSGEQKKAIVDLLFKTNRKVTVKQLKEDYFKKIECFDSVEISGVEDRFNASLGTYHDLLKIIKDKDFLDNEENEDILEDIVLTLTLFEDREMIEERLKTYAHLFDDKVMKQLKRRRYTGWGRLSRKLINGIRDKQSGKTILDFLKSDGFANRNFMQLIHDDSLTFKEDIQKAQVSGQGDSLHEHIANLAGSPAIKKGILQTVKVVDELVKVMGRHKPENIVIEMARENQTTQKGQKNSRERMKRIEEGIKELGSQILKEHPVENTQLQNEKLYLYYLQNGRDMYVDQELDINRLSDYDVDHIVPQSFLKDDSIDNKVLTRSDKARGKSDNVPSEEVVKKMKNYWRQLLNAKLITQRKFDNLTKAERGGLSELDKAGFIKRQLVETRQITKHVAQILDSRMNTKYDENDKLIREVKVITLKSKLVSDFRKDFQFYKVREINNYHHAHDAYLNAVVGTALIKKYPKLESEFVYGDYKVYDVRKMIAKSEQEIGKATAKYFFYSNIMNFFKTEITLANGEIRKRPLIETNGETGEIVWDKGRDFATVRKVLSMPQVNIVKKTEVQTGGFSKESILPKRNSDKLIARKKDWDPKKYGGFDSPTVAYSVLVVAKVEKGKSKKLKSVKELLGITIMERSSFEKNPIDFLEAKGYKEVKKDLIIKLPKYSLFELENGRKRMLASAGELQKGNELALPSKYVNFLYLASHYEKLKGSPEDNEQKQLFVEQHKHYLDEIIEQISEFSKRVILADANLDKVLSAYNKHRDKPIREQAENIIHLFTLTNLGAPAAFKYFDTTIDRKRYTSTKEVLDATLIHQSITGLYETRIDLSQLGGDGGGSSGGSGGVLNLEEEYRLHEKPVPSSIDPSWLQLFPTVWAERAGMGLANQVPPVVVELRSGASPVAVRQYPMSKEAREGIRPHIQRFLDLGVLVPCQSPWNTPLLPVKKPGTNDYRPVQDLREINKRVQDIHPTVPNPYNLLSSLPPSHTWYSVLDLKDAFFCLKLHPNSQPLFAFEWRDPEKGNTGQLTWTRLPQGFKNSPTLFNEALHRDLAPFRALNPQVVLLQYVDDLLVAAPTYRDCKEGTQKLLQELSKLGYRVSAKKAQLCQKEVTYLGYLLKEGKRWLTPARKATVMKIPPPTTPRQVREFLGTAGFCRLWIPGFASLAAPLYPLTKPSIPFIWTEEHQKAFDRIKEALLSAPALALPDLTKPFTLYVDERAGVARGVLTQTLGPWRRPVAYLSKKLDPVASGWPTCLKAVAAVALLLKDADKLTLGQNVTVIASHSLESIVRQPPDRWMTNARMTHYQSLLLNERVSFAPPAVLNPATLLPVESEATPVHRCSEILAEETGTRRDLKDQPLPGVPAWYTDGSSFIAEGKRRAGAAIVDGKRTVWASSLPEGTSAQKAELVALTQALRLAEGKDINIYTDSRYAFATAHIHGAIYKQRGWLTSAGKDIKNKEEILALLEAIHLPKRVAIIHCPGHQKGNDPVATGNRRADEAAKQAALSTRVLAETTKPAGKRTADGSEFEKRTADGSEFESPKKKAKVE

SEQ ID NO: 6620 - protein, 2091 aa, synthetic construct
MPAAKRVKLDGGDKKYSIGLDIGTNSVGWAVITDEYKVPSKKFKVLGNTDRHSIKKNLIGALLFDSGETAEATRLKRTARRRYTRRKNRICYLQEIFSNEMAKVDDSFFHRLEESFLVEEDKKHERHPIFGNIVDEVAYHEKYPTIYHLRKKLVDSTDKADLRLIYLALAHMIKFRGHFLIEGDLNPDNSDVDKLFIQLVQTYNQLFEENPINASGVDAKAILSARLSKSRRLENLIAQLPGEKKNGLFGNLIALSLGLTPNFKSNFDLAEDAKLQLSKDTYDDDLDNLLAQIGDQYADLFLAAKNLSDAILLSDILRVNTEITKAPLSASMIKRYDEHHQDLTLLKALVRQQLPEKYKEIFFDQSKNGYAGYIDGGASQEEFYKFIKPILEKMDGTEELLVKLNREDLLRKQRTFDNGSIPHQIHLGELHAILRRQEDFYPFLKDNREKIEKILTFRIPYYVGPLARGNSRFAWMTRKSEETITPWNFEEVVDKGASAQSFIERMTNFDKNLPNEKVLPKHSLLYEYFTVYNELTKVKYVTEGMRKPAFLSGEQKKAIVDLLFKTNRKVTVKQLKEDYFKKIECFDSVEISGVEDRFNASLGTYHDLLKIIKDKDFLDNEENEDILEDIVLTLTLFEDREMIEERLKTYAHLFDDKVMKQLKRRRYTGWGRLSRKLINGIRDKQSGKTILDFLKSDGFANRNFMQLIHDDSLTFKEDIQKAQVSGQGDSLHEHIANLAGSPAIKKGILQTVKVVDELVKVMGRHKPENIVIEMARENQTTQKGQKNSRERMKRIEEGIKELGSQILKEHPVENTQLQNEKLYLYYLQNGRDMYVDQELDINRLSDYDVDHIVPQSFLKDDSIDNKVLTRSDKARGKSDNVPSEEVVKKMKNYWRQLLNAKLITQRKFDNLTKAERGGLSELDKAGFIKRQLVETRQITKHVAQILDSRMNTKYDENDKLIREVKVITLKSKLVSDFRKDFQFYKVREINNYHHAHDAYLNAVVGTALIKKYPKLESEFVYGDYKVYDVRKMIAKSEQEIGKATAKYFFYSNIMNFFKTEITLANGEIRKRPLIETNGETGEIVWDKGRDFATVRKVLSMPQVNIVKKTEVQTGGFSKESILPKRNSDKLIARKKDWDPKKYGGFDSPTVAYSVLVVAKVEKGKSKKLKSVKELLGITIMERSSFEKNPIDFLEAKGYKEVKKDLIIKLPKYSLFELENGRKRMLASAGELQKGNELALPSKYVNFLYLASHYEKLKGSPEDNEQKQLFVEQHKHYLDEIIEQISEFSKRVILADANLDKVLSAYNKHRDKPIREQAENIIHLFTLTNLGAPAAFKYFDTTIDRKRYTSTKEVLDATLIHQSITGLYETRIDLSQLGGDGGGSSGGSGGTLNIEDEYRLHETSKEPDVPLGSTWLSDFPQAWAETGGMGLAVRQAPLIIPLKATSTPVSIKQYPMSQEARLGIKPHIQRLLDQGILVPCQSPWNTPLLPVKKPGTNDYRPVQDLREVNKRVEDIHPTVPNPYNLLSGLPPSHQWYTVLDLKDAFFCLRLHPTSQPLFAFEWRDPEMGISGQLTWTRLPQGFKNSPTLFNEALHRDLADFRIQHPDLILLQYVDDLLLAATSEQDCQRGTRALLQTLGNLGYRASAKKAQICQKQVKYLGYLLKEGQRWLTEARKETVMGQPTPKTPRQLREFLGTAGFCRLWIPGFAEMAAPLYPLTKPGTLFNWGPDQQKAYQEIKQALLTAPALGLPDLTKPFELFVDEKQGYAKGVLTQKLGPWRRPVAYLSKKLDPVAAGWPPCLRMVAAIAVLTKDAGKLTMGQPLVILAPHAVEALVKQPPDRWLSNARMTHYQAMLLDTDRVQFGPVVALNPATLLPLPEKEAPHDCLEILAETHGTRPDLTDQPIPDADYTWYTDGSSFLQEGQRRAGAAVTTETEVIWARALPAGTSAQRAELIALTQALKMAEGKKLNVYTDSRYAFATAHVHGEIYRRRGWLTSEGREIKNKNEILALLKALFLPKRLSIIHCPGHQKGNSAEARGNRMADQAAREAAMKAVLETSTLLAGKRTADGSEFEKRTADGSEFESPKKKAKVE

SEQ ID NO: 6621 - protein, 2095 aa, synthetic construct
MPAAKRVKLDGGDKKYSIGLDIGTNSVGWAVITDEYKVPSKKFKVLGNTDRHSIKKNLIGALLFDSGETAEATRLKRTARRRYTRRKNRICYLQEIFSNEMAKVDDSFFHRLEESFLVEEDKKHERHPIFGNIVDEVAYHEKYPTIYHLRKKLVDSTDKADLRLIYLALAHMIKFRGHFLIEGDLNPDNSDVDKLFIQLVQTYNQLFEENPINASGVDAKAILSARLSKSRRLENLIAQLPGEKKNGLFGNLIALSLGLTPNFKSNFDLAEDAKLQLSKDTYDDDLDNLLAQIGDQYADLFLAAKNLSDAILLSDILRVNTEITKAPLSASMIKRYDEHHQDLTLLKALVRQQLPEKYKEIFFDQSKNGYAGYIDGGASQEEFYKFIKPILEKMDGTEELLVKLNREDLLRKQRTFDNGSIPHQIHLGELHAILRRQEDFYPFLKDNREKIEKILTFRIPYYVGPLARGNSRFAWMTRKSEETITPWNFEEVVDKGASAQSFIERMTNFDKNLPNEKVLPKHSLLYEYFTVYNELTKVKYVTEGMRKPAFLSGEQKKAIVDLLFKTNRKVTVKQLKEDYFKKIECFDSVEISGVEDRFNASLGTYHDLLKIIKDKDFLDNEENEDILEDIVLTLTLFEDREMIEERLKTYAHLFDDKVMKQLKRRRYTGWGRLSRKLINGIRDKQSGKTILDFLKSDGFANRNFMQLIHDDSLTFKEDIQKAQVSGQGDSLHEHIANLAGSPAIKKGILQTVKVVDELVKVMGRHKPENIVIEMARENQTTQKGQKNSRERMKRIEEGIKELGSQILKEHPVENTQLQNEKLYLYYLQNGRDMYVDQELDINRLSDYDVDHIVPQSFLKDDSIDNKVLTRSDKARGKSDNVPSEEVVKKMKNYWRQLLNAKLITQRKFDNLTKAERGGLSELDKAGFIKRQLVETRQITKHVAQILDSRMNTKYDENDKLIREVKVITLKSKLVSDFRKDFQFYKVREINNYHHAHDAYLNAVVGTALIKKYPKLESEFVYGDYKVYDVRKMIAKSEQEIGKATAKYFFYSNIMNFFKTEITLANGEIRKRPLIETNGETGEIVWDKGRDFATVRKVLSMPQVNIVKKTEVQTGGFSKESILPKRNSDKLIARKKDWDPKKYGGFDSPTVAYSVLVVAKVEKGKSKKLKSVKELLGITIMERSSFEKNPIDFLEAKGYKEVKKDLIIKLPKYSLFELENGRKRMLASAGELQKGNELALPSKYVNFLYLASHYEKLKGSPEDNEQKQLFVEQHKHYLDEIIEQISEFSKRVILADANLDKVLSAYNKHRDKPIREQAENIIHLFTLTNLGAPAAFKYFDTTIDRKRYTSTKEVLDATLIHQSITGLYETRIDLSQLGGDGGGGSEAAAKGGTAPLEEEYRLFLEAPIQNVTLLEQWKREIPKVWAEINPPGLASTQAPIHVQLLSTALPVRVRQYPITLEAKRSLRETIRKFRAAGILRPVHSPWNTPLLPVRKSGTSEYRMVQDLREVNKRVETIHPTVPNPYTLLSLLPPDRIWYSVLDLKDAFFCIPLAPESQLIFAFEWADAEEGESGQLTWTRLPQGFKNSPTLFNEALNRDLQGFRLDHPSVSLLQYVDDLLIAADTQAACLSATRDLLMTLAELGYRVSGKKAQLCQEEVTYLGFKIHKGSRSLSNSRTQAILQIPVPKTKRQVREFLGTIGYCRLWIPGFAELAQPLYAATRPGNDPLVWGEKEEEAFQSLKLALTQPPALALPSLDKPFQLFVEETSGAAKGVLTQALGPWKRPVAYLSKRLDPVAAGWPRCLRAIAAAALLTREASKLTFGQDIEITSSHNLESLLRSPPDKWLTNARITQYQVLLLDPPRVRFKQTAALNPATLLPETDDTLPIHHCLDTLDSLTSTRPDLTDQPLAQAEATLFTDGSSYIRDGKRYAGAAVVTLDSVIWAEPLPIGTSAQKAELIALTKALEWSKDKSVNIYTDSRYAFATLHVHGMIYRERGWLTAGGKAIKNAPEILALLTAVWLPKRVAVMHCKGHQKDDAPTSTGNRRADEVAREVAIRPLSTQATISAGKRTADGSEFEKRTADGSEFESPKKKAKVE

SEQ ID NO: 6622 - protein, 2095 aa, synthetic construct
MPAAKRVKLDGGDKKYSIGLDIGTNSVGWAVITDEYKVPSKKFKVLGNTDRHSIKKNLIGALLFDSGETAEATRLKRTARRRYTRRKNRICYLQEIFSNEMAKVDDSFFHRLEESFLVEEDKKHERHPIFGNIVDEVAYHEKYPTIYHLRKKLVDSTDKADLRLIYLALAHMIKFRGHFLIEGDLNPDNSDVDKLFIQLVQTYNQLFEENPINASGVDAKAILSARLSKSRRLENLIAQLPGEKKNGLFGNLIALSLGLTPNFKSNFDLAEDAKLQLSKDTYDDDLDNLLAQIGDQYADLFLAAKNLSDAILLSDILRVNTEITKAPLSASMIKRYDEHHQDLTLLKALVRQQLPEKYKEIFFDQSKNGYAGYIDGGASQEEFYKFIKPILEKMDGTEELLVKLNREDLLRKQRTFDNGSIPHQIHLGELHAILRRQEDFYPFLKDNREKIEKILTFRIPYYVGPLARGNSRFAWMTRKSEETITPWNFEEVVDKGASAQSFIERMTNFDKNLPNEKVLPKHSLLYEYFTVYNELTKVKYVTEGMRKPAFLSGEQKKAIVDLLFKTNRKVTVKQLKEDYFKKIECFDSVEISGVEDRFNASLGTYHDLLKIIKDKDFLDNEENEDILEDIVLTLTLFEDREMIEERLKTYAHLFDDKVMKQLKRRRYTGWGRLSRKLINGIRDKQSGKTILDFLKSDGFANRNFMQLIHDDSLTFKEDIQKAQVSGQGDSLHEHIANLAGSPAIKKGILQTVKVVDELVKVMGRHKPENIVIEMARENQTTQKGQKNSRERMKRIEEGIKELGSQILKEHPVENTQLQNEKLYLYYLQNGRDMYVDQELDINRLSDYDVDHIVPQSFLKDDSIDNKVLTRSDKARGKSDNVPSEEVVKKMKNYWRQLLNAKLITQRKFDNLTKAERGGLSELDKAGFIKRQLVETRQITKHVAQILDSRMNTKYDENDKLIREVKVITLKSKLVSDFRKDFQFYKVREINNYHHAHDAYLNAVVGTALIKKYPKLESEFVYGDYKVYDVRKMIAKSEQEIGKATAKYFFYSNIMNFFKTEITLANGEIRKRPLIETNGETGEIVWDKGRDFATVRKVLSMPQVNIVKKTEVQTGGFSKESILPKRNSDKLIARKKDWDPKKYGGFDSPTVAYSVLVVAKVEKGKSKKLKSVKELLGITIMERSSFEKNPIDFLEAKGYKEVKKDLIIKLPKYSLFELENGRKRMLASAGELQKGNELALPSKYVNFLYLASHYEKLKGSPEDNEQKQLFVEQHKHYLDEIIEQISEFSKRVILADANLDKVLSAYNKHRDKPIREQAENIIHLFTLTNLGAPAAFKYFDTTIDRKRYTSTKEVLDATLIHQSITGLYETRIDLSQLGGDGGGGSEAAAKGGTAPLEEEYRLFLEAPIQNVTLLEQWKREIPKVWAEINPPGLASTQAPIHVQLLSTALPVRVRQYPITLEAKRSLRETIRKFRAAGILRPVHSPWNTPLLPVRKSGTSEYRMVQDLREVNKRVETIHPTVPNPYTLLSLLPPDRIWYSVLDLKDAFFCIPLAPESQLIFAFEWADAEEGESGQLTWTRLPQGFKNSPTLFNEALNRDLQGFRLDHPSVSLLQYVDDLLIAADTQAACLSATRDLLMTLAELGYRVSGKKAQLCQEEVTYLGFKIHKGSRSLSNSRTQAILQIPVPKTKRQVREFLGKIGYCRLFIPGFAELAQPLYAATRPGNDPLVWGEKEEEAFQSLKLALTQPPALALPSLDKPFQLFVEETSGAAKGVLTQALGPWKRPVAYLSKRLDPVAAGWPRCLRAIAAAALLTREASKLTFGQDIEITSSHNLESLLRSPPDKWLTNARITQYQVLLLDPPRVRFKQTAALNPATLLPETDDTLPIHHCLDTLDSLTSTRPDLTDQPLAQAEATLFTDGSSYIRDGKRYAGAAVVTLDSVIWAEPLPIGTSAQKAELIALTKALEWSKDKSVNIYTDSRYAFATLHVHGMIYRERGWLTAGGKAIKNAPEILALLTAVWLPKRVAVMHCKGHQKDDAPTSTGNRRADEVAREVAIRPLSTQATISAGKRTADGSEFEKRTADGSEFESPKKKAKVE

SEQ ID NO: 6623 - protein, 2092 aa, synthetic construct
MPAAKRVKLDGGDKKYSIGLDIGTNSVGWAVITDEYKVPSKKFKVLGNTDRHSIKKNLIGALLFDSGETAEATRLKRTARRRYTRRKNRICYLQEIFSNEMAKVDDSFFHRLEESFLVEEDKKHERHPIFGNIVDEVAYHEKYPTIYHLRKKLVDSTDKADLRLIYLALAHMIKFRGHFLIEGDLNPDNSDVDKLFIQLVQTYNQLFEENPINASGVDAKAILSARLSKSRRLENLIAQLPGEKKNGLFGNLIALSLGLTPNFKSNFDLAEDAKLQLSKDTYDDDLDNLLAQIGDQYADLFLAAKNLSDAILLSDILRVNTEITKAPLSASMIKRYDEHHQDLTLLKALVRQQLPEKYKEIFFDQSKNGYAGYIDGGASQEEFYKFIKPILEKMDGTEELLVKLNREDLLRKQRTFDNGSIPHQIHLGELHAILRRQEDFYPFLKDNREKIEKILTFRIPYYVGPLARGNSRFAWMTRKSEETITPWNFEEVVDKGASAQSFIERMTNFDKNLPNEKVLPKHSLLYEYFTVYNELTKVKYVTEGMRKPAFLSGEQKKAIVDLLFKTNRKVTVKQLKEDYFKKIECFDSVEISGVEDRFNASLGTYHDLLKIIKDKDFLDNEENEDILEDIVLTLTLFEDREMIEERLKTYAHLFDDKVMKQLKRRRYTGWGRLSRKLINGIRDKQSGKTILDFLKSDGFANRNFMQLIHDDSLTFKEDIQKAQVSGQGDSLHEHIANLAGSPAIKKGILQTVKVVDELVKVMGRHKPENIVIEMARENQTTQKGQKNSRERMKRIEEGIKELGSQILKEHPVENTQLQNEKLYLYYLQNGRDMYVDQELDINRLSDYDVDHIVPQSFLKDDSIDNKVLTRSDKARGKSDNVPSEEVVKKMKNYWRQLLNAKLITQRKFDNLTKAERGGLSELDKAGFIKRQLVETRQITKHVAQILDSRMNTKYDENDKLIREVKVITLKSKLVSDFRKDFQFYKVREINNYHHAHDAYLNAVVGTALIKKYPKLESEFVYGDYKVYDVRKMIAKSEQEIGKATAKYFFYSNIMNFFKTEITLANGEIRKRPLIETNGETGEIVWDKGRDFATVRKVLSMPQVNIVKKTEVQTGGFSKESILPKRNSDKLIARKKDWDPKKYGGFDSPTVAYSVLVVAKVEKGKSKKLKSVKELLGITIMERSSFEKNPIDFLEAKGYKEVKKDLIIKLPKYSLFELENGRKRMLASAGELQKGNELALPSKYVNFLYLASHYEKLKGSPEDNEQKQLFVEQHKHYLDEIIEQISEFSKRVILADANLDKVLSAYNKHRDKPIREQAENIIHLFTLTNLGAPAAFKYFDTTIDRKRYTSTKEVLDATLIHQSITGLYETRIDLSQLGGDGGGGSEAAAKGGTLQLEEEYRLFEPESTQKQEMDIWLKNFPQAWAETGGMGTAHCQAPVLIQLKATATPISIRQYPMPHEAYQGIKPHIRRMLDQGILKPCQSPWNTPLLPVKKPGTEDYRPVQDLREVNKRVEDIHPTVPNPYNLLSTLPPSHPWYTVLDLKDAFFCLRLHSESQLLFAFEWRDPEIGLSGQLTWTRLPQGFKNSPTLFNEALHSDLADFRVRYPALVLLQYVDDLLLAAATRTECLEGTKALLETLGNKGYRASAKKAQICLQEVTYLGYSLKDGQRWLTKARKEAILSIPVPKNSRQVREFLGTAGYCRLWIPGFAELAAPLYPLTRPGTLFQWGTEQQLAFEDIKKALLSSPALGLPDITKPFELFIDENSGFAKGVLVQKLGPWKRPVAYLSKKLDTVASGWPPCLRMVAAIAILVKDAGKLTLGQPLTILTSHPVEALVRQPPNKWLSNARMTHYQAMLLDAERVHFGPTVSLNPATLLPLPSGGNHHDCLQILAETHGTRPDLTDQPLPDADLTWYTDGSSFIRNGEREAGAAVTTESEVIWAAPLPPGTSAQRAELIALTQALKMAEGKKLTVYTDSRYAFATTHVHGEIYRRRGWLTSEGKEIKNKNEILALLEALFLPKRLSIIHCPGHQKGDSPQAKGNRLADDTAKKAATETHSSLTVLPAGKRTADGSEFEKRTADGSEFESPKKKAKVE

SEQ ID NO: 6624 - protein, 2124 aa, synthetic construct
MPAAKRVKLDGGDKKYSIGLDIGTNSVGWAVITDEYKVPSKKFKVLGNTDRHSIKKNLIGALLFDSGETAEATRLKRTARRRYTRRKNRICYLQEIFSNEMAKVDDSFFHRLEESFLVEEDKKHERHPIFGNIVDEVAYHEKYPTIYHLRKKLVDSTDKADLRLIYLALAHMIKFRGHFLIEGDLNPDNSDVDKLFIQLVQTYNQLFEENPINASGVDAKAILSARLSKSRRLENLIAQLPGEKKNGLFGNLIALSLGLTPNFKSNFDLAEDAKLQLSKDTYDDDLDNLLAQIGDQYADLFLAAKNLSDAILLSDILRVNTEITKAPLSASMIKRYDEHHQDLTLLKALVRQQLPEKYKEIFFDQSKNGYAGYIDGGASQEEFYKFIKPILEKMDGTEELLVKLNREDLLRKQRTFDNGSIPHQIHLGELHAILRRQEDFYPFLKDNREKIEKILTFRIPYYVGPLARGNSRFAWMTRKSEETITPWNFEEVVDKGASAQSFIERMTNFDKNLPNEKVLPKHSLLYEYFTVYNELTKVKYVTEGMRKPAFLSGEQKKAIVDLLFKTNRKVTVKQLKEDYFKKIECFDSVEISGVEDRFNASLGTYHDLLKIIKDKDFLDNEENEDILEDIVLTLTLFEDREMIEERLKTYAHLFDDKVMKQLKRRRYTGWGRLSRKLINGIRDKQSGKTILDFLKSDGFANRNFMQLIHDDSLTFKEDIQKAQVSGQGDSLHEHIANLAGSPAIKKGILQTVKVVDELVKVMGRHKPENIVIEMARENQTTQKGQKNSRERMKRIEEGIKELGSQILKEHPVENTQLQNEKLYLYYLQNGRDMYVDQELDINRLSDYDVDHIVPQSFLKDDSIDNKVLTRSDKARGKSDNVPSEEVVKKMKNYWRQLLNAKLITQRKFDNLTKAERGGLSELDKAGFIKRQLVETRQITKHVAQILDSRMNTKYDENDKLIREVKVITLKSKLVSDFRKDFQFYKVREINNYHHAHDAYLNAVVGTALIKKYPKLESEFVYGDYKVYDVRKMIAKSEQEIGKATAKYFFYSNIMNFFKTEITLANGEIRKRPLIETNGETGEIVWDKGRDFATVRKVLSMPQVNIVKKTEVQTGGFSKESILPKRNSDKLIARKKDWDPKKYGGFDSPTVAYSVLVVAKVEKGKSKKLKSVKELLGITIMERSSFEKNPIDFLEAKGYKEVKKDLIIKLPKYSLFELENGRKRMLASAGELQKGNELALPSKYVNFLYLASHYEKLKGSPEDNEQKQLFVEQHKHYLDEIIEQISEFSKRVILADANLDKVLSAYNKHRDKPIREQAENIIHLFTLTNLGAPAAFKYFDTTIDRKRYTSTKEVLDATLIHQSITGLYETRIDLSQLGGDGGGGSEAAAKGGLLGRDLLTKLKAQIQFSTEGPQVTWEDRPAMCLVLNLEEEYRLHEKPVPPSIDPSWLQLFPMVWAEKAGMGLANQVPPVVVELKSDASPVAVRQYPMSKEAREGIRPHIQRFLDLGILVPCQSPWNTPLLPVKKPGTNDYRPVQDLREVNKRVQDIHPTVPNPYNLLSSLPPSHTWYSVLDLKDAFFCLKLHPNSQPLFAFEWRDPEKGNTGQLTWTRLPQGFKNSPTLFNEALHRDLASFRALNPQVVMLQYVDDLLVAAPTYRDCKEGTRRLLQELSKLGYRVSAKKAQLCREEVTYLGYLLKGGKRWLTPARKATVMKIPTPTTPRQVREFLGTAGFCRLWIPGFASLAAPLYPLTRPKVPFTWTEAHQEAFGRIKEALLSAPALALPDLTKPFALYVDEKEGVARGVLTQTLGPWRRPVAYLSKKLDPVASGWPTCLKAIAAVALLLKDADKLTLGQNVLVIAPHNLESIVRQPPDRWMTNARMTHYQSLLLNERVSFAPPAILNPATLLPVESDDTPIHICSEILAEETGTRPDLRDQPLPGVPAWYTDGSSFIMDGRRQAGAAIVDNKRTVWASNLPEGTSAQKAELIALTQALRLAEGKSINIYTDSRYAFATAHVHGAIYKQRGWLTSAGKDIKNKEEILALLEAIHLPKRVAIIHCPGHQRGTDPVATGNRKADEAAKQAAQSTRILTETTKNAGKRTADGSEFEKRTADGSEFESPKKKAKVE

SEQ ID NO: 6625 - protein, 2215 aa, synthetic construct
MPAAKRVKLDGGDKKYSIGLDIGTNSVGWAVITDEYKVPSKKFKVLGNTDRHSIKKNLIGALLFDSGETAEATRLKRTARRRYTRRKNRICYLQEIFSNEMAKVDDSFFHRLEESFLVEEDKKHERHPIFGNIVDEVAYHEKYPTIYHLRKKLVDSTDKADLRLIYLALAHMIKFRGHFLIEGDLNPDNSDVDKLFIQLVQTYNQLFEENPINASGVDAKAILSARLSKSRRLENLIAQLPGEKKNGLFGNLIALSLGLTPNFKSNFDLAEDAKLQLSKDTYDDDLDNLLAQIGDQYADLFLAAKNLSDAILLSDILRVNTEITKAPLSASMIKRYDEHHQDLTLLKALVRQQLPEKYKEIFFDQSKNGYAGYIDGGASQEEFYKFIKPILEKMDGTEELLVKLNREDLLRKQRTFDNGSIPHQIHLGELHAILRRQEDFYPFLKDNREKIEKILTFRIPYYVGPLARGNSRFAWMTRKSEETITPWNFEEVVDKGASAQSFIERMTNFDKNLPNEKVLPKHSLLYEYFTVYNELTKVKYVTEGMRKPAFLSGEQKKAIVDLLFKTNRKVTVKQLKEDYFKKIECFDSVEISGVEDRFNASLGTYHDLLKIIKDKDFLDNEENEDILEDIVLTLTLFEDREMIEERLKTYAHLFDDKVMKQLKRRRYTGWGRLSRKLINGIRDKQSGKTILDFLKSDGFANRNFMQLIHDDSLTFKEDIQKAQVSGQGDSLHEHIANLAGSPAIKKGILQTVKVVDELVKVMGRHKPENIVIEMARENQTTQKGQKNSRERMKRIEEGIKELGSQILKEHPVENTQLQNEKLYLYYLQNGRDMYVDQELDINRLSDYDVDHIVPQSFLKDDSIDNKVLTRSDKARGKSDNVPSEEVVKKMKNYWRQLLNAKLITQRKFDNLTKAERGGLSELDKAGFIKRQLVETRQITKHVAQILDSRMNTKYDENDKLIREVKVITLKSKLVSDFRKDFQFYKVREINNYHHAHDAYLNAVVGTALIKKYPKLESEFVYGDYKVYDVRKMIAKSEQEIGKATAKYFFYSNIMNFFKTEITLANGEIRKRPLIETNGETGEIVWDKGRDFATVRKVLSMPQVNIVKKTEVQTGGFSKESILPKRNSDKLIARKKDWDPKKYGGFDSPTVAYSVLVVAKVEKGKSKKLKSVKELLGITIMERSSFEKNPIDFLEAKGYKEVKKDLIIKLPKYSLFELENGRKRMLASAGELQKGNELALPSKYVNFLYLASHYEKLKGSPEDNEQKQLFVEQHKHYLDEIIEQISEFSKRVILADANLDKVLSAYNKHRDKPIREQAENIIHLFTLTNLGAPAAFKYFDTTIDRKRYTSTKEVLDATLIHQSITGLYETRIDLSQLGGDGGGGSEAAAKGGTLGDQGSRGSDPLPEPRVTLTVEGIPTEFLVNTGAEHSVLTKPMGKMGSKRTVVAGATGSKVYPWTTKRLLKIGQKQVTHSFLVIPECPAPLLGRDLLTKLKAQIQFSTEGPQVTWEDRPAMCLVLNLEEEYRLHEKPVPPSIDPSWLQLFPMVWAEKAGMGLANQVPPVVVELKSDASPVAVRQYPMSKEAREGIRPHIQRFLDLGILVPCQSPWNTPLLPVKKPGTNDYRPVQDLREVNKRVQDIHPTVPNPYNLLSSLPPSHTWYSVLDLKDAFFCLKLHPNSQPLFAFEWRDPEKGNTGQLTWTRLPQGFKNSPTLFNEALHRDLASFRALNPQVVMLQYVDDLLVAAPTYRDCKEGTRRLLQELSKLGYRVSAKKAQLCREEVTYLGYLLKGGKRWLTPARKATVMKIPTPTTPRQVREFLGTAGFCRLWIPGFASLAAPLYPLTRPKVPFTWTEAHQEAFGRIKEALLSAPALALPDLTKPFALYVDEKEGVARGVLTQTLGPWRRPVAYLSKKLDPVASGWPTCLKAIAAVALLLKDADKLTLGQNVLVIAPHNLESIVRQPPDRWMTNARMTHYQSLLLNERVSFAPPAILNPATLLPVESDDTPIHICSEILAEETGTRPDLRDQPLPGVPAWYTDGSSFIMDGRRQAGAAIVDNKRTVWASNLPEGTSAQKAELIALTQALRLAEGKSINIYTDSRYAFATAHVHGAIYKQRGWLTSAGKDIKNKEEILALLEAIHLPKRVAIIHCPGHQRGTDPVATGNRKADEAAKQAAQSTRILTETTKNAGKRTADGSEFEKRTADGSEFESPKKKAKVE

SEQ ID NO: 6626 - protein, 2093 aa, synthetic construct
MPAAKRVKLDGGDKKYSIGLDIGTNSVGWAVITDEYKVPSKKFKVLGNTDRHSIKKNLIGALLFDSGETAEATRLKRTARRRYTRRKNRICYLQEIFSNEMAKVDDSFFHRLEESFLVEEDKKHERHPIFGNIVDEVAYHEKYPTIYHLRKKLVDSTDKADLRLIYLALAHMIKFRGHFLIEGDLNPDNSDVDKLFIQLVQTYNQLFEENPINASGVDAKAILSARLSKSRRLENLIAQLPGEKKNGLFGNLIALSLGLTPNFKSNFDLAEDAKLQLSKDTYDDDLDNLLAQIGDQYADLFLAAKNLSDAILLSDILRVNTEITKAPLSASMIKRYDEHHQDLTLLKALVRQQLPEKYKEIFFDQSKNGYAGYIDGGASQEEFYKFIKPILEKMDGTEELLVKLNREDLLRKQRTFDNGSIPHQIHLGELHAILRRQEDFYPFLKDNREKIEKILTFRIPYYVGPLARGNSRFAWMTRKSEETITPWNFEEVVDKGASAQSFIERMTNFDKNLPNEKVLPKHSLLYEYFTVYNELTKVKYVTEGMRKPAFLSGEQKKAIVDLLFKTNRKVTVKQLKEDYFKKIECFDSVEISGVEDRFNASLGTYHDLLKIIKDKDFLDNEENEDILEDIVLTLTLFEDREMIEERLKTYAHLFDDKVMKQLKRRRYTGWGRLSRKLINGIRDKQSGKTILDFLKSDGFANRNFMQLIHDDSLTFKEDIQKAQVSGQGDSLHEHIANLAGSPAIKKGILQTVKVVDELVKVMGRHKPENIVIEMARENQTTQKGQKNSRERMKRIEEGIKELGSQILKEHPVENTQLQNEKLYLYYLQNGRDMYVDQELDINRLSDYDVDHIVPQSFLKDDSIDNKVLTRSDKARGKSDNVPSEEVVKKMKNYWRQLLNAKLITQRKFDNLTKAERGGLSELDKAGFIKRQLVETRQITKHVAQILDSRMNTKYDENDKLIREVKVITLKSKLVSDFRKDFQFYKVREINNYHHAHDAYLNAVVGTALIKKYPKLESEFVYGDYKVYDVRKMIAKSEQEIGKATAKYFFYSNIMNFFKTEITLANGEIRKRPLIETNGETGEIVWDKGRDFATVRKVLSMPQVNIVKKTEVQTGGFSKESILPKRNSDKLIARKKDWDPKKYGGFDSPTVAYSVLVVAKVEKGKSKKLKSVKELLGITIMERSSFEKNPIDFLEAKGYKEVKKDLIIKLPKYSLFELENGRKRMLASAGELQKGNELALPSKYVNFLYLASHYEKLKGSPEDNEQKQLFVEQHKHYLDEIIEQISEFSKRVILADANLDKVLSAYNKHRDKPIREQAENIIHLFTLTNLGAPAAFKYFDTTIDRKRYTSTKEVLDATLIHQSITGLYETRIDLSQLGGDGGGGSEAAAKGGTLNIEDEYRLHETSKEPDVSLGSTWLSDFPQAWAETGGMGLAVRQAPLIIPLKATSTPVSIKQYPMSQEARLGIKPHIQRLLDQGILVPCQSPWNTPLLPVKKPGTNDYRPVQDLREVNKRVEDIHPTVPNPYNLLSGLPPSHQWYTVLDLKDAFFCLRLHPTSQPLFAFEWRDPEMGISGQLTWTRLPQGFKNSPTLFNEALHRDLAGFRIQHPDLILLQYVDDLLLAATSELDCQQGTRALLQTLGDLGYRASAKKAQICQKQVKYLGYLLKEGQRWLTEARKETVMGQPIPKTPRQLREFLGTAGFCRLWIPGFAEMAAPLYPLTKPGTLFNWGPDQQKAFQEIKQALLTAPALGLPDLTKPFELFVDEKQGYAKGVLTQKLGPWRRPVAYLSKKLDPVAAGWPPCLRMVAAIAVLTKDAGKLTMGQPLVILAPHAVEALVKQPPDRWLSNARMTHYQALLLDTDRVQFGPVVALNPATLLPLPEEGLQHDCLDILAEAHGTRSDLMDQPLPDADHTWYTDGSSFLQEGQRKAGAAVTTETEVIWARALPAGTSAQRAELIALTQALKMAEGKKLNVYTDSRYAFATAHIHGEIYRRRGWLTSEGKEIKNKDEILALLKALFLPKRLSIIHCPGHQKGNSAEARGNRMADQAAREVATRETPETSTLLAGKRTADGSEFEKRTADGSEFESPKKKAKVE

SEQ ID NO: 6627 - protein, 2093 aa, synthetic construct
MPAAKRVKLDGGDKKYSIGLDIGTNSVGWAVITDEYKVPSKKFKVLGNTDRHSIKKNLIGALLFDSGETAEATRLKRTARRRYTRRKNRICYLQEIFSNEMAKVDDSFFHRLEESFLVEEDKKHERHPIFGNIVDEVAYHEKYPTIYHLRKKLVDSTDKADLRLIYLALAHMIKFRGHFLIEGDLNPDNSDVDKLFIQLVQTYNQLFEENPINASGVDAKAILSARLSKSRRLENLIAQLPGEKKNGLFGNLIALSLGLTPNFKSNFDLAEDAKLQLSKDTYDDDLDNLLAQIGDQYADLFLAAKNLSDAILLSDILRVNTEITKAPLSASMIKRYDEHHQDLTLLKALVRQQLPEKYKEIFFDQSKNGYAGYIDGGASQEEFYKFIKPILEKMDGTEELLVKLNREDLLRKQRTFDNGSIPHQIHLGELHAILRRQEDFYPFLKDNREKIEKILTFRIPYYVGPLARGNSRFAWMTRKSEETITPWNFEEVVDKGASAQSFIERMTNFDKNLPNEKVLPKHSLLYEYFTVYNELTKVKYVTEGMRKPAFLSGEQKKAIVDLLFKTNRKVTVKQLKEDYFKKIECFDSVEISGVEDRFNASLGTYHDLLKIIKDKDFLDNEENEDILEDIVLTLTLFEDREMIEERLKTYAHLFDDKVMKQLKRRRYTGWGRLSRKLINGIRDKQSGKTILDFLKSDGFANRNFMQLIHDDSLTFKEDIQKAQVSGQGDSLHEHIANLAGSPAIKKGILQTVKVVDELVKVMGRHKPENIVIEMARENQTTQKGQKNSRERMKRIEEGIKELGSQILKEHPVENTQLQNEKLYLYYLQNGRDMYVDQELDINRLSDYDVDHIVPQSFLKDDSIDNKVLTRSDKARGKSDNVPSEEVVKKMKNYWRQLLNAKLITQRKFDNLTKAERGGLSELDKAGFIKRQLVETRQITKHVAQILDSRMNTKYDENDKLIREVKVITLKSKLVSDFRKDFQFYKVREINNYHHAHDAYLNAVVGTALIKKYPKLESEFVYGDYKVYDVRKMIAKSEQEIGKATAKYFFYSNIMNFFKTEITLANGEIRKRPLIETNGETGEIVWDKGRDFATVRKVLSMPQVNIVKKTEVQTGGFSKESILPKRNSDKLIARKKDWDPKKYGGFDSPTVAYSVLVVAKVEKGKSKKLKSVKELLGITIMERSSFEKNPIDFLEAKGYKEVKKDLIIKLPKYSLFELENGRKRMLASAGELQKGNELALPSKYVNFLYLASHYEKLKGSPEDNEQKQLFVEQHKHYLDEIIEQISEFSKRVILADANLDKVLSAYNKHRDKPIREQAENIIHLFTLTNLGAPAAFKYFDTTIDRKRYTSTKEVLDATLIHQSITGLYETRIDLSQLGGDGGGGSEAAAKGGTLNIEDEYRLHETSKGPDVPLGSTWLSDFPQAWAETGGMGLAVRQAPLIIPLKATSTPVSIKQYPMSQEARLGIKPHIQRLLDQGILVPCQSPWNTPLLPVKKPGTNDYRPVQDLREVNKRVEDIHPTVPNPYNLLSGLPPSHQWYTVLDLKDAFFCLRLHPTSQSLFAFEWRDPEMGISGQLTWTRLPQGFKNSPTLFNEALHRDLADFRIQHPDLILLQYVDDLLLAATSELDCQQGTRALLQTLGDLGYRASAKKAQICQKQVKYLGYLLKEGQRWLTEARKETVMGQPTPKTPRQLREFLGTAGFCRLWIPGFAEMAAPLYPLTKPGTLFEWGPDQQKAYQEIKQALLTAPALGLPDLTKPFELFVDEKQGYAKGVLTQKLGPWRRPVAYLSKKLDPVAAGWPPCLRMVAAIAVLTKDAGKLTMGQPLVILAPHAVEALVKQPPDRWLSNARMTHYQALLLDTDRVQFGPIVALNPATLLPLPEEGLQHDCLDILAEAHGTRPDLTDQPLPDADHTWYTDGSSFLQEGQRKAGAAVTTETEVVWAKALPAGTSAQRAELIALTQALKMAEGKKLNVYTDSRYAFATAHIHGEIYRRRGWLTSEGKEIKNKDEILALLKALFLPKRLSIIHCPGHQKGNRAEARGNRMADQAAREVATRETPETSTLLAGKRTADGSEFEKRTADGSEFESPKKKAKVE

SEQ ID NO: 6628 - protein, 2084 aa, synthetic construct
MPAAKRVKLDGGDKKYSIGLDIGTNSVGWAVITDEYKVPSKKFKVLGNTDRHSIKKNLIGALLFDSGETAEATRLKRTARRRYTRRKNRICYLQEIFSNEMAKVDDSFFHRLEESFLVEEDKKHERHPIFGNIVDEVAYHEKYPTIYHLRKKLVDSTDKADLRLIYLALAHMIKFRGHFLIEGDLNPDNSDVDKLFIQLVQTYNQLFEENPINASGVDAKAILSARLSKSRRLENLIAQLPGEKKNGLFGNLIALSLGLTPNFKSNFDLAEDAKLQLSKDTYDDDLDNLLAQIGDQYADLFLAAKNLSDAILLSDILRVNTEITKAPLSASMIKRYDEHHQDLTLLKALVRQQLPEKYKEIFFDQSKNGYAGYIDGGASQEEFYKFIKPILEKMDGTEELLVKLNREDLLRKQRTFDNGSIPHQIHLGELHAILRRQEDFYPFLKDNREKIEKILTFRIPYYVGPLARGNSRFAWMTRKSEETITPWNFEEVVDKGASAQSFIERMTNFDKNLPNEKVLPKHSLLYEYFTVYNELTKVKYVTEGMRKPAFLSGEQKKAIVDLLFKTNRKVTVKQLKEDYFKKIECFDSVEISGVEDRFNASLGTYHDLLKIIKDKDFLDNEENEDILEDIVLTLTLFEDREMIEERLKTYAHLFDDKVMKQLKRRRYTGWGRLSRKLINGIRDKQSGKTILDFLKSDGFANRNFMQLIHDDSLTFKEDIQKAQVSGQGDSLHEHIANLAGSPAIKKGILQTVKVVDELVKVMGRHKPENIVIEMARENQTTQKGQKNSRERMKRIEEGIKELGSQILKEHPVENTQLQNEKLYLYYLQNGRDMYVDQELDINRLSDYDVDHIVPQSFLKDDSIDNKVLTRSDKARGKSDNVPSEEVVKKMKNYWRQLLNAKLITQRKFDNLTKAERGGLSELDKAGFIKRQLVETRQITKHVAQILDSRMNTKYDENDKLIREVKVITLKSKLVSDFRKDFQFYKVREINNYHHAHDAYLNAVVGTALIKKYPKLESEFVYGDYKVYDVRKMIAKSEQEIGKATAKYFFYSNIMNFFKTEITLANGEIRKRPLIETNGETGEIVWDKGRDFATVRKVLSMPQVNIVKKTEVQTGGFSKESILPKRNSDKLIARKKDWDPKKYGGFDSPTVAYSVLVVAKVEKGKSKKLKSVKELLGITIMERSSFEKNPIDFLEAKGYKEVKKDLIIKLPKYSLFELENGRKRMLASAGELQKGNELALPSKYVNFLYLASHYEKLKGSPEDNEQKQLFVEQHKHYLDEIIEQISEFSKRVILADANLDKVLSAYNKHRDKPIREQAENIIHLFTLTNLGAPAAFKYFDTTIDRKRYTSTKEVLDATLIHQSITGLYETRIDLSQLGGDGGGGSEAAAKGGIPWLMKKPLQLTTLVPLQEYEERLLKQTMLTGSYKEKLQSLFLKYDALWQHWENQVGHRRIKPHHIATGTVNPRPQKQYPINPKAKASIQTVINDLLKQGVLIQQNSIMNTPVYPVPKPDGKWRMVLDYREVNKTIPLIAAQNQHSAGILSSIFRGKYKTTLDLSNGFWAHSITPESYWLTAFTWLGQQYCWTRLPQGFLNSPALFNADVVDLLKEVPNVQVYVDDIYISHDDPREHLEQLEKVFSLLLNAGYVVSLKKSEIAQHEVEFLGFNITKEGRGLTETFKQKLLNITPPRDLKQLQSILGLLNFARNFIPNFSELVKPLYNIIATAPGKYITWTTDNSQQLQNIISMLNSAENLEERNPEVRLIMKVNTSPSAGYIRFYNEFAKRPIMYLNYVYTKAEVKFTNTEKLLTTIHKGLIKALDLGMGQEILVYSPIVSMTKIQKTPLPERKALPIRWITWMSYLEDPRIQFHYDKTLPELQQVPTVTDDIIAKIKHPSEFSMVFYTDGSAIKHPNVNKSHNAGMGIAQVQFKPEFTVINTWSIPLGDHTAQLAEVAAVEFACKKALKIDGPVLIVTDSFYVAESVNKELPYWQSNGFFNNKKKPLKHVSKWKSIADCIQLKPDIIIIHEKGHQPTASTFHTEGNNLADKLATQGSYVVNAGKRTADGSEFEKRTADGSEFESPKKKAKVE

SEQ ID NO: 6629 - protein, 2091 aa, synthetic construct
MPAAKRVKLDGGDKKYSIGLDIGTNSVGWAVITDEYKVPSKKFKVLGNTDRHSIKKNLIGALLFDSGETAEATRLKRTARRRYTRRKNRICYLQEIFSNEMAKVDDSFFHRLEESFLVEEDKKHERHPIFGNIVDEVAYHEKYPTIYHLRKKLVDSTDKADLRLIYLALAHMIKFRGHFLIEGDLNPDNSDVDKLFIQLVQTYNQLFEENPINASGVDAKAILSARLSKSRRLENLIAQLPGEKKNGLFGNLIALSLGLTPNFKSNFDLAEDAKLQLSKDTYDDDLDNLLAQIGDQYADLFLAAKNLSDAILLSDILRVNTEITKAPLSASMIKRYDEHHQDLTLLKALVRQQLPEKYKEIFFDQSKNGYAGYIDGGASQEEFYKFIKPILEKMDGTEELLVKLNREDLLRKQRTFDNGSIPHQIHLGELHAILRRQEDFYPFLKDNREKIEKILTFRIPYYVGPLARGNSRFAWMTRKSEETITPWNFEEVVDKGASAQSFIERMTNFDKNLPNEKVLPKHSLLYEYFTVYNELTKVKYVTEGMRKPAFLSGEQKKAIVDLLFKTNRKVTVKQLKEDYFKKIECFDSVEISGVEDRFNASLGTYHDLLKIIKDKDFLDNEENEDILEDIVLTLTLFEDREMIEERLKTYAHLFDDKVMKQLKRRRYTGWGRLSRKLINGIRDKQSGKTILDFLKSDGFANRNFMQLIHDDSLTFKEDIQKAQVSGQGDSLHEHIANLAGSPAIKKGILQTVKVVDELVKVMGRHKPENIVIEMARENQTTQKGQKNSRERMKRIEEGIKELGSQILKEHPVENTQLQNEKLYLYYLQNGRDMYVDQELDINRLSDYDVDHIVPQSFLKDDSIDNKVLTRSDKARGKSDNVPSEEVVKKMKNYWRQLLNAKLITQRKFDNLTKAERGGLSELDKAGFIKRQLVETRQITKHVAQILDSRMNTKYDENDKLIREVKVITLKSKLVSDFRKDFQFYKVREINNYHHAHDAYLNAVVGTALIKKYPKLESEFVYGDYKVYDVRKMIAKSEQEIGKATAKYFFYSNIMNFFKTEITLANGEIRKRPLIETNGETGEIVWDKGRDFATVRKVLSMPQVNIVKKTEVQTGGFSKESILPKRNSDKLIARKKDWDPKKYGGFDSPTVAYSVLVVAKVEKGKSKKLKSVKELLGITIMERSSFEKNPIDFLEAKGYKEVKKDLIIKLPKYSLFELENGRKRMLASAGELQKGNELALPSKYVNFLYLASHYEKLKGSPEDNEQKQLFVEQHKHYLDEIIEQISEFSKRVILADANLDKVLSAYNKHRDKPIREQAENIIHLFTLTNLGAPAAFKYFDTTIDRKRYTSTKEVLDATLIHQSITGLYETRIDLSQLGGDGGGGSEAAAKGGVLNLEEEYRLHEKPVPSSIDPSWLQLFPTVWAERAGMGLANQVPPVVVELRSGASPVAVRQYPMSKEAREGIRPHIQRFLDLGVLVPCQSPWNTPLLPVKKPGTNDYRPVQDLREINKRVQDIHPTVPNPYNLLSSLPPSHTWYSVLDLKDAFFCLKLHPNSQPLFAFEWRDPEKGNTGQLTWTRLPQGFKNSPTLFNEALHRDLAPFRALNPQVVLLQYVDDLLVAAPTYRDCKEGTQKLLQELSKLGYRVSAKKAQLCQKEVTYLGYLLKEGKRWLTPARKATVMKIPPPTTPRQVREFLGKAGFCRLFIPGFASLAAPLYPLTKPSIPFIWTEEHQKAFDRIKEALLSAPALALPDLTKPFTLYVDERAGVARGVLTQTLGPWRRPVAYLSKKLDPVASGWPTCLKAVAAVALLLKDADKLTLGQNVTVIASHSLESIVRQPPDRWMTNARMTHYQSLLLNERVSFAPPAVLNPATLLPVESEATPVHRCSEILAEETGTRRDLKDQPLPGVPAWYTDGSSFIAEGKRRAGAAIVDGKRTVWASSLPEGTSAQKAELVALTQALRLAEGKDINIYTDSRYAFATAHIHGAIYKQRGWLTSAGKDIKNKEEILALLEAIHLPKRVAIIHCPGHQKGNDPVATGNRRADEAAKQAALSTRVLAETTKPAGKRTADGSEFEKRTADGSEFESPKKKAKVE

SEQ ID NO: 6630 - protein, 2092 aa, synthetic construct
MPAAKRVKLDGGDKKYSIGLDIGTNSVGWAVITDEYKVPSKKFKVLGNTDRHSIKKNLIGALLFDSGETAEATRLKRTARRRYTRRKNRICYLQEIFSNEMAKVDDSFFHRLEESFLVEEDKKHERHPIFGNIVDEVAYHEKYPTIYHLRKKLVDSTDKADLRLIYLALAHMIKFRGHFLIEGDLNPDNSDVDKLFIQLVQTYNQLFEENPINASGVDAKAILSARLSKSRRLENLIAQLPGEKKNGLFGNLIALSLGLTPNFKSNFDLAEDAKLQLSKDTYDDDLDNLLAQIGDQYADLFLAAKNLSDAILLSDILRVNTEITKAPLSASMIKRYDEHHQDLTLLKALVRQQLPEKYKEIFFDQSKNGYAGYIDGGASQEEFYKFIKPILEKMDGTEELLVKLNREDLLRKQRTFDNGSIPHQIHLGELHAILRRQEDFYPFLKDNREKIEKILTFRIPYYVGPLARGNSRFAWMTRKSEETITPWNFEEVVDKGASAQSFIERMTNFDKNLPNEKVLPKHSLLYEYFTVYNELTKVKYVTEGMRKPAFLSGEQKKAIVDLLFKTNRKVTVKQLKEDYFKKIECFDSVEISGVEDRFNASLGTYHDLLKIIKDKDFLDNEENEDILEDIVLTLTLFEDREMIEERLKTYAHLFDDKVMKQLKRRRYTGWGRLSRKLINGIRDKQSGKTILDFLKSDGFANRNFMQLIHDDSLTFKEDIQKAQVSGQGDSLHEHIANLAGSPAIKKGILQTVKVVDELVKVMGRHKPENIVIEMARENQTTQKGQKNSRERMKRIEEGIKELGSQILKEHPVENTQLQNEKLYLYYLQNGRDMYVDQELDINRLSDYDVDHIVPQSFLKDDSIDNKVLTRSDKARGKSDNVPSEEVVKKMKNYWRQLLNAKLITQRKFDNLTKAERGGLSELDKAGFIKRQLVETRQITKHVAQILDSRMNTKYDENDKLIREVKVITLKSKLVSDFRKDFQFYKVREINNYHHAHDAYLNAVVGTALIKKYPKLESEFVYGDYKVYDVRKMIAKSEQEIGKATAKYFFYSNIMNFFKTEITLANGEIRKRPLIETNGETGEIVWDKGRDFATVRKVLSMPQVNIVKKTEVQTGGFSKESILPKRNSDKLIARKKDWDPKKYGGFDSPTVAYSVLVVAKVEKGKSKKLKSVKELLGITIMERSSFEKNPIDFLEAKGYKEVKKDLIIKLPKYSLFELENGRKRMLASAGELQKGNELALPSKYVNFLYLASHYEKLKGSPEDNEQKQLFVEQHKHYLDEIIEQISEFSKRVILADANLDKVLSAYNKHRDKPIREQAENIIHLFTLTNLGAPAAFKYFDTTIDRKRYTSTKEVLDATLIHQSITGLYETRIDLSQLGGDGGEAAAKGGSGGTLQLEEEYRLFEPESTQKQEMDIWLKNFPQAWAETGGMGTAHCQAPVLIQLKATATPISIRQYPMPHEAYQGIKPHIRRMLDQGILKPCQSPWNTPLLPVKKPGTEDYRPVQDLREVNKRVEDIHPTVPNPYNLLSTLPPSHPWYTVLDLKDAFFCLRLHSESQLLFAFEWRDPEIGLSGQLTWTRLPQGFKNSPTLFNEALHSDLADFRVRYPALVLLQYVDDLLLAAATRTECLEGTKALLETLGNKGYRASAKKAQICLQEVTYLGYSLKDGQRWLTKARKEAILSIPVPKNSRQVREFLGKAGYCRLFIPGFAELAAPLYPLTRPGTLFQWGTEQQLAFEDIKKALLSSPALGLPDITKPFELFIDENSGFAKGVLVQKLGPWKRPVAYLSKKLDTVASGWPPCLRMVAAIAILVKDAGKLTLGQPLTILTSHPVEALVRQPPNKWLSNARMTHYQAMLLDAERVHFGPTVSLNPATLLPLPSGGNHHDCLQILAETHGTRPDLTDQPLPDADLTWYTDGSSFIRNGEREAGAAVTTESEVIWAAPLPPGTSAQRAELIALTQALKMAEGKKLTVYTDSRYAFATTHVHGEIYRRRGWLTSEGKEIKNKNEILALLEALFLPKRLSIIHCPGHQKGDSPQAKGNRLADDTAKKAATETHSSLTVLPAGKRTADGSEFEKRTADGSEFESPKKKAKVE

SEQ ID NO: 6631 - protein, 2091 aa, synthetic construct
MPAAKRVKLDGGDKKYSIGLDIGTNSVGWAVITDEYKVPSKKFKVLGNTDRHSIKKNLIGALLFDSGETAEATRLKRTARRRYTRRKNRICYLQEIFSNEMAKVDDSFFHRLEESFLVEEDKKHERHPIFGNIVDEVAYHEKYPTIYHLRKKLVDSTDKADLRLIYLALAHMIKFRGHFLIEGDLNPDNSDVDKLFIQLVQTYNQLFEENPINASGVDAKAILSARLSKSRRLENLIAQLPGEKKNGLFGNLIALSLGLTPNFKSNFDLAEDAKLQLSKDTYDDDLDNLLAQIGDQYADLFLAAKNLSDAILLSDILRVNTEITKAPLSASMIKRYDEHHQDLTLLKALVRQQLPEKYKEIFFDQSKNGYAGYIDGGASQEEFYKFIKPILEKMDGTEELLVKLNREDLLRKQRTFDNGSIPHQIHLGELHAILRRQEDFYPFLKDNREKIEKILTFRIPYYVGPLARGNSRFAWMTRKSEETITPWNFEEVVDKGASAQSFIERMTNFDKNLPNEKVLPKHSLLYEYFTVYNELTKVKYVTEGMRKPAFLSGEQKKAIVDLLFKTNRKVTVKQLKEDYFKKIECFDSVEISGVEDRFNASLGTYHDLLKIIKDKDFLDNEENEDILEDIVLTLTLFEDREMIEERLKTYAHLFDDKVMKQLKRRRYTGWGRLSRKLINGIRDKQSGKTILDFLKSDGFANRNFMQLIHDDSLTFKEDIQKAQVSGQGDSLHEHIANLAGSPAIKKGILQTVKVVDELVKVMGRHKPENIVIEMARENQTTQKGQKNSRERMKRIEEGIKELGSQILKEHPVENTQLQNEKLYLYYLQNGRDMYVDQELDINRLSDYDVDHIVPQSFLKDDSIDNKVLTRSDKARGKSDNVPSEEVVKKMKNYWRQLLNAKLITQRKFDNLTKAERGGLSELDKAGFIKRQLVETRQITKHVAQILDSRMNTKYDENDKLIREVKVITLKSKLVSDFRKDFQFYKVREINNYHHAHDAYLNAVVGTALIKKYPKLESEFVYGDYKVYDVRKMIAKSEQEIGKATAKYFFYSNIMNFFKTEITLANGEIRKRPLIETNGETGEIVWDKGRDFATVRKVLSMPQVNIVKKTEVQTGGFSKESILPKRNSDKLIARKKDWDPKKYGGFDSPTVAYSVLVVAKVEKGKSKKLKSVKELLGITIMERSSFEKNPIDFLEAKGYKEVKKDLIIKLPKYSLFELENGRKRMLASAGELQKGNELALPSKYVNFLYLASHYEKLKGSPEDNEQKQLFVEQHKHYLDEIIEQISEFSKRVILADANLDKVLSAYNKHRDKPIREQAENIIHLFTLTNLGAPAAFKYFDTTIDRKRYTSTKEVLDATLIHQSITGLYETRIDLSQLGGDGGEAAAKGGSGGVLNLEEEYRLHEKPVPSSIDPSWLQLFPTVWAERAGMGLANQVPPVVVELRSGASPVAVRQYPMSKEAREGIRPHIQKFLDLGVLVPCRSPWNTPLLPVKKPGTNDYRPVQDLREINKRVQDIHPTVPNPYNLLSSLPPSYTWYSVLDLKDAFFCLRLHPNSQPLFAFEWKDPEKGNTGQLTWTRLPQGFKNSPTLFNEALHRDLAPFRALNPQVVLLQYVDDLLVAAPTYEDCKKGTQKLLQELSKLGYRVSAKKAQLCQREVTYLGYLLKEGKRWLTPARKATVMKIPVPTTPRQVREFLGKAGFCRLFIPGFASLAAPLYPLTKPSIPFIWTEEHQQAFDHIKKALLSAPALALPDLTKPFTLYIDERAGVARGVLTQTLGPWRRPVAYLSKKLDPVASGWPTCLKAVAAVALLLKDADKLTLGQNVTVIASHSLESIVRQPPDRWMTNARMTHYQSLLLNERVSFAPPAVLNPATLLPVESEATPVHRCSEILAEETGTRRDLEDQPLPGVPTWYTDGSSFITEGKRRAGAPIVDGKRTVWASSLPEGTSAQKAELVALTQALRLAEGKNINIYTDSRYAFATAHIHGAIYKQRGWLTSAGKDIKNKEEILALLEAIHLPRRVAIIHCPGHQRGSNPVATGNRRADEAAKQAALSTRVLAGTTKPAGKRTADGSEFEKRTADGSEFESPKKKAKVE

SEQ ID NO: 6632 - protein, 2093 aa, synthetic construct
MPAAKRVKLDGGDKKYSIGLDIGTNSVGWAVITDEYKVPSKKFKVLGNTDRHSIKKNLIGALLFDSGETAEATRLKRTARRRYTRRKNRICYLQEIFSNEMAKVDDSFFHRLEESFLVEEDKKHERHPIFGNIVDEVAYHEKYPTIYHLRKKLVDSTDKADLRLIYLALAHMIKFRGHFLIEGDLNPDNSDVDKLFIQLVQTYNQLFEENPINASGVDAKAILSARLSKSRRLENLIAQLPGEKKNGLFGNLIALSLGLTPNFKSNFDLAEDAKLQLSKDTYDDDLDNLLAQIGDQYADLFLAAKNLSDAILLSDILRVNTEITKAPLSASMIKRYDEHHQDLTLLKALVRQQLPEKYKEIFFDQSKNGYAGYIDGGASQEEFYKFIKPILEKMDGTEELLVKLNREDLLRKQRTFDNGSIPHQIHLGELHAILRRQEDFYPFLKDNREKIEKILTFRIPYYVGPLARGNSRFAWMTRKSEETITPWNFEEVVDKGASAQSFIERMTNFDKNLPNEKVLPKHSLLYEYFTVYNELTKVKYVTEGMRKPAFLSGEQKKAIVDLLFKTNRKVTVKQLKEDYFKKIECFDSVEISGVEDRFNASLGTYHDLLKIIKDKDFLDNEENEDILEDIVLTLTLFEDREMIEERLKTYAHLFDDKVMKQLKRRRYTGWGRLSRKLINGIRDKQSGKTILDFLKSDGFANRNFMQLIHDDSLTFKEDIQKAQVSGQGDSLHEHIANLAGSPAIKKGILQTVKVVDELVKVMGRHKPENIVIEMARENQTTQKGQKNSRERMKRIEEGIKELGSQILKEHPVENTQLQNEKLYLYYLQNGRDMYVDQELDINRLSDYDVDHIVPQSFLKDDSIDNKVLTRSDKARGKSDNVPSEEVVKKMKNYWRQLLNAKLITQRKFDNLTKAERGGLSELDKAGFIKRQLVETRQITKHVAQILDSRMNTKYDENDKLIREVKVITLKSKLVSDFRKDFQFYKVREINNYHHAHDAYLNAVVGTALIKKYPKLESEFVYGDYKVYDVRKMIAKSEQEIGKATAKYFFYSNIMNFFKTEITLANGEIRKRPLIETNGETGEIVWDKGRDFATVRKVLSMPQVNIVKKTEVQTGGFSKESILPKRNSDKLIARKKDWDPKKYGGFDSPTVAYSVLVVAKVEKGKSKKLKSVKELLGITIMERSSFEKNPIDFLEAKGYKEVKKDLIIKLPKYSLFELENGRKRMLASAGELQKGNELALPSKYVNFLYLASHYEKLKGSPEDNEQKQLFVEQHKHYLDEIIEQISEFSKRVILADANLDKVLSAYNKHRDKPIREQAENIIHLFTLTNLGAPAAFKYFDTTIDRKRYTSTKEVLDATLIHQSITGLYETRIDLSQLGGDGGEAAAKGGSGGTLGIEDEYRLHETSTEPDVSLGSTWLSDFPQAWAETGGMGLAVRQAPLIIPLKATSTPVSIQQYPMSHEARLGIKPHIQRLLDQGILVPCQSPWNTPLLPVKKPGTNDYRPVQDLREVNKRVEDIHPTVPNPYNLLSGLPPSHQWYTVLDLKDAFFCLRLHPTSQPLFAFEWRDPGMGISGQLTWTRLPQGFKNSPTLFNEALHRDLADFRIQHPDLILLQYVDDILLAATSELDCQQGTRALLQTLGDLGYRASAKKAQICQKQVKYLGYLLREGQRWLTEARKETVMGQPVPKTPRQLREFLGTAGFCRLWIPGFAEMAAPLYPLTKPGTLFSWGPDQQKAYQEIKQALLTAPALGLPDLTKPFELFVDEKQGYAKGVLTQKLGPWRRPVAYLSKKLDPVAAGWPPCLRMVAAIAVLTKDAGKLTMGQPLVILAPHAVEALVKQPPDRWLSNARMTHYQAMLLDTDRVQFGPVVALNPATLLPLPEEGAPHDCLEILAETHGTRPDLTDQPIPDADHTWYTDGSSFLQEGQRKAGAAVTTETEVIWAGALPAGTSAQRAELIALTQALKMAEGKRLNVYTDSRYAFATAHIHGEIYRRRGWLTSEGREIKNKSEILALLKALFLPKRLSIIHCLGHQKGDSAEARGNRLADQAAREAAIKTPPDTSTLLAGKRTADGSEFEKRTADGSEFESPKKKAKVE

SEQ ID NO: 6633 - protein, 2093 aa, synthetic construct
MPAAKRVKLDGGDKKYSIGLDIGTNSVGWAVITDEYKVPSKKFKVLGNTDRHSIKKNLIGALLFDSGETAEATRLKRTARRRYTRRKNRICYLQEIFSNEMAKVDDSFFHRLEESFLVEEDKKHERHPIFGNIVDEVAYHEKYPTIYHLRKKLVDSTDKADLRLIYLALAHMIKFRGHFLIEGDLNPDNSDVDKLFIQLVQTYNQLFEENPINASGVDAKAILSARLSKSRRLENLIAQLPGEKKNGLFGNLIALSLGLTPNFKSNFDLAEDAKLQLSKDTYDDDLDNLLAQIGDQYADLFLAAKNLSDAILLSDILRVNTEITKAPLSASMIKRYDEHHQDLTLLKALVRQQLPEKYKEIFFDQSKNGYAGYIDGGASQEEFYKFIKPILEKMDGTEELLVKLNREDLLRKQRTFDNGSIPHQIHLGELHAILRRQEDFYPFLKDNREKIEKILTFRIPYYVGPLARGNSRFAWMTRKSEETITPWNFEEVVDKGASAQSFIERMTNFDKNLPNEKVLPKHSLLYEYFTVYNELTKVKYVTEGMRKPAFLSGEQKKAIVDLLFKTNRKVTVKQLKEDYFKKIECFDSVEISGVEDRFNASLGTYHDLLKIIKDKDFLDNEENEDILEDIVLTLTLFEDREMIEERLKTYAHLFDDKVMKQLKRRRYTGWGRLSRKLINGIRDKQSGKTILDFLKSDGFANRNFMQLIHDDSLTFKEDIQKAQVSGQGDSLHEHIANLAGSPAIKKGILQTVKVVDELVKVMGRHKPENIVIEMARENQTTQKGQKNSRERMKRIEEGIKELGSQILKEHPVENTQLQNEKLYLYYLQNGRDMYVDQELDINRLSDYDVDHIVPQSFLKDDSIDNKVLTRSDKARGKSDNVPSEEVVKKMKNYWRQLLNAKLITQRKFDNLTKAERGGLSELDKAGFIKRQLVETRQITKHVAQILDSRMNTKYDENDKLIREVKVITLKSKLVSDFRKDFQFYKVREINNYHHAHDAYLNAVVGTALIKKYPKLESEFVYGDYKVYDVRKMIAKSEQEIGKATAKYFFYSNIMNFFKTEITLANGEIRKRPLIETNGETGEIVWDKGRDFATVRKVLSMPQVNIVKKTEVQTGGFSKESILPKRNSDKLIARKKDWDPKKYGGFDSPTVAYSVLVVAKVEKGKSKKLKSVKELLGITIMERSSFEKNPIDFLEAKGYKEVKKDLIIKLPKYSLFELENGRKRMLASAGELQKGNELALPSKYVNFLYLASHYEKLKGSPEDNEQKQLFVEQHKHYLDEIIEQISEFSKRVILADANLDKVLSAYNKHRDKPIREQAENIIHLFTLTNLGAPAAFKYFDTTIDRKRYTSTKEVLDATLIHQSITGLYETRIDLSQLGGDGGEAAAKGGSGGTLGIEDEYRLHETSTEPDVSLGSTWLSDFPQAWAETGGMGLAVRQAPLIIPLKATSTPVSIQQYPMSHEARLGIKPHIQRLLDQGILVPCQSPWNTPLLPVKKPGTNDYRPVQDLREVNKRVEDIHPTVPNPYNLLSGLPPSHQWYTVLDLKDAFFCLRLHPTSQPLFAFEWRDPGMGISGQLTWTRLPQGFKNSPTLFDEALHRDLADFRIQHPDLILLQYVDDILLAATSELDCQQGTRALLQTLGDLGYRASAKKAQICQKQVKYLGYLLREGQRWLTEARKETVMGQPVPKTPRQLREFLGTAGFCRLWIPGFAEMAAPLYPLTKTGTLFSWGPDQQKAYQEIKQALLTAPALGLPDLTKPFELFVDEKQGYAKGVLTQKLGPWRRPVAYLSKKLDPVAAGWPPCLRMVAAIAVLTKDAGKLTMGQPLVILAPHAVEALVKQPPDRWLSNARMTHYQAMLLDTDRVQFGPVVALNPATLLPLPEEGAPHDCLEILAETHGTRPDLTDQPIPDADHTWYTDGSSFLQEGQRKAGAAVTTETEVIWAGALPAGTSAQRAELIALTQALKMAEGKRLNVYTDSRYAFATAHIHGEIYRRRGLLTSEGREIKNKSEILALLKALFLPKRLSIIHCLGHQKGDSAEARGNRLADQAAREAAIKTPPDTSTLLAGKRTADGSEFEKRTADGSEFESPKKKAKVE

SEQ ID NO: 6634 - protein, 2093 aa, synthetic construct; identical to SEQ ID NO: 6632

SEQ ID NO: 6635 - protein, 2087 aa, synthetic construct
MPAAKRVKLDGGDKKYSIGLDIGTNSVGWAVITDEYKVPSKKFKVLGNTDRHSIKKNLIGALLFDSGETAEATRLKRTARRRYTRRKNRICYLQEIFSNEMAKVDDSFFHRLEESFLVEEDKKHERHPIFGNIVDEVAYHEKYPTIYHLRKKLVDSTDKADLRLIYLALAHMIKFRGHFLIEGDLNPDNSDVDKLFIQLVQTYNQLFEENPINASGVDAKAILSARLSKSRRLENLIAQLPGEKKNGLFGNLIALSLGLTPNFKSNFDLAEDAKLQLSKDTYDDDLDNLLAQIGDQYADLFLAAKNLSDAILLSDILRVNTEITKAPLSASMIKRYDEHHQDLTLLKALVRQQLPEKYKEIFFDQSKNGYAGYIDGGASQEEFYKFIKPILEKMDGTEELLVKLNREDLLRKQRTFDNGSIPHQIHLGELHAILRRQEDFYPFLKDNREKIEKILTFRIPYYVGPLARGNSRFAWMTRKSEETITPWNFEEVVDKGASAQSFIERMTNFDKNLPNEKVLPKHSLLYEYFTVYNELTKVKYVTEGMRKPAFLSGEQKKAIVDLLFKTNRKVTVKQLKEDYFKKIECFDSVEISGVEDRFNASLGTYHDLLKIIKDKDFLDNEENEDILEDIVLTLTLFEDREMIEERLKTYAHLFDDKVMKQLKRRRYTGWGRLSRKLINGIRDKQSGKTILDFLKSDGFANRNFMQLIHDDSLTFKEDIQKAQVSGQGDSLHEHIANLAGSPAIKKGILQTVKVVDELVKVMGRHKPENIVIEMARENQTTQKGQKNSRERMKRIEEGIKELGSQILKEHPVENTQLQNEKLYLYYLQNGRDMYVDQELDINRLSDYDVDHIVPQSFLKDDSIDNKVLTRSDKARGKSDNVPSEEVVKKMKNYWRQLLNAKLITQRKFDNLTKAERGGLSELDKAGFIKRQLVETRQITKHVAQILDSRMNTKYDENDKLIREVKVITLKSKLVSDFRKDFQFYKVREINNYHHAHDAYLNAVVGTALIKKYPKLESEFVYGDYKVYDVRKMIAKSEQEIGKATAKYFFYSNIMNFFKTEITLANGEIRKRPLIETNGETGEIVWDKGRDFATVRKVLSMPQVNIVKKTEVQTGGFSKESILPKRNSDKLIARKKDWDPKKYGGFDSPTVAYSVLVVAKVEKGKSKKLKSVKELLGITIMERSSFEKNPIDFLEAKGYKEVKKDLIIKLPKYSLFELENGRKRMLASAGELQKGNELALPSKYVNFLYLASHYEKLKGSPEDNEQKQLFVEQHKHYLDEIIEQISEFSKRVILADANLDKVLSAYNKHRDKPIREQAENIIHLFTLTNLGAPAAFKYFDTTIDRKRYTSTKEVLDATLIHQSITGLYETRIDLSQLGGDGGEAAAKGGSGGTLQLDDEYRLYSPLVKPDQNIQFWLEQFPQAWAETAGMGLAKQVPPQVIQLKASATPVSVRQYPLSKEAQEGIRPHVQRLIQQGILVPVQSPWNTPLLPVRKPGTNDYRPVQDLREVNKRVQDIHPTVPNPYNLLCALPPQRSWYTVLDLKDAFFCLRLHPTSQPLFAFEWRDPGTGRTGQLTWTRLPQGFKNSPTIFDEALHRDLANFRIQHPQVTLLQYVDDLLLAGATKQDCLEGTKALLLELSDLGYRASAKKAQICRREVTYLGYSLRDGQRWLTEARKKTVVQIPAPTTAKQVREFLGTAGFCRLWIPGFATLAAPLYPLTKEKGEFSWAPEHQKAFDAIKKALLSAPALALPDVTKPFTLYVDERKGVARGVLTQTLGPWRRPVAYLSKKLDPVASGWPVCLKAIAAVAILVKDADKLTLGQNITVIAPHALENIVRQPPDRWMTNARMTHYQSLLLTERVTFAPPAALNPATLLPEETDEPVTHDCHQLLIEETGVRKDLTDIPLTGEVLTWFTDGSSYVVEGKRMAGAAVVDGTRTIWASSLPEGTSAQKAELMALTQALRLAEGKSINIYTDSRYAFATAHVHGAIYKQRGLLTSAGREIKNKEEILSLLEALHLPKRLAIIHCPGHQKAKDPISRGNQMADRVAKQAAQGVNLLAGKRTADGSEFEKRTADGSEFESPKKKAKVE

SEQ ID NO: 6636 - protein, 2087 aa, synthetic construct; identical to SEQ ID NO: 6635

SEQ ID NO: 6637 - protein, 2084 aa, synthetic construct
MPAAKRVKLDGGDKKYSIGLDIGTNSVGWAVITDEYKVPSKKFKVLGNTDRHSIKKNLIGALLFDSGETAEATRLKRTARRRYTRRKNRICYLQEIFSNEMAKVDDSFFHRLEESFLVEEDKKHERHPIFGNIVDEVAYHEKYPTIYHLRKKLVDSTDKADLRLIYLALAHMIKFRGHFLIEGDLNPDNSDVDKLFIQLVQTYNQLFEENPINASGVDAKAILSARLSKSRRLENLIAQLPGEKKNGLFGNLIALSLGLTPNFKSNFDLAEDAKLQLSKDTYDDDLDNLLAQIGDQYADLFLAAKNLSDAILLSDILRVNTEITKAPLSASMIKRYDEHHQDLTLLKALVRQQLPEKYKEIFFDQSKNGYAGYIDGGASQEEFYKFIKPILEKMDGTEELLVKLNREDLLRKQRTFDNGSIPHQIHLGELHAILRRQEDFYPFLKDNREKIEKILTFRIPYYVGPLARGNSRFAWMTRKSEETITPWNFEEVVDKGASAQSFIERMTNFDKNLPNEKVLPKHSLLYEYFTVYNELTKVKYVTEGMRKPAFLSGEQKKAIVDLLFKTNRKVTVKQLKEDYFKKIECFDSVEISGVEDRFNASLGTYHDLLKIIKDKDFLDNEENEDILEDIVLTLTLFEDREMIEERLKTYAHLFDDKVMKQLKRRRYTGWGRLSRKLINGIRDKQSGKTILDFLKSDGFANRNFMQLIHDDSLTFKEDIQKAQVSGQGDSLHEHIANLAGSPAIKKGILQTVKVVDELVKVMGRHKPENIVIEMARENQTTQKGQKNSRERMKRIEEGIKELGSQILKEHPVENTQLQNEKLYLYYLQNGRDMYVDQELDINRLSDYDVDHIVPQSFLKDDSIDNKVLTRSDKARGKSDNVPSEEVVKKMKNYWRQLLNAKLITQRKFDNLTKAERGGLSELDKAGFIKRQLVETRQITKHVAQILDSRMNTKYDENDKLIREVKVITLKSKLVSDFRKDFQFYKVREINNYHHAHDAYLNAVVGTALIKKYPKLESEFVYGDYKVYDVRKMIAKSEQEIGKATAKYFFYSNIMNFFKTEITLANGEIRKRPLIETNGETGEIVWDKGRDFATVRKVLSMPQVNIVKKTEVQTGGFSKESILPKRNSDKLIARKKDWDPKKYGGFDSPTVAYSVLVVAKVEKGKSKKLKSVKELLGITIMERSSFEKNPIDFLEAKGYKEVKKDLIIKLPKYSLFELENGRKRMLASAGELQKGNELALPSKYVNFLYLASHYEKLKGSPEDNEQKQLFVEQHKHYLDEIIEQISEFSKRVILADANLDKVLSAYNKHRDKPIREQAENIIHLFTLTNLGAPAAFKYFDTTIDRKRYTSTKEVLDATLIHQSITGLYETRIDLSQLGGDGGEAAAKGGSGGIPWLMKKPLQLTTLVPLQEYEERLLKQTMLTGSYKEKLQSLFLKYDALWQHWENQVGHRRIKPHHIATGTVNPRPQKQYPINPKAKASIQTVINDLLKQGVLIQQNSIMNTPVYPVPKPDGKWRMVLDYREVNKTIPLIAAQNQHSAGILSSIFRGKYKTTLDLSNGFWAHSITPESYWLTAFTWLGQQYCWTRLPQGFLNSPALFNADVVDLLKEVPNVQVYVDDIYISHDDPREHLEQLEKVFSLLLNAGYVVSLKKSEIAQHEVEFLGFNITKEGRGLTETFKQKLLNITPPRDLKQLQSILGLLNFARNFIPNFSELVKPLYNIIATAPGKYITWTTDNSQQLQNIISMLNSAENLEERNPEVRLIMKVNTSPSAGYIRFYNEFAKRPIMYLNYVYTKAEVKFTNTEKLLTTIHKGLIKALDLGMGQEILVYSPIVSMTKIQKTPLPERKALPIRWITWMSYLEDPRIQFHYDKTLPELQQVPTVTDDIIAKIKHPSEFSMVFYTDGSAIKHPNVNKSHNAGMGIAQVQFKPEFTVINTWSIPLGDHTAQLAEVAAVEFACKKALKIDGPVLIVTDSFYVAESVNKELPYWQSNGFFNNKKKPLKHVSKWKSIADCIQLKPDIIIIHEKGHQPTASTFHTEGNNLADKLATQGSYVVNAGKRTADGSEFEKRTADGSEFESPKKKAKVE

SEQ ID NO: 6638 - protein, 2084 aa, synthetic construct
MPAAKRVKLDGGDKKYSIGLDIGTNSVGWAVITDEYKVPSKKFKVLGNTDRHSIKKNLIGALLFDSGETAEATRLKRTARRRYTRRKNRICYLQEIFSNEMAKVDDSFFHRLEESFLVEEDKKHERHPIFGNIVDEVAYHEKYPTIYHLRKKLVDSTDKADLRLIYLALAHMIKFRGHFLIEGDLNPDNSDVDKLFIQLVQTYNQLFEENPINASGVDAKAILSARLSKSRRLENLIAQLPGEKKNGLFGNLIALSLGLTPNFKSNFDLAEDAKLQLSKDTYDDDLDNLLAQIGDQYADLFLAAKNLSDAILLSDILRVNTEITKAPLSASMIKRYDEHHQDLTLLKALVRQQLPEKYKEIFFDQSKNGYAGYIDGGASQEEFYKFIKPILEKMDGTEELLVKLNREDLLRKQRTFDNGSIPHQIHLGELHAILRRQEDFYPFLKDNREKIEKILTFRIPYYVGPLARGNSRFAWMTRKSEETITPWNFEEVVDKGASAQSFIERMTNFDKNLPNEKVLPKHSLLYEYFTVYNELTKVKYVTEGMRKPAFLSGEQKKAIVDLLFKTNRKVTVKQLKEDYFKKIECFDSVEISGVEDRFNASLGTYHDLLKIIKDKDFLDNEENEDILEDIVLTLTLFEDREMIEERLKTYAHLFDDKVMKQLKRRRYTGWGRLSRKLINGIRDKQSGKTILDFLKSDGFANRNFMQLIHDDSLTFKEDIQKAQVSGQGDSLHEHIANLAGSPAIKKGILQTVKVVDELVKVMGRHKPENIVIEMARENQTTQKGQKNSRERMKRIEEGIKELGSQILKEHPVENTQLQNEKLYLYYLQNGRDMYVDQELDINRLSDYDVDHIVPQSFLKDDSIDNKVLTRSDKARGKSDNVPSEEVVKKMKNYWRQLLNAKLITQRKFDNLTKAERGGLSELDKAGFIKRQLVETRQITKHVAQILDSRMNTKYDENDKLIREVKVITLKSKLVSDFRKDFQFYKVREINNYHHAHDAYLNAVVGTALIKKYPKLESEFVYGDYKVYDVRKMIAKSEQEIGKATAKYFFYSNIMNFFKTEITLANGEIRKRPLIETNGETGEIVWDKGRDFATVRKVLSMPQVNIVKKTEVQTGGFSKESILPKRNSDKLIARKKDWDPKKYGGFDSPTVAYSVLVVAKVEKGKSKKLKSVKELLGITIMERSSFEKNPIDFLEAKGYKEVKKDLIIKLPKYSLFELENGRKRMLASAGELQKGNELALPSKYVNFLYLASHYEKLKGSPEDNEQKQLFVEQHKHYLDEIIEQISEFSKRVILADANLDKVLSAYNKHRDKPIREQAENIIHLFTLTNLGAPAAFKYFDTTIDRKRYTSTKEVLDATLIHQSITGLYETRIDLSQLGGDGGEAAAKGGSGGIPWLMKKPLQLTTLVPLQEYEERLLKQTMLTGSYKEKLQSLFLKYDALWQHWENQVGHRRIKPHHIATGTVNPRPQKQYPINPKAKASIQTVINDLLKQGVLIQQNSIMNTPVYPVPKPDGKWRMVLDYREVNKTIPLIAAQNQHSAGILSSIFRGKYKTTLDLSNGFWAHSITPESYWLTAFTWLGQQYCWTRLPQGFLNSPALFNADVVDLLKEVPNVQVYVDDIYISHDDPREHLEQLEKVFSLLLNAGYVVSLKKSEIAQHEVEFLGFNITKEGRGLTETFKQKLLNITPPRDLKQLQSILGKLNFARNFIPNFSELVKPLYNIIATAPGKYITWTTDNSQQLQNIISMLNSAENLEERNPEVRLIMKVNTSPSAGYIRFYNEFAKRPIMYLNYVYTKAEVKFTNTEKLLTTIHKGLIKALDLGMGQEILVYSPIVSMTKIQKTPLPERKALPIRWITWMSYLEDPRIQFHYDKTLPELQQVPTVTDDIIAKIKHPSEFSMVFYTDGSAIKHPNVNKSHNAGMGIAQVQFKPEFTVINTWSIPLGDHTAQLAEVAAVEFACKKALKIDGPVLIVTDSFYVAESVNKELPYWQSNGFFNNKKKPLKHVSKWKSIADCIQLKPDIIIIHEKGHQPTASTFHTEGNNLADKLATQGSYVVNAGKRTADGSEFEKRTADGSEFESPKKKAKVE

SEQ ID NO: 6639 - protein, 2093 aa, synthetic construct
MPAAKRVKLDGGDKKYSIGLDIGTNSVGWAVITDEYKVPSKKFKVLGNTDRHSIKKNLIGALLFDSGETAEATRLKRTARRRYTRRKNRICYLQEIFSNEMAKVDDSFFHRLEESFLVEEDKKHERHPIFGNIVDEVAYHEKYPTIYHLRKKLVDSTDKADLRLIYLALAHMIKFRGHFLIEGDLNPDNSDVDKLFIQLVQTYNQLFEENPINASGVDAKAILSARLSKSRRLENLIAQLPGEKKNGLFGNLIALSLGLTPNFKSNFDLAEDAKLQLSKDTYDDDLDNLLAQIGDQYADLFLAAKNLSDAILLSDILRVNTEITKAPLSASMIKRYDEHHQDLTLLKALVRQQLPEKYKEIFFDQSKNGYAGYIDGGASQEEFYKFIKPILEKMDGTEELLVKLNREDLLRKQRTFDNGSIPHQIHLGELHAILRRQEDFYPFLKDNREKIEKILTFRIPYYVGPLARGNSRFAWMTRKSEETITPWNFEEVVDKGASAQSFIERMTNFDKNLPNEKVLPKHSLLYEYFTVYNELTKVKYVTEGMRKPAFLSGEQKKAIVDLLFKTNRKVTVKQLKEDYFKKIECFDSVEISGVEDRFNASLGTYHDLLKIIKDKDFLDNEENEDILEDIVLTLTLFEDREMIEERLKTYAHLFDDKVMKQLKRRRYTGWGRLSRKLINGIRDKQSGKTILDFLKSDGFANRNFMQLIHDDSLTFKEDIQKAQVSGQGDSLHEHIANLAGSPAIKKGILQTVKVVDELVKVMGRHKPENIVIEMARENQTTQKGQKNSRERMKRIEEGIKELGSQILKEHPVENTQLQNEKLYLYYLQNGRDMYVDQELDINRLSDYDVDHIVPQSFLKDDSIDNKVLTRSDKARGKSDNVPSEEVVKKMKNYWRQLLNAKLITQRKFDNLTKAERGGLSELDKAGFIKRQLVETRQITKHVAQILDSRMNTKYDENDKLIREVKVITLKSKLVSDFRKDFQFYKVREINNYHHAHDAYLNAVVGTALIKKYPKLESEFVYGDYKVYDVRKMIAKSEQEIGKATAKYFFYSNIMNFFKTEITLANGEIRKRPLIETNGETGEIVWDKGRDFATVRKVLSMPQVNIVKKTEVQTGGFSKESILPKRNSDKLIARKKDWDPKKYGGFDSPTVAYSVLVVAKVEKGKSKKLKSVKELLGITIMERSSFEKNPIDFLEAKGYKEVKKDLIIKLPKYSLFELENGRKRMLASAGELQKGNELALPSKYVNFLYLASHYEKLKGSPEDNEQKQLFVEQHKHYLDEIIEQISEFSKRVILADANLDKVLSAYNKHRDKPIREQAENIIHLFTLTNLGAPAAFKYFDTTIDRKRYTSTKEVLDATLIHQSITGLYETRIDLSQLGGDGGEAAAKGGSGGTLNIEDEYRLHETSKEPDVPLGSTWLSDFPQAWAETGGMGLAVRQAPLIIPLKATSTPVSIKQYPMSQEARLGIKPHIQRLLDQGILVPCQSPWNTPLLPVKKPGTNDYRPVQDLREVNKRVEDIHPTVPNPYNLLSGLPPSHQWYTVLDLKDAFFCLRLHPTSQPLFAFEWRDPEMGISGQLTWTRLPQGFKNSPTLFNEALHRDLADFRIQHPDLILLQYVDDLLLAATSEQDCQRGTRALLQTLGNLGYRASAKKAQICQKQVKYLGYLLKEGQRWLTEARKETVMGQPTPKTPRQLREFLGTAGFCRLWIPGFAEMAAPLYPLTKPGTLFNWGPDQQKAYQEIKQALLTAPALGLPDLTKPFELFVDEKQGYAKGVLTQKLGPWRRPVAYLSKKLDPVAAGWPPCLRMVAAIAVLTKDAGKLTMGQPLVILAPHAVEALVKQPPDRWLSNARMTHYQAMLLDTDRVQFGPVVALNPATLLPLPEKEAPHDCLEILAETHGTRPDLTDQPIPDADYTWYTDGSSFLQEGQRRAGAAVTTETEVIWARALPAGTSAQRAELIALTQALKMAEGKKLNVYTDSRYAFATAHVHGEIYRRRGWLTSEGREIKNKNEILALLKALFLPKRLSIIHCPGHQKGNSAEARGNRMADQAAREAAMKAVLETSTLLAGKRTADGSEFEKRTADGSEFESPKKKAKVE

SEQ ID NO: 6640 - protein, 2097 aa, synthetic construct
MPAAKRVKLDGGDKKYSIGLDIGTNSVGWAVITDEYKVPSKKFKVLGNTDRHSIKKNLIGALLFDSGETAEATRLKRTARRRYTRRKNRICYLQEIFSNEMAKVDDSFFHRLEESFLVEEDKKHERHPIFGNIVDEVAYHEKYPTIYHLRKKLVDSTDKADLRLIYLALAHMIKFRGHFLIEGDLNPDNSDVDKLFIQLVQTYNQLFEENPINASGVDAKAILSARLSKSRRLENLIAQLPGEKKNGLFGNLIALSLGLTPNFKSNFDLAEDAKLQLSKDTYDDDLDNLLAQIGDQYADLFLAAKNLSDAILLSDILRVNTEITKAPLSASMIKRYDEHHQDLTLLKALVRQQLPEKYKEIFFDQSKNGYAGYIDGGASQEEFYKFIKPILEKMDGTEELLVKLNREDLLRKQRTFDNGSIPHQIHLGELHAILRRQEDFYPFLKDNREKIEKILTFRIPYYVGPLARGNSRFAWMTRKSEETITPWNFEEVVDKGASAQSFIERMTNFDKNLPNEKVLPKHSLLYEYFTVYNELTKVKYVTEGMRKPAFLSGEQKKAIVDLLFKTNRKVTVKQLKEDYFKKIECFDSVEISGVEDRFNASLGTYHDLLKIIKDKDFLDNEENEDILEDIVLTLTLFEDREMIEERLKTYAHLFDDKVMKQLKRRRYTGWGRLSRKLINGIRDKQSGKTILDFLKSDGFANRNFMQLIHDDSLTFKEDIQKAQVSGQGDSLHEHIANLAGSPAIKKGILQTVKVVDELVKVMGRHKPENIVIEMARENQTTQKGQKNSRERMKRIEEGIKELGSQILKEHPVENTQLQNEKLYLYYLQNGRDMYVDQELDINRLSDYDVDHIVPQSFLKDDSIDNKVLTRSDKARGKSDNVPSEEVVKKMKNYWRQLLNAKLITQRKFDNLTKAERGGLSELDKAGFIKRQLVETRQITKHVAQILDSRMNTKYDENDKLIREVKVITLKSKLVSDFRKDFQFYKVREINNYHHAHDAYLNAVVGTALIKKYPKLESEFVYGDYKVYDVRKMIAKSEQEIGKATAKYFFYSNIMNFFKTEITLANGEIRKRPLIETNGETGEIVWDKGRDFATVRKVLSMPQVNIVKKTEVQTGGFSKESILPKRNSDKLIARKKDWDPKKYGGFDSPTVAYSVLVVAKVEKGKSKKLKSVKELLGITIMERSSFEKNPIDFLEAKGYKEVKKDLIIKLPKYSLFELENGRKRMLASAGELQKGNELALPSKYVNFLYLASHYEKLKGSPEDNEQKQLFVEQHKHYLDEIIEQISEFSKRVILADANLDKVLSAYNKHRDKPIREQAENIIHLFTLTNLGAPAAFKYFDTTIDRKRYTSTKEVLDATLIHQSITGLYETRIDLSQLGGDGGGGSPAPGGTVSLQDEHRLFDIPVTTSLPDVWLQDFPQAWAETGGLGRAKCQAPIIIDLKPTAVPVSIKQYPMSLEAHMGIRQHIIKFLELGVLRPCRSPWNTPLLPVKKPGTQDYRPVQDLREINKRTVDIHPTVPNPYNLLSTLKPDYSWYTVLDLKDAFFCLPLAPQSQELFAFEWKDPERGISGQLTWTRLPQGFKNSPTLFNEALHRDLTDFRTQHPEVTLLQYVDDLLLAAPTKKACTQGTRHLLQELGEKGYRASAKKAQICQTKVTYLGYILSEGKRWLTPGRIETVARIPPPRNPREVREFLGTAGFCRLWIPGFAELAAPLYALTKPSTPFTWQTEHQLAFEALKKALLSAPALGLPDTSKPFTLFLDERQGIAKGVLTQKLGPWKRPVAYLSKKLDPVAAGWPPCLRIMAATAMLVKDSAKLTLGQPLTVITPHTLEAIVRQPPDRWITNARLTHYQALLLDTDRVQFGPPVTLNPATLLPVPENQPSPHDCRQVLAETHGTREDLKDQELPDADHTWYTDGSSYLDSGTRRAGAAVVDGHNTIWAQSLPPGTSAQKAELIALTKALELSKGKKANIYTDSRYAFATAHTHGSIYERRGWLTSEGKEIKNKAEIIALLKALFLPQEVAIIHCPGHQKGQDPVAVGNRQADRVARQAAMAEVLTLATEPDNTSHITAGKRTADGSEFEKRTADGSEFESPKKKAKVE

SEQ ID NO: 6641 - protein, 2168 aa, synthetic construct
MPAAKRVKLDGGDKKYSIGLDIGTNSVGWAVITDEYKVPSKKFKVLGNTDRHSIKKNLIGALLFDSGETAEATRLKRTARRRYTRRKNRICYLQEIFSNEMAKVDDSFFHRLEESFLVEEDKKHERHPIFGNIVDEVAYHEKYPTIYHLRKKLVDSTDKADLRLIYLALAHMIKFRGHFLIEGDLNPDNSDVDKLFIQLVQTYNQLFEENPINASGVDAKAILSARLSKSRRLENLIAQLPGEKKNGLFGNLIALSLGLTPNFKSNFDLAEDAKLQLSKDTYDDDLDNLLAQIGDQYADLFLAAKNLSDAILLSDILRVNTEITKAPLSASMIKRYDEHHQDLTLLKALVRQQLPEKYKEIFFDQSKNGYAGYIDGGASQEEFYKFIKPILEKMDGTEELLVKLNREDLLRKQRTFDNGSIPHQIHLGELHAILRRQEDFYPFLKDNREKIEKILTFRIPYYVGPLARGNSRFAWMTRKSEETITPWNFEEVVDKGASAQSFIERMTNFDKNLPNEKVLPKHSLLYEYFTVYNELTKVKYVTEGMRKPAFLSGEQKKAIVDLLFKTNRKVTVKQLKEDYFKKIECFDSVEISGVEDRFNASLGTYHDLLKIIKDKDFLDNEENEDILEDIVLTLTLFEDREMIEERLKTYAHLFDDKVMKQLKRRRYTGWGRLSRKLINGIRDKQSGKTILDFLKSDGFANRNFMQLIHDDSLTFKEDIQKAQVSGQGDSLHEHIANLAGSPAIKKGILQTVKVVDELVKVMGRHKPENIVIEMARENQTTQKGQKNSRERMKRIEEGIKELGSQILKEHPVENTQLQNEKLYLYYLQNGRDMYVDQELDINRLSDYDVDHIVPQSFLKDDSIDNKVLTRSDKARGKSDNVPSEEVVKKMKNYWRQLLNAKLITQRKFDNLTKAERGGLSELDKAGFIKRQLVETRQITKHVAQILDSRMNTKYDENDKLIREVKVITLKSKLVSDFRKDFQFYKVREINNYHHAHDAYLNAVVGTALIKKYPKLESEFVYGDYKVYDVRKMIAKSEQEIGKATAKYFFYSNIMNFFKTEITLANGEIRKRPLIETNGETGEIVWDKGRDFATVRKVLSMPQVNIVKKTEVQTGGFSKESILPKRNSDKLIARKKDWDPKKYGGFDSPTVAYSVLVVAKVEKGKSKKLKSVKELLGITIMERSSFEKNPIDFLEAKGYKEVKKDLIIKLPKYSLFELENGRKRMLASAGELQKGNELALPSKYVNFLYLASHYEKLKGSPEDNEQKQLFVEQHKHYLDEIIEQISEFSKRVILADANLDKVLSAYNKHRDKPIREQAENIIHLFTLTNLGAPAAFKYFDTTIDRKRYTSTKEVLDATLIHQSITGLYETRIDLSQLGGDGGGGSPAPGGMDLLKPLTVERKGVKIKGYWNSQADITCVPKDLLQGEEPVRQQNVTTIHGTQEGDVYYVNLKIDGRRINTEVIGTTLDYAIITPGDVPWILKKPLELTIKLDLEEQQGTLLNNSILSKKGKEELKQLFEKYSALWQSWENQVGHRRIRPHKIATGTVKPTPQKQYHINPKAKPDIQIVINDLLKQGVLIQKESTMNTPVYPVPKPNGRWRMVLDYRAVNKVTPLIAVQNQHSYGILGSLFKGRYKTTIDLSNGFWAHPIVPEDYWITAFTWQGKQYCWTVLPQGFLNSPGLFNGDVVDLLQGIPNVEVYVDDVYISHDSEKEHLEYLDILFNRLKEAGYIISLKKSNIANSIVDFLGFQITNEGRGLTDTFKEKLENITAPTTLKQLQSILGLLNFARNFIPDFTELIAPLYALIPKSPKNYVPWQIEHSTTLETLITKLNGAEYLQGRKGDKTLIMKVNASYTTGYIRYYNEGEKKPISYVSIVFSKTELKFTELEKLLTTVHKGLLKALDLSMGQNIHVYSPIVSMQNIQKTPQTAKKALASRWLSWLSYLEDPRIRFFYDPQMPALKDLPAVDTGKDNKKHPSNFQHIFYTDGSAITSPTKEGHLNAGMGIVYFINKDGNLQKQQEWSISLGNHTAQFAEIAAFEFALKKCLPLGGNILVVTDSNYVAKAYNEELDVWASNGFVNNRKKPLKHISKWKSVADLKRLRPDVVVTHEPGHQKLDSSPHAYGNNLADQLATQASFKVHAGKRTADGSEFEKRTADGSEFESPKKKAKVE

SEQ ID NO: 6642 - protein, 2090 aa, synthetic construct
MPAAKRVKLDGGDKKYSIGLDIGTNSVGWAVITDEYKVPSKKFKVLGNTDRHSIKKNLIGALLFDSGETAEATRLKRTARRRYTRRKNRICYLQEIFSNEMAKVDDSFFHRLEESFLVEEDKKHERHPIFGNIVDEVAYHEKYPTIYHLRKKLVDSTDKADLRLIYLALAHMIKFRGHFLIEGDLNPDNSDVDKLFIQLVQTYNQLFEENPINASGVDAKAILSARLSKSRRLENLIAQLPGEKKNGLFGNLIALSLGLTPNFKSNFDLAEDAKLQLSKDTYDDDLDNLLAQIGDQYADLFLAAKNLSDAILLSDILRVNTEITKAPLSASMIKRYDEHHQDLTLLKALVRQQLPEKYKEIFFDQSKNGYAGYIDGGASQEEFYKFIKPILEKMDGTEELLVKLNREDLLRKQRTFDNGSIPHQIHLGELHAILRRQEDFYPFLKDNREKIEKILTFRIPYYVGPLARGNSRFAWMTRKSEETITPWNFEEVVDKGASAQSFIERMTNFDKNLPNEKVLPKHSLLYEYFTVYNELTKVKYVTEGMRKPAFLSGEQKKAIVDLLFKTNRKVTVKQLKEDYFKKIECFDSVEISGVEDRFNASLGTYHDLLKIIKDKDFLDNEENEDILEDIVLTLTLFEDREMIEERLKTYAHLFDDKVMKQLKRRRYTGWGRLSRKLINGIRDKQSGKTILDFLKSDGFANRNFMQLIHDDSLTFKEDIQKAQVSGQGDSLHEHIANLAGSPAIKKGILQTVKVVDELVKVMGRHKPENIVIEMARENQTTQKGQKNSRERMKRIEEGIKELGSQILKEHPVENTQLQNEKLYLYYLQNGRDMYVDQELDINRLSDYDVDHIVPQSFLKDDSIDNKVLTRSDKARGKSDNVPSEEVVKKMKNYWRQLLNAKLITQRKFDNLTKAERGGLSELDKAGFIKRQLVETRQITKHVAQILDSRMNTKYDENDKLIREVKVITLKSKLVSDFRKDFQFYKVREINNYHHAHDAYLNAVVGTALIKKYPKLESEFVYGDYKVYDVRKMIAKSEQEIGKATAKYFFYSNIMNFFKTEITLANGEIRKRPLIETNGETGEIVWDKGRDFATVRKVLSMPQVNIVKKTEVQTGGFSKESILPKRNSDKLIARKKDWDPKKYGGFDSPTVAYSVLVVAKVEKGKSKKLKSVKELLGITIMERSSFEKNPIDFLEAKGYKEVKKDLIIKLPKYSLFELENGRKRMLASAGELQKGNELALPSKYVNFLYLASHYEKLKGSPEDNEQKQLFVEQHKHYLDEIIEQISEFSKRVILADANLDKVLSAYNKHRDKPIREQAENIIHLFTLTNLGAPAAFKYFDTTIDRKRYTSTKEVLDATLIHQSITGLYETRIDLSQLGGDGGGGSPAPGGTLQLEEEYRLFEPESTQKQEMDIWLKNFPQAWAETGGMGTAHCQAPVLIQLKATATPISIRQYPMPHEAYQGIKPHIRRMLDQGILKPCQSPWNTPLLPVKKPGTEDYRPVQDLREVNKRVEDIHPTVPNPYNLLSTLPPSHPWYTVLDLKDAFFCLRLHSESQLLFAFEWRDPEIGLSGQLTWTRLPQGFKNSPTLFNEALHSDLADFRVRYPALVLLQYVDDLLLAAATRTECLEGTKALLETLGNKGYRASAKKAQICLQEVTYLGYSLKDGQRWLTKARKEAILSIPVPKNSRQVREFLGKAGYCRLFIPGFAELAAPLYPLTRPGTLFQWGTEQQLAFEDIKKALLSSPALGLPDITKPFELFIDENSGFAKGVLVQKLGPWKRPVAYLSKKLDTVASGWPPCLRMVAAIAILVKDAGKLTLGQPLTILTSHPVEALVRQPPNKWLSNARMTHYQAMLLDAERVHFGPTVSLNPATLLPLPSGGNHHDCLQILAETHGTRPDLTDQPLPDADLTWYTDGSSFIRNGEREAGAAVTTESEVIWAAPLPPGTSAQRAELIALTQALKMAEGKKLTVYTDSRYAFATTHVHGEIYRRRGWLTSEGKEIKNKNEILALLEALFLPKRLSIIHCPGHQKGDSPQAKGNRLADDTAKKAATETHSSLTVLPAGKRTADGSEFEKRTADGSEFESPKKKAKVE

SEQ ID NO: 6643 - protein, 2171 aa, synthetic construct
MPAAKRVKLDGGDKKYSIGLDIGTNSVGWAVITDEYKVPSKKFKVLGNTDRHSIKKNLIGALLFDSGETAEATRLKRTARRRYTRRKNRICYLQEIFSNEMAKVDDSFFHRLEESFLVEEDKKHERHPIFGNIVDEVAYHEKYPTIYHLRKKLVDSTDKADLRLIYLALAHMIKFRGHFLIEGDLNPDNSDVDKLFIQLVQTYNQLFEENPINASGVDAKAILSARLSKSRRLENLIAQLPGEKKNGLFGNLIALSLGLTPNFKSNFDLAEDAKLQLSKDTYDDDLDNLLAQIGDQYADLFLAAKNLSDAILLSDILRVNTEITKAPLSASMIKRYDEHHQDLTLLKALVRQQLPEKYKEIFFDQSKNGYAGYIDGGASQEEFYKFIKPILEKMDGTEELLVKLNREDLLRKQRTFDNGSIPHQIHLGELHAILRRQEDFYPFLKDNREKIEKILTFRIPYYVGPLARGNSRFAWMTRKSEETITPWNFEEVVDKGASAQSFIERMTNFDKNLPNEKVLPKHSLLYEYFTVYNELTKVKYVTEGMRKPAFLSGEQKKAIVDLLFKTNRKVTVKQLKEDYFKKIECFDSVEISGVEDRFNASLGTYHDLLKIIKDKDFLDNEENEDILEDIVLTLTLFEDREMIEERLKTYAHLFDDKVMKQLKRRRYTGWGRLSRKLINGIRDKQSGKTILDFLKSDGFANRNFMQLIHDDSLTFKEDIQKAQVSGQGDSLHEHIANLAGSPAIKKGILQTVKVVDELVKVMGRHKPENIVIEMARENQTTQKGQKNSRERMKRIEEGIKELGSQILKEHPVENTQLQNEKLYLYYLQNGRDMYVDQELDINRLSDYDVDHIVPQSFLKDDSIDNKVLTRSDKARGKSDNVPSEEVVKKMKNYWRQLLNAKLITQRKFDNLTKAERGGLSELDKAGFIKRQLVETRQITKHVAQILDSRMNTKYDENDKLIREVKVITLKSKLVSDFRKDFQFYKVREINNYHHAHDAYLNAVVGTALIKKYPKLESEFVYGDYKVYDVRKMIAKSEQEIGKATAKYFFYSNIMNFFKTEITLANGEIRKRPLIETNGETGEIVWDKGRDFATVRKVLSMPQVNIVKKTEVQTGGFSKESILPKRNSDKLIARKKDWDPKKYGGFDSPTVAYSVLVVAKVEKGKSKKLKSVKELLGITIMERSSFEKNPIDFLEAKGYKEVKKDLIIKLPKYSLFELENGRKRMLASAGELQKGNELALPSKYVNFLYLASHYEKLKGSPEDNEQKQLFVEQHKHYLDEIIEQISEFSKRVILADANLDKVLSAYNKHRDKPIREQAENIIHLFTLTNLGAPAAFKYFDTTIDRKRYTSTKEVLDATLIHQSITGLYETRIDLSQLGGDGGGGSPAPGGMNPLQLLQPLPAEIKGTKLLAHWNSGATITCIPESFLEDEQPIKKTLIKTIHGEKQQNVYYVTFKVKGRKVEAEVIASPYEYILLSPTDVPWLTQQPLQLTILVPLQEYQEKILSKTALPEDQKQQLKTLFVKYDNLWQHWENQVGHRKIRPHNIATGDYPPRPQKQYPINPKAKPSIQIVIDDLLKQGVLTPQNSTMNTPVYPVPKPDGRWRMVLDYREVNKTIPLTAAQNQHSAGILATIVRQKYKTTLDLANGFWAHPITPESYWLTAFTWQGKQYCWTRLPQGFLNSPALFNADVVDLLKEIPNVQVYVDDIYLSHDDPKEHVQQLEKVFQILLQAGYVVSLKKSEIGQKTVEFLGFNITKEGRGLTDTFKTKLLNITPPKDLKQLQSILGKLNFARNFIPNFAELVQPLYNLIAPAKGKYIEWSEENTKQLNMVIEALNTASNLEERLPEQRLVIKVNTSPSAGYVRYYNETGKKPIMYLNYVFSKAELKFSMLEKLLTTMHKALIKAMDLAMGQEILVYSPIVSMTKIQKTPLPERKALPIRWITWMTYLEDPRIQFHYDKTLPELKHIPDVYTSSQSPVKHPSQYEGVFYTDGSAIKSPDPTKSNNAGMGIVHATYKPEYQVLNQWSIPLGNHTAQMAEIAAVEFACKKALKIPGPVLVITDSFYVAESANKELPYWKSNGFVNNKKKPLKHISKWKSIAECLSMKPDITIQHEKGISLQIPVFILKGNALADKLATQGSYVVNAGKRTADGSEFEKRTADGSEFESPKKKAKVE

SEQ ID NO: 6644 - protein, 2089 aa, synthetic construct
MPAAKRVKLDGGDKKYSIGLDIGTNSVGWAVITDEYKVPSKKFKVLGNTDRHSIKKNLIGALLFDSGETAEATRLKRTARRRYTRRKNRICYLQEIFSNEMAKVDDSFFHRLEESFLVEEDKKHERHPIFGNIVDEVAYHEKYPTIYHLRKKLVDSTDKADLRLIYLALAHMIKFRGHFLIEGDLNPDNSDVDKLFIQLVQTYNQLFEENPINASGVDAKAILSARLSKSRRLENLIAQLPGEKKNGLFGNLIALSLGLTPNFKSNFDLAEDAKLQLSKDTYDDDLDNLLAQIGDQYADLFLAAKNLSDAILLSDILRVNTEITKAPLSASMIKRYDEHHQDLTLLKALVRQQLPEKYKEIFFDQSKNGYAGYIDGGASQEEFYKFIKPILEKMDGTEELLVKLNREDLLRKQRTFDNGSIPHQIHLGELHAILRRQEDFYPFLKDNREKIEKILTFRIPYYVGPLARGNSRFAWMTRKSEETITPWNFEEVVDKGASAQSFIERMTNFDKNLPNEKVLPKHSLLYEYFTVYNELTKVKYVTEGMRKPAFLSGEQKKAIVDLLFKTNRKVTVKQLKEDYFKKIECFDSVEISGVEDRFNASLGTYHDLLKIIKDKDFLDNEENEDILEDIVLTLTLFEDREMIEERLKTYAHLFDDKVMKQLKRRRYTGWGRLSRKLINGIRDKQSGKTILDFLKSDGFANRNFMQLIHDDSLTFKEDIQKAQVSGQGDSLHEHIANLAGSPAIKKGILQTVKVVDELVKVMGRHKPENIVIEMARENQTTQKGQKNSRERMKRIEEGIKELGSQILKEHPVENTQLQNEKLYLYYLQNGRDMYVDQELDINRLSDYDVDHIVPQSFLKDDSIDNKVLTRSDKARGKSDNVPSEEVVKKMKNYWRQLLNAKLITQRKFDNLTKAERGGLSELDKAGFIKRQLVETRQITKHVAQILDSRMNTKYDENDKLIREVKVITLKSKLVSDFRKDFQFYKVREINNYHHAHDAYLNAVVGTALIKKYPKLESEFVYGDYKVYDVRKMIAKSEQEIGKATAKYFFYSNIMNFFKTEITLANGEIRKRPLIETNGETGEIVWDKGRDFATVRKVLSMPQVNIVKKTEVQTGGFSKESILPKRNSDKLIARKKDWDPKKYGGFDSPTVAYSVLVVAKVEKGKSKKLKSVKELLGITIMERSSFEKNPIDFLEAKGYKEVKKDLIIKLPKYSLFELENGRKRMLASAGELQKGNELALPSKYVNFLYLASHYEKLKGSPEDNEQKQLFVEQHKHYLDEIIEQISEFSKRVILADANLDKVLSAYNKHRDKPIREQAENIIHLFTLTNLGAPAAFKYFDTTIDRKRYTSTKEVLDATLIHQSITGLYETRIDLSQLGGDGGGGSPAPGGVLNLEEEYRLHEKPVPSSIDPSWLQLFPTVWAERAGMGLANQVPPVVVELRSGASPVAVRQYPMSKEAREGIRPHIQKFLDLGVLVPCRSPWNTPLLPVKKPGTNDYRPVQDLREINKRVQDIHPTVPNPYNLLSSLPPSYTWYSVLDLKDAFFCLRLHPNSQPLFAFEWKDPEKGNTGQLTWTRLPQGFKNSPTLFNEALHRDLAPFRALNPQVVLLQYVDDLLVAAPTYEDCKKGTQKLLQELSKLGYRVSAKKAQLCQREVTYLGYLLKEGKRWLTPARKATVMKIPVPTTPRQVREFLGTAGFCRLWIPGFASLAAPLYPLTKPSIPFIWTEEHQQAFDHIKKALLSAPALALPDLTKPFTLYIDERAGVARGVLTQTLGPWRRPVAYLSKKLDPVASGWPTCLKAVAAVALLLKDADKLTLGQNVTVIASHSLESIVRQPPDRWMTNARMTHYQSLLLNERVSFAPPAVLNPATLLPVESEATPVHRCSEILAEETGTRRDLEDQPLPGVPTWYTDGSSFITEGKRRAGAPIVDGKRTVWASSLPEGTSAQKAELVALTQALRLAEGKNINIYTDSRYAFATAHIHGAIYKQRGWLTSAGKDIKNKEEILALLEAIHLPRRVAIIHCPGHQRGSNPVATGNRRADEAAKQAALSTRVLAGTTKPAGKRTADGSEFEKRTADGSEFESPKKKAKVE

SEQ ID NO: 6645 - protein, 2213 aa, synthetic construct
MPAAKRVKLDGGDKKYSIGLDIGTNSVGWAVITDEYKVPSKKFKVLGNTDRHSIKKNLIGALLFDSGETAEATRLKRTARRRYTRRKNRICYLQEIFSNEMAKVDDSFFHRLEESFLVEEDKKHERHPIFGNIVDEVAYHEKYPTIYHLRKKLVDSTDKADLRLIYLALAHMIKFRGHFLIEGDLNPDNSDVDKLFIQLVQTYNQLFEENPINASGVDAKAILSARLSKSRRLENLIAQLPGEKKNGLFGNLIALSLGLTPNFKSNFDLAEDAKLQLSKDTYDDDLDNLLAQIGDQYADLFLAAKNLSDAILLSDILRVNTEITKAPLSASMIKRYDEHHQDLTLLKALVRQQLPEKYKEIFFDQSKNGYAGYIDGGASQEEFYKFIKPILEKMDGTEELLVKLNREDLLRKQRTFDNGSIPHQIHLGELHAILRRQEDFYPFLKDNREKIEKILTFRIPYYVGPLARGNSRFAWMTRKSEETITPWNFEEVVDKGASAQSFIERMTNFDKNLPNEKVLPKHSLLYEYFTVYNELTKVKYVTEGMRKPAFLSGEQKKAIVDLLFKTNRKVTVKQLKEDYFKKIECFDSVEISGVEDRFNASLGTYHDLLKIIKDKDFLDNEENEDILEDIVLTLTLFEDREMIEERLKTYAHLFDDKVMKQLKRRRYTGWGRLSRKLINGIRDKQSGKTILDFLKSDGFANRNFMQLIHDDSLTFKEDIQKAQVSGQGDSLHEHIANLAGSPAIKKGILQTVKVVDELVKVMGRHKPENIVIEMARENQTTQKGQKNSRERMKRIEEGIKELGSQILKEHPVENTQLQNEKLYLYYLQNGRDMYVDQELDINRLSDYDVDHIVPQSFLKDDSIDNKVLTRSDKARGKSDNVPSEEVVKKMKNYWRQLLNAKLITQRKFDNLTKAERGGLSELDKAGFIKRQLVETRQITKHVAQILDSRMNTKYDENDKLIREVKVITLKSKLVSDFRKDFQFYKVREINNYHHAHDAYLNAVVGTALIKKYPKLESEFVYGDYKVYDVRKMIAKSEQEIGKATAKYFFYSNIMNFFKTEITLANGEIRKRPLIETNGETGEIVWDKGRDFATVRKVLSMPQVNIVKKTEVQTGGFSKESILPKRNSDKLIARKKDWDPKKYGGFDSPTVAYSVLVVAKVEKGKSKKLKSVKELLGITIMERSSFEKNPIDFLEAKGYKEVKKDLIIKLPKYSLFELENGRKRMLASAGELQKGNELALPSKYVNFLYLASHYEKLKGSPEDNEQKQLFVEQHKHYLDEIIEQISEFSKRVILADANLDKVLSAYNKHRDKPIREQAENIIHLFTLTNLGAPAAFKYFDTTIDRKRYTSTKEVLDATLIHQSITGLYETRIDLSQLGGDGGGGSPAPGGTLGDQGSRGSDPLPEPRVTLTVEGIPTEFLVNTGAEHSVLTKPMGKMGSKRTVVAGATGSKVYPWTTKRLLKIGQKQVTHSFLVIPECPAPLLGRDLLTKLKAQIQFSTEGPQVTWEDRPAMCLVLNLEEEYRLHEKPVPPSIDPSWLQLFPMVWAEKAGMGLANQVPPVVVELKSDASPVAVRQYPMSKEAREGIRPHIQRFLDLGILVPCQSPWNTPLLPVKKPGTNDYRPVQDLREVNKRVQDIHPTVPNPYNLLSSLPPSHTWYSVLDLKDAFFCLKLHPNSQPLFAFEWRDPEKGNTGQLTWTRLPQGFKNSPTLFNEALHRDLASFRALNPQVVMLQYVDDLLVAAPTYRDCKEGTRRLLQELSKLGYRVSAKKAQLCREEVTYLGYLLKGGKRWLTPARKATVMKIPTPTTPRQVREFLGTAGFCRLWIPGFASLAAPLYPLTRPKVPFTWTEAHQEAFGRIKEALLSAPALALPDLTKPFALYVDEKEGVARGVLTQTLGPWRRPVAYLSKKLDPVASGWPTCLKAIAAVALLLKDADKLTLGQNVLVIAPHNLESIVRQPPDRWMTNARMTHYQSLLLNERVSFAPPAILNPATLLPVESDDTPIHICSEILAEETGTRPDLRDQPLPGVPAWYTDGSSFIMDGRRQAGAAIVDNKRTVWASNLPEGTSAQKAELIALTQALRLAEGKSINIYTDSRYAFATAHVHGAIYKQRGWLTSAGKDIKNKEEILALLEAIHLPKRVAIIHCPGHQRGTDPVATGNRKADEAAKQAAQSTRILTETTKNAGKRTADGSEFEKRTADGSEFESPKKKAKVE

SEQ ID NO: 6646 - protein, 2213 aa, synthetic construct
MPAAKRVKLDGGDKKYSIGLDIGTNSVGWAVITDEYKVPSKKFKVLGNTDRHSIKKNLIGALLFDSGETAEATRLKRTARRRYTRRKNRICYLQEIFSNEMAKVDDSFFHRLEESFLVEEDKKHERHPIFGNIVDEVAYHEKYPTIYHLRKKLVDSTDKADLRLIYLALAHMIKFRGHFLIEGDLNPDNSDVDKLFIQLVQTYNQLFEENPINASGVDAKAILSARLSKSRRLENLIAQLPGEKKNGLFGNLIALSLGLTPNFKSNFDLAEDAKLQLSKDTYDDDLDNLLAQIGDQYADLFLAAKNLSDAILLSDILRVNTEITKAPLSASMIKRYDEHHQDLTLLKALVRQQLPEKYKEIFFDQSKNGYAGYIDGGASQEEFYKFIKPILEKMDGTEELLVKLNREDLLRKQRTFDNGSIPHQIHLGELHAILRRQEDFYPFLKDNREKIEKILTFRIPYYVGPLARGNSRFAWMTRKSEETITPWNFEEVVDKGASAQSFIERMTNFDKNLPNEKVLPKHSLLYEYFTVYNELTKVKYVTEGMRKPAFLSGEQKKAIVDLLFKTNRKVTVKQLKEDYFKKIECFDSVEISGVEDRFNASLGTYHDLLKIIKDKDFLDNEENEDILEDIVLTLTLFEDREMIEERLKTYAHLFDDKVMKQLKRRRYTGWGRLSRKLINGIRDKQSGKTILDFLKSDGFANRNFMQLIHDDSLTFKEDIQKAQVSGQGDSLHEHIANLAGSPAIKKGILQTVKVVDELVKVMGRHKPENIVIEMARENQTTQKGQKNSRERMKRIEEGIKELGSQILKEHPVENTQLQNEKLYLYYLQNGRDMYVDQELDINRLSDYDVDHIVPQSFLKDDSIDNKVLTRSDKARGKSDNVPSEEVVKKMKNYWRQLLNAKLITQRKFDNLTKAERGGLSELDKAGFIKRQLVETRQITKHVAQILDSRMNTKYDENDKLIREVKVITLKSKLVSDFRKDFQFYKVREINNYHHAHDAYLNAVVGTALIKKYPKLESEFVYGDYKVYDVRKMIAKSEQEIGKATAKYFFYSNIMNFFKTEITLANGEIRKRPLIETNGETGEIVWDKGRDFATVRKVLSMPQVNIVKKTEVQTGGFSKESILPKRNSDKLIARKKDWDPKKYGGFDSPTVAYSVLVVAKVEKGKSKKLKSVKELLGITIMERSSFEKNPIDFLEAKGYKEVKKDLIIKLPKYSLFELENGRKRMLASAGELQKGNELALPSKYVNFLYLASHYEKLKGSPEDNEQKQLFVEQHKHYLDEIIEQISEFSKRVILADANLDKVLSAYNKHRDKPIREQAENIIHLFTLTNLGAPAAFKYFDTTIDRKRYTSTKEVLDATLIHQSITGLYETRIDLSQLGGDGGGGSPAPGGTLGDQGSRGSDPLPEPRVTLTVEGIPTEFLVNTGAEHSVLTKPMGKMGSKRTVVAGATGSKVYPWTTKRLLKIGQKQVTHSFLVIPECPAPLLGRDLLTKLKAQIQFSTEGPQVTWEDRPAMCLVLNLEEEYRLHEKPVPPSIDPSWLQLFPMVWAEKAGMGLANQVPPVVVELKSDASPVAVRQYPMSKEAREGIRPHIQRFLDLGILVPCQSPWNTPLLPVKKPGTNDYRPVQDLREVNKRVQDIHPTVPNPYNLLSSLPPSHTWYSVLDLKDAFFCLKLHPNSQPLFAFEWRDPEKGNTGQLTWTRLPQGFKNSPTLFNEALHRDLASFRALNPQVVMLQYVDDLLVAAPTYRDCKEGTRRLLQELSKLGYRVSAKKAQLCREEVTYLGYLLKGGKRWLTPARKATVMKIPTPTTPRQVREFLGKAGFCRLFIPGFASLAAPLYPLTRPKVPFTWTEAHQEAFGRIKEALLSAPALALPDLTKPFALYVDEKEGVARGVLTQTLGPWRRPVAYLSKKLDPVASGWPTCLKAIAAVALLLKDADKLTLGQNVLVIAPHNLESIVRQPPDRWMTNARMTHYQSLLLNERVSFAPPAILNPATLLPVESDDTPIHICSEILAEETGTRPDLRDQPLPGVPAWYTDGSSFIMDGRRQAGAAIVDNKRTVWASNLPEGTSAQKAELIALTQALRLAEGKSINIYTDSRYAFATAHVHGAIYKQRGWLTSAGKDIKNKEEILALLEAIHLPKRVAIIHCPGHQRGTDPVATGNRKADEAAKQAAQSTRILTETTKNAGKRTADGSEFEKRTADGSEFESPKKKAKVE

SEQ ID NO: 6647 - protein, 2091 aa, synthetic construct
MPAAKRVKLDGGDKKYSIGLDIGTNSVGWAVITDEYKVPSKKFKVLGNTDRHSIKKNLIGALLFDSGETAEATRLKRTARRRYTRRKNRICYLQEIFSNEMAKVDDSFFHRLEESFLVEEDKKHERHPIFGNIVDEVAYHEKYPTIYHLRKKLVDSTDKADLRLIYLALAHMIKFRGHFLIEGDLNPDNSDVDKLFIQLVQTYNQLFEENPINASGVDAKAILSARLSKSRRLENLIAQLPGEKKNGLFGNLIALSLGLTPNFKSNFDLAEDAKLQLSKDTYDDDLDNLLAQIGDQYADLFLAAKNLSDAILLSDILRVNTEITKAPLSASMIKRYDEHHQDLTLLKALVRQQLPEKYKEIFFDQSKNGYAGYIDGGASQEEFYKFIKPILEKMDGTEELLVKLNREDLLRKQRTFDNGSIPHQIHLGELHAILRRQEDFYPFLKDNREKIEKILTFRIPYYVGPLARGNSRFAWMTRKSEETITPWNFEEVVDKGASAQSFIERMTNFDKNLPNEKVLPKHSLLYEYFTVYNELTKVKYVTEGMRKPAFLSGEQKKAIVDLLFKTNRKVTVKQLKEDYFKKIECFDSVEISGVEDRFNASLGTYHDLLKIIKDKDFLDNEENEDILEDIVLTLTLFEDREMIEERLKTYAHLFDDKVMKQLKRRRYTGWGRLSRKLINGIRDKQSGKTILDFLKSDGFANRNFMQLIHDDSLTFKEDIQKAQVSGQGDSLHEHIANLAGSPAIKKGILQTVKVVDELVKVMGRHKPENIVIEMARENQTTQKGQKNSRERMKRIEEGIKELGSQILKEHPVENTQLQNEKLYLYYLQNGRDMYVDQELDINRLSDYDVDHIVPQSFLKDDSIDNKVLTRSDKARGKSDNVPSEEVVKKMKNYWRQLLNAKLITQRKFDNLTKAERGGLSELDKAGFIKRQLVETRQITKHVAQILDSRMNTKYDENDKLIREVKVITLKSKLVSDFRKDFQFYKVREINNYHHAHDAYLNAVVGTALIKKYPKLESEFVYGDYKVYDVRKMIAKSEQEIGKATAKYFFYSNIMNFFKTEITLANGEIRKRPLIETNGETGEIVWDKGRDFATVRKVLSMPQVNIVKKTEVQTGGFSKESILPKRNSDKLIARKKDWDPKKYGGFDSPTVAYSVLVVAKVEKGKSKKLKSVKELLGITIMERSSFEKNPIDFLEAKGYKEVKKDLIIKLPKYSLFELENGRKRMLASAGELQKGNELALPSKYVNFLYLASHYEKLKGSPEDNEQKQLFVEQHKHYLDEIIEQISEFSKRVILADANLDKVLSAYNKHRDKPIREQAENIIHLFTLTNLGAPAAFKYFDTTIDRKRYTSTKEVLDATLIHQSITGLYETRIDLSQLGGDGGGGSPAPGGTLNIEDEYRLHETSKEPDVSLGSTWLSDFPQAWAETGGMGLAVRQAPLIIPLKATSTPVSIKQYPMSQEARLGIKPHIQRLLDQGILVPCQSPWNTPLLPVKKPGTNDYRPVQDLREVNKRVEDIHPTVPNPYNLLSGLPPSHQWYTVLDLKDAFFCLRLHPTSQPLFAFEWRDPEMGISGQLTWTRLPQGFKNSPTLFNEALHRDLAGFRIQHPDLILLQYVDDLLLAATSELDCQQGTRALLQTLGDLGYRASAKKAQICQKQVKYLGYLLKEGQRWLTEARKETVMGQPIPKTPRQLREFLGTAGFCRLWIPGFAEMAAPLYPLTKPGTLFNWGPDQQKAFQEIKQALLTAPALGLPDLTKPFELFVDEKQGYAKGVLTQKLGPWRRPVAYLSKKLDPVAAGWPPCLRMVAAIAVLTKDAGKLTMGQPLVILAPHAVEALVKQPPDRWLSNARMTHYQALLLDTDRVQFGPVVALNPATLLPLPEEGLQHDCLDILAEAHGTRSDLMDQPLPDADHTWYTDGSSFLQEGQRKAGAAVTTETEVIWARALPAGTSAQRAELIALTQALKMAEGKKLNVYTDSRYAFATAHIHGEIYRRRGWLTSEGKEIKNKDEILALLKALFLPKRLSIIHCPGHQKGNSAEARGNRMADQAAREVATRETPETSTLLAGKRTADGSEFEKRTADGSEFESPKKKAKVE

SEQ ID NO: 6648 - protein, 2091 aa, synthetic construct
MPAAKRVKLDGGDKKYSIGLDIGTNSVGWAVITDEYKVPSKKFKVLGNTDRHSIKKNLIGALLFDSGETAEATRLKRTARRRYTRRKNRICYLQEIFSNEMAKVDDSFFHRLEESFLVEEDKKHERHPIFGNIVDEVAYHEKYPTIYHLRKKLVDSTDKADLRLIYLALAHMIKFRGHFLIEGDLNPDNSDVDKLFIQLVQTYNQLFEENPINASGVDAKAILSARLSKSRRLENLIAQLPGEKKNGLFGNLIALSLGLTPNFKSNFDLAEDAKLQLSKDTYDDDLDNLLAQIGDQYADLFLAAKNLSDAILLSDILRVNTEITKAPLSASMIKRYDEHHQDLTLLKALVRQQLPEKYKEIFFDQSKNGYAGYIDGGASQEEFYKFIKPILEKMDGTEELLVKLNREDLLRKQRTFDNGSIPHQIHLGELHAILRRQEDFYPFLKDNREKIEKILTFRIPYYVGPLARGNSRFAWMTRKSEETITPWNFEEVVDKGASAQSFIERMTNFDKNLPNEKVLPKHSLLYEYFTVYNELTKVKYVTEGMRKPAFLSGEQKKAIVDLLFKTNRKVTVKQLKEDYFKKIECFDSVEISGVEDRFNASLGTYHDLLKIIKDKDFLDNEENEDILEDIVLTLTLFEDREMIEERLKTYAHLFDDKVMKQLKRRRYTGWGRLSRKLINGIRDKQSGKTILDFLKSDGFANRNFMQLIHDDSLTFKEDIQKAQVSGQGDSLHEHIANLAGSPAIKKGILQTVKVVDELVKVMGRHKPENIVIEMARENQTTQKGQKNSRERMKRIEEGIKELGSQILKEHPVENTQLQNEKLYLYYLQNGRDMYVDQELDINRLSDYDVDHIVPQSFLKDDSIDNKVLTRSDKARGKSDNVPSEEVVKKMKNYWRQLLNAKLITQRKFDNLTKAERGGLSELDKAGFIKRQLVETRQITKHVAQILDSRMNTKYDENDKLIREVKVITLKSKLVSDFRKDFQFYKVREINNYHHAHDAYLNAVVGTALIKKYPKLESEFVYGDYKVYDVRKMIAKSEQEIGKATAKYFFYSNIMNFFKTEITLANGEIRKRPLIETNGETGEIVWDKGRDFATVRKVLSMPQVNIVKKTEVQTGGFSKESILPKRNSDKLIARKKDWDPKKYGGFDSPTVAYSVLVVAKVEKGKSKKLKSVKELLGITIMERSSFEKNPIDFLEAKGYKEVKKDLIIKLPKYSLFELENGRKRMLASAGELQKGNELALPSKYVNFLYLASHYEKLKGSPEDNEQKQLFVEQHKHYLDEIIEQISEFSKRVILADANLDKVLSAYNKHRDKPIREQAENIIHLFTLTNLGAPAAFKYFDTTIDRKRYTSTKEVLDATLIHQSITGLYETRIDLSQLGGDGGGGSPAPGGTLNIEDEYRLHETSKGPDVPLGSTWLSDFPQAWAETGGMGLAVRQAPLIIPLKATSTPVSIKQYPMSQEARLGIKPHIQRLLDQGILVPCQSPWNTPLLPVKKPGTNDYRPVQDLREVNKRVEDIHPTVPNPYNLLSGLPPSHQWYTVLDLKDAFFCLRLHPTSQSLFAFEWRDPEMGISGQLTWTRLPQGFKNSPTLFNEALHRDLADFRIQHPDLILLQYVDDLLLAATSELDCQQGTRALLQTLGDLGYRASAKKAQICQKQVKYLGYLLKEGQRWLTEARKETVMGQPTPKTPRQLREFLGKAGFCRLFIPGFAEMAAPLYPLTKPGTLFEWGPDQQKAYQEIKQALLTAPALGLPDLTKPFELFVDEKQGYAKGVLTQKLGPWRRPVAYLSKKLDPVAAGWPPCLRMVAAIAVLTKDAGKLTMGQPLVILAPHAVEALVKQPPDRWLSNARMTHYQALLLDTDRVQFGPIVALNPATLLPLPEEGLQHDCLDILAEAHGTRPDLTDQPLPDADHTWYTDGSSFLQEGQRKAGAAVTTETEVVWAKALPAGTSAQRAELIALTQALKMAEGKKLNVYTDSRYAFATAHIHGEIYRRRGWLTSEGKEIKNKDEILALLKALFLPKRLSIIHCPGHQKGNRAEARGNRMADQAAREVATRETPETSTLLAGKRTADGSEFEKRTADGSEFESPKKKAKVE

SEQ ID NO: 6649 - protein, 2082 aa, synthetic construct
MPAAKRVKLDGGDKKYSIGLDIGTNSVGWAVITDEYKVPSKKFKVLGNTDRHSIKKNLIGALLFDSGETAEATRLKRTARRRYTRRKNRICYLQEIFSNEMAKVDDSFFHRLEESFLVEEDKKHERHPIFGNIVDEVAYHEKYPTIYHLRKKLVDSTDKADLRLIYLALAHMIKFRGHFLIEGDLNPDNSDVDKLFIQLVQTYNQLFEENPINASGVDAKAILSARLSKSRRLENLIAQLPGEKKNGLFGNLIALSLGLTPNFKSNFDLAEDAKLQLSKDTYDDDLDNLLAQIGDQYADLFLAAKNLSDAILLSDILRVNTEITKAPLSASMIKRYDEHHQDLTLLKALVRQQLPEKYKEIFFDQSKNGYAGYIDGGASQEEFYKFIKPILEKMDGTEELLVKLNREDLLRKQRTFDNGSIPHQIHLGELHAILRRQEDFYPFLKDNREKIEKILTFRIPYYVGPLARGNSRFAWMTRKSEETITPWNFEEVVDKGASAQSFIERMTNFDKNLPNEKVLPKHSLLYEYFTVYNELTKVKYVTEGMRKPAFLSGEQKKAIVDLLFKTNRKVTVKQLKEDYFKKIECFDSVEISGVEDRFNASLGTYHDLLKIIKDKDFLDNEENEDILEDIVLTLTLFEDREMIEERLKTYAHLFDDKVMKQLKRRRYTGWGRLSRKLINGIRDKQSGKTILDFLKSDGFANRNFMQLIHDDSLTFKEDIQKAQVSGQGDSLHEHIANLAGSPAIKKGILQTVKVVDELVKVMGRHKPENIVIEMARENQTTQKGQKNSRERMKRIEEGIKELGSQILKEHPVENTQLQNEKLYLYYLQNGRDMYVDQELDINRLSDYDVDHIVPQSFLKDDSIDNKVLTRSDKARGKSDNVPSEEVVKKMKNYWRQLLNAKLITQRKFDNLTKAERGGLSELDKAGFIKRQLVETRQITKHVAQILDSRMNTKYDENDKLIREVKVITLKSKLVSDFRKDFQFYKVREINNYHHAHDAYLNAVVGTALIKKYPKLESEFVYGDYKVYDVRKMIAKSEQEIGKATAKYFFYSNIMNFFKTEITLANGEIRKRPLIETNGETGEIVWDKGRDFATVRKVLSMPQVNIVKKTEVQTGGFSKESILPKRNSDKLIARKKDWDPKKYGGFDSPTVAYSVLVVAKVEKGKSKKLKSVKELLGITIMERSSFEKNPIDFLEAKGYKEVKKDLIIKLPKYSLFELENGRKRMLASAGELQKGNELALPSKYVNFLYLASHYEKLKGSPEDNEQKQLFVEQHKHYLDEIIEQISEFSKRVILADANLDKVLSAYNKHRDKPIREQAENIIHLFTLTNLGAPAAFKYFDTTIDRKRYTSTKEVLDATLIHQSITGLYETRIDLSQLGGDGGGGSPAPGGIPWLMKKPLQLTTLVPLQEYEERLLKQTMLTGSYKEKLQSLFLKYDALWQHWENQVGHRRIKPHHIATGTVNPRPQKQYPINPKAKASIQTVINDLLKQGVLIQQNSIMNTPVYPVPKPDGKWRMVLDYREVNKTIPLIAAQNQHSAGILSSIFRGKYKTTLDLSNGFWAHSITPESYWLTAFTWLGQQYCWTRLPQGFLNSPALFNADVVDLLKEVPNVQVYVDDIYISHDDPREHLEQLEKVFSLLLNAGYVVSLKKSEIAQHEVEFLGFNITKEGRGLTETFKQKLLNITPPRDLKQLQSILGKLNFARNFIPNFSELVKPLYNIIATAPGKYITWTTDNSQQLQNIISMLNSAENLEERNPEVRLIMKVNTSPSAGYIRFYNEFAKRPIMYLNYVYTKAEVKFTNTEKLLTTIHKGLIKALDLGMGQEILVYSPIVSMTKIQKTPLPERKALPIRWITWMSYLEDPRIQFHYDKTLPELQQVPTVTDDIIAKIKHPSEFSMVFYTDGSAIKHPNVNKSHNAGMGIAQVQFKPEFTVINTWSIPLGDHTAQLAEVAAVEFACKKALKIDGPVLIVTDSFYVAESVNKELPYWQSNGFFNNKKKPLKHVSKWKSIADCIQLKPDIIIIHEKGHQPTASTFHTEGNNLADKLATQGSYVVNAGKRTADGSEFEKRTADGSEFESPKKKAKVE

SEQ ID NO: 6650 - protein, 2089 aa, synthetic construct
MPAAKRVKLDGGDKKYSIGLDIGTNSVGWAVITDEYKVPSKKFKVLGNTDRHSIKKNLIGALLFDSGETAEATRLKRTARRRYTRRKNRICYLQEIFSNEMAKVDDSFFHRLEESFLVEEDKKHERHPIFGNIVDEVAYHEKYPTIYHLRKKLVDSTDKADLRLIYLALAHMIKFRGHFLIEGDLNPDNSDVDKLFIQLVQTYNQLFEENPINASGVDAKAILSARLSKSRRLENLIAQLPGEKKNGLFGNLIALSLGLTPNFKSNFDLAEDAKLQLSKDTYDDDLDNLLAQIGDQYADLFLAAKNLSDAILLSDILRVNTEITKAPLSASMIKRYDEHHQDLTLLKALVRQQLPEKYKEIFFDQSKNGYAGYIDGGASQEEFYKFIKPILEKMDGTEELLVKLNREDLLRKQRTFDNGSIPHQIHLGELHAILRRQEDFYPFLKDNREKIEKILTFRIPYYVGPLARGNSRFAWMTRKSEETITPWNFEEVVDKGASAQSFIERMTNFDKNLPNEKVLPKHSLLYEYFTVYNELTKVKYVTEGMRKPAFLSGEQKKAIVDLLFKTNRKVTVKQLKEDYFKKIECFDSVEISGVEDRFNASLGTYHDLLKIIKDKDFLDNEENEDILEDIVLTLTLFEDREMIEERLKTYAHLFDDKVMKQLKRRRYTGWGRLSRKLINGIRDKQSGKTILDFLKSDGFANRNFMQLIHDDSLTFKEDIQKAQVSGQGDSLHEHIANLAGSPAIKKGILQTVKVVDELVKVMGRHKPENIVIEMARENQTTQKGQKNSRERMKRIEEGIKELGSQILKEHPVENTQLQNEKLYLYYLQNGRDMYVDQELDINRLSDYDVDHIVPQSFLKDDSIDNKVLTRSDKARGKSDNVPSEEVVKKMKNYWRQLLNAKLITQRKFDNLTKAERGGLSELDKAGFIKRQLVETRQITKHVAQILDSRMNTKYDENDKLIREVKVITLKSKLVSDFRKDFQFYKVREINNYHHAHDAYLNAVVGTALIKKYPKLESEFVYGDYKVYDVRKMIAKSEQEIGKATAKYFFYSNIMNFFKTEITLANGEIRKRPLIETNGETGEIVWDKGRDFATVRKVLSMPQVNIVKKTEVQTGGFSKESILPKRNSDKLIARKKDWDPKKYGGFDSPTVAYSVLVVAKVEKGKSKKLKSVKELLGITIMERSSFEKNPIDFLEAKGYKEVKKDLIIKLPKYSLFELENGRKRMLASAGELQKGNELALPSKYVNFLYLASHYEKLKGSPEDNEQKQLFVEQHKHYLDEIIEQISEFSKRVILADANLDKVLSAYNKHRDKPIREQAENIIHLFTLTNLGAPAAFKYFDTTIDRKRYTSTKEVLDATLIHQSITGLYETRIDLSQLGGDGGGGSPAPGGVLNLEEEYRLHEKPVPSSIDPSWLQLFPTVWAERAGMGLANQVPPVVVELRSGASPVAVRQYPMSKEAREGIRPHIQRFLDLGVLVPCQSPWNTPLLPVKKPGTNDYRPVQDLREINKRVQDIHPTVPNPYNLLSSLPPSHTWYSVLDLKDAFFCLKLHPNSQPLFAFEWRDPEKGNTGQLTWTRLPQGFKNSPTLFNEALHRDLAPFRALNPQVVLLQYVDDLLVAAPTYRDCKEGTQKLLQELSKLGYRVSAKKAQLCQKEVTYLGYLLKEGKRWLTPARKATVMKIPPPTTPRQVREFLGKAGFCRLFIPGFASLAAPLYPLTKPSIPFIWTEEHQKAFDRIKEALLSAPALALPDLTKPFTLYVDERAGVARGVLTQTLGPWRRPVAYLSKKLDPVASGWPTCLKAVAAVALLLKDADKLTLGQNVTVIASHSLESIVRQPPDRWMTNARMTHYQSLLLNERVSFAPPAVLNPATLLPVESEATPVHRCSEILAEETGTRRDLKDQPLPGVPAWYTDGSSFIAEGKRRAGAAIVDGKRTVWASSLPEGTSAQKAELVALTQALRLAEGKDINIYTDSRYAFATAHIHGAIYKQRGWLTSAGKDIKNKEEILALLEAIHLPKRVAIIHCPGHQKGNDPVATGNRRADEAAKQAALSTRVLAETTKPAGKRTADGSEFEKRTADGSEFESPKKKAKVE

SEQ ID NO: 6651 - protein, 2093 aa, synthetic construct
MPAAKRVKLDGGDKKYSIGLDIGTNSVGWAVITDEYKVPSKKFKVLGNTDRHSIKKNLIGALLFDSGETAEATRLKRTARRRYTRRKNRICYLQEIFSNEMAKVDDSFFHRLEESFLVEEDKKHERHPIFGNIVDEVAYHEKYPTIYHLRKKLVDSTDKADLRLIYLALAHMIKFRGHFLIEGDLNPDNSDVDKLFIQLVQTYNQLFEENPINASGVDAKAILSARLSKSRRLENLIAQLPGEKKNGLFGNLIALSLGLTPNFKSNFDLAEDAKLQLSKDTYDDDLDNLLAQIGDQYADLFLAAKNLSDAILLSDILRVNTEITKAPLSASMIKRYDEHHQDLTLLKALVRQQLPEKYKEIFFDQSKNGYAGYIDGGASQEEFYKFIKPILEKMDGTEELLVKLNREDLLRKQRTFDNGSIPHQIHLGELHAILRRQEDFYPFLKDNREKIEKILTFRIPYYVGPLARGNSRFAWMTRKSEETITPWNFEEVVDKGASAQSFIERMTNFDKNLPNEKVLPKHSLLYEYFTVYNELTKVKYVTEGMRKPAFLSGEQKKAIVDLLFKTNRKVTVKQLKEDYFKKIECFDSVEISGVEDRFNASLGTYHDLLKIIKDKDFLDNEENEDILEDIVLTLTLFEDREMIEERLKTYAHLFDDKVMKQLKRRRYTGWGRLSRKLINGIRDKQSGKTILDFLKSDGFANRNFMQLIHDDSLTFKEDIQKAQVSGQGDSLHEHIANLAGSPAIKKGILQTVKVVDELVKVMGRHKPENIVIEMARENQTTQKGQKNSRERMKRIEEGIKELGSQILKEHPVENTQLQNEKLYLYYLQNGRDMYVDQELDINRLSDYDVDHIVPQSFLKDDSIDNKVLTRSDKARGKSDNVPSEEVVKKMKNYWRQLLNAKLITQRKFDNLTKAERGGLSELDKAGFIKRQLVETRQITKHVAQILDSRMNTKYDENDKLIREVKVITLKSKLVSDFRKDFQFYKVREINNYHHAHDAYLNAVVGTALIKKYPKLESEFVYGDYKVYDVRKMIAKSEQEIGKATAKYFFYSNIMNFFKTEITLANGEIRKRPLIETNGETGEIVWDKGRDFATVRKVLSMPQVNIVKKTEVQTGGFSKESILPKRNSDKLIARKKDWDPKKYGGFDSPTVAYSVLVVAKVEKGKSKKLKSVKELLGITIMERSSFEKNPIDFLEAKGYKEVKKDLIIKLPKYSLFELENGRKRMLASAGELQKGNELALPSKYVNFLYLASHYEKLKGSPEDNEQKQLFVEQHKHYLDEIIEQISEFSKRVILADANLDKVLSAYNKHRDKPIREQAENIIHLFTLTNLGAPAAFKYFDTTIDRKRYTSTKEVLDATLIHQSITGLYETRIDLSQLGGDGGPAPGGSGGTAPLEEEYRLFLEAPIQNVTLLEQWKREIPKVWAEINPPGLASTQAPIHVQLLSTALPVRVRQYPITLEAKRSLRETIRKFRAAGILRPVHSPWNTPLLPVRKSGTSEYRMVQDLREVNKRVETIHPTVPNPYTLLSLLPPDRIWYSVLDLKDAFFCIPLAPESQLIFAFEWADAEEGESGQLTWTRLPQGFKNSPTLFNEALNRDLQGFRLDHPSVSLLQYVDDLLIAADTQAACLSATRDLLMTLAELGYRVSGKKAQLCQEEVTYLGFKIHKGSRSLSNSRTQAILQIPVPKTKRQVREFLGTIGYCRLWIPGFAELAQPLYAATRPGNDPLVWGEKEEEAFQSLKLALTQPPALALPSLDKPFQLFVEETSGAAKGVLTQALGPWKRPVAYLSKRLDPVAAGWPRCLRAIAAAALLTREASKLTFGQDIEITSSHNLESLLRSPPDKWLTNARITQYQVLLLDPPRVRFKQTAALNPATLLPETDDTLPIHHCLDTLDSLTSTRPDLTDQPLAQAEATLFTDGSSYIRDGKRYAGAAVVTLDSVIWAEPLPIGTSAQKAELIALTKALEWSKDKSVNIYTDSRYAFATLHVHGMIYRERGWLTAGGKAIKNAPEILALLTAVWLPKRVAVMHCKGHQKDDAPTSTGNRRADEVAREVAIRPLSTQATISAGKRTADGSEFEKRTADGSEFESPKKKAKVE

SEQ ID NO: 6652 - protein, 2093 aa, synthetic construct
MPAAKRVKLDGGDKKYSIGLDIGTNSVGWAVITDEYKVPSKKFKVLGNTDRHSIKKNLIGALLFDSGETAEATRLKRTARRRYTRRKNRICYLQEIFSNEMAKVDDSFFHRLEESFLVEEDKKHERHPIFGNIVDEVAYHEKYPTIYHLRKKLVDSTDKADLRLIYLALAHMIKFRGHFLIEGDLNPDNSDVDKLFIQLVQTYNQLFEENPINASGVDAKAILSARLSKSRRLENLIAQLPGEKKNGLFGNLIALSLGLTPNFKSNFDLAEDAKLQLSKDTYDDDLDNLLAQIGDQYADLFLAAKNLSDAILLSDILRVNTEITKAPLSASMIKRYDEHHQDLTLLKALVRQQLPEKYKEIFFDQSKNGYAGYIDGGASQEEFYKFIKPILEKMDGTEELLVKLNREDLLRKQRTFDNGSIPHQIHLGELHAILRRQEDFYPFLKDNREKIEKILTFRIPYYVGPLARGNSRFAWMTRKSEETITPWNFEEVVDKGASAQSFIERMTNFDKNLPNEKVLPKHSLLYEYFTVYNELTKVKYVTEGMRKPAFLSGEQKKAIVDLLFKTNRKVTVKQLKEDYFKKIECFDSVEISGVEDRFNASLGTYHDLLKIIKDKDFLDNEENEDILEDIVLTLTLFEDREMIEERLKTYAHLFDDKVMKQLKRRRYTGWGRLSRKLINGIRDKQSGKTILDFLKSDGFANRNFMQLIHDDSLTFKEDIQKAQVSGQGDSLHEHIANLAGSPAIKKGILQTVKVVDELVKVMGRHKPENIVIEMARENQTTQKGQKNSRERMKRIEEGIKELGSQILKEHPVENTQLQNEKLYLYYLQNGRDMYVDQELDINRLSDYDVDHIVPQSFLKDDSIDNKVLTRSDKARGKSDNVPSEEVVKKMKNYWRQLLNAKLITQRKFDNLTKAERGGLSELDKAGFIKRQLVETRQITKHVAQILDSRMNTKYDENDKLIREVKVITLKSKLVSDFRKDFQFYKVREINNYHHAHDAYLNAVVGTALIKKYPKLESEFVYGDYKVYDVRKMIAKSEQEIGKATAKYFFYSNIMNFFKTEITLANGEIRKRPLIETNGETGEIVWDKGRDFATVRKVLSMPQVNIVKKTEVQTGGFSKESILPKRNSDKLIARKKDWDPKKYGGFDSPTVAYSVLVVAKVEKGKSKKLKSVKELLGITIMERSSFEKNPIDFLEAKGYKEVKKDLIIKLPKYSLFELENGRKRMLASAGELQKGNELALPSKYVNFLYLASHYEKLKGSPEDNEQKQLFVEQHKHYLDEIIEQISEFSKRVILADANLDKVLSAYNKHRDKPIREQAENIIHLFTLTNLGAPAAFKYFDTTIDRKRYTSTKEVLDATLIHQSITGLYETRIDLSQLGGDGGPAPGGSGGTAPLEEEYRLFLEAPIQNVTLLEQWKREIPKVWAEINPPGLASTQAPIHVQLLSTALPVRVRQYPITLEAKRSLRETIRKFRAAGILRPVHSPWNTPLLPVRKSGTSEYRMVQDLREVNKRVETIHPTVPNPYTLLSLLPPDRIWYSVLDLKDAFFCIPLAPESQLIFAFEWADAEEGESGQLTWTRLPQGFKNSPTLFNEALNRDLQGFRLDHPSVSLLQYVDDLLIAADTQAACLSATRDLLMTLAELGYRVSGKKAQLCQEEVTYLGFKIHKGSRSLSNSRTQAILQIPVPKTKRQVREFLGKIGYCRLFIPGFAELAQPLYAATRPGNDPLVWGEKEEEAFQSLKLALTQPPALALPSLDKPFQLFVEETSGAAKGVLTQALGPWKRPVAYLSKRLDPVAAGWPRCLRAIAAAALLTREASKLTFGQDIEITSSHNLESLLRSPPDKWLTNARITQYQVLLLDPPRVRFKQTAALNPATLLPETDDTLPIHHCLDTLDSLTSTRPDLTDQPLAQAEATLFTDGSSYIRDGKRYAGAAVVTLDSVIWAEPLPIGTSAQKAELIALTKALEWSKDKSVNIYTDSRYAFATLHVHGMIYRERGWLTAGGKAIKNAPEILALLTAVWLPKRVAVMHCKGHQKDDAPTSTGNRRADEVAREVAIRPLSTQATISAGKRTADGSEFEKRTADGSEFESPKKKAKVE

SEQ ID NO: 6653 - protein, 2089 aa, synthetic construct
MPAAKRVKLDGGDKKYSIGLDIGTNSVGWAVITDEYKVPSKKFKVLGNTDRHSIKKNLIGALLFDSGETAEATRLKRTARRRYTRRKNRICYLQEIFSNEMAKVDDSFFHRLEESFLVEEDKKHERHPIFGNIVDEVAYHEKYPTIYHLRKKLVDSTDKADLRLIYLALAHMIKFRGHFLIEGDLNPDNSDVDKLFIQLVQTYNQLFEENPINASGVDAKAILSARLSKSRRLENLIAQLPGEKKNGLFGNLIALSLGLTPNFKSNFDLAEDAKLQLSKDTYDDDLDNLLAQIGDQYADLFLAAKNLSDAILLSDILRVNTEITKAPLSASMIKRYDEHHQDLTLLKALVRQQLPEKYKEIFFDQSKNGYAGYIDGGASQEEFYKFIKPILEKMDGTEELLVKLNREDLLRKQRTFDNGSIPHQIHLGELHAILRRQEDFYPFLKDNREKIEKILTFRIPYYVGPLARGNSRFAWMTRKSEETITPWNFEEVVDKGASAQSFIERMTNFDKNLPNEKVLPKHSLLYEYFTVYNELTKVKYVTEGMRKPAFLSGEQKKAIVDLLFKTNRKVTVKQLKEDYFKKIECFDSVEISGVEDRFNASLGTYHDLLKIIKDKDFLDNEENEDILEDIVLTLTLFEDREMIEERLKTYAHLFDDKVMKQLKRRRYTGWGRLSRKLINGIRDKQSGKTILDFLKSDGFANRNFMQLIHDDSLTFKEDIQKAQVSGQGDSLHEHIANLAGSPAIKKGILQTVKVVDELVKVMGRHKPENIVIEMARENQTTQKGQKNSRERMKRIEEGIKELGSQILKEHPVENTQLQNEKLYLYYLQNGRDMYVDQELDINRLSDYDVDHIVPQSFLKDDSIDNKVLTRSDKARGKSDNVPSEEVVKKMKNYWRQLLNAKLITQRKFDNLTKAERGGLSELDKAGFIKRQLVETRQITKHVAQILDSRMNTKYDENDKLIREVKVITLKSKLVSDFRKDFQFYKVREINNYHHAHDAYLNAVVGTALIKKYPKLESEFVYGDYKVYDVRKMIAKSEQEIGKATAKYFFYSNIMNFFKTEITLANGEIRKRPLIETNGETGEIVWDKGRDFATVRKVLSMPQVNIVKKTEVQTGGFSKESILPKRNSDKLIARKKDWDPKKYGGFDSPTVAYSVLVVAKVEKGKSKKLKSVKELLGITIMERSSFEKNPIDFLEAKGYKEVKKDLIIKLPKYSLFELENGRKRMLASAGELQKGNELALPSKYVNFLYLASHYEKLKGSPEDNEQKQLFVEQHKHYLDEIIEQISEFSKRVILADANLDKVLSAYNKHRDKPIREQAENIIHLFTLTNLGAPAAFKYFDTTIDRKRYTSTKEVLDATLIHQSITGLYETRIDLSQLGGDGGPAPGGSGGVLNLEEEYRLHEKPVPSSIDPSWLQLFPTVWAERAGMGLANQVPPVVVELRSGASPVAVRQYPMSKEAREGIRPHIQKFLDLGVLVPCRSPWNTPLLPVKKPGTNDYRPVQDLREINKRVQDIHPTVPNPYNLLSSLPPSYTWYSVLDLKDAFFCLRLHPNSQPLFAFEWKDPEKGNTGQLTWTRLPQGFKNSPTLFDEALHRDLAPFRALNPQVVLLQYVDDLLVAAPTYEDCKKGTQKLLQELSKLGYRVSAKKAQLCQREVTYLGYLLKEGKRWLTPARKATVMKIPVPTTPRQVREFLGTAGFCRLWIPGFASLAAPLYPLTKESIPFIWTEEHQQAFDHIKKALLSAPALALPDLTKPFTLYIDERAGVARGVLTQTLGPWRRPVAYLSKKLDPVASGWPTCLKAVAAVALLLKDADKLTLGQNVTVIASHSLESIVRQPPDRWMTNARMTHYQSLLLNERVSFAPPAVLNPATLLPVESEATPVHRCSEILAEETGTRRDLEDQPLPGVPTWYTDGSSFITEGKRRAGAPIVDGKRTVWASSLPEGTSAQKAELVALTQALRLAEGKNINIYTDSRYAFATAHIHGAIYKQRGLLTSAGKDIKNKEEILALLEAIHLPRRVAIIHCPGHQRGSNPVATGNRRADEAAKQAALSTRVLAGTTKPAGKRTADGSEFEKRTADGSEFESPKKKAKVE

SEQ ID NO: 6654 - protein, 2213 aa, synthetic construct
MPAAKRVKLDGGDKKYSIGLDIGTNSVGWAVITDEYKVPSKKFKVLGNTDRHSIKKNLIGALLFDSGETAEATRLKRTARRRYTRRKNRICYLQEIFSNEMAKVDDSFFHRLEESFLVEEDKKHERHPIFGNIVDEVAYHEKYPTIYHLRKKLVDSTDKADLRLIYLALAHMIKFRGHFLIEGDLNPDNSDVDKLFIQLVQTYNQLFEENPINASGVDAKAILSARLSKSRRLENLIAQLPGEKKNGLFGNLIALSLGLTPNFKSNFDLAEDAKLQLSKDTYDDDLDNLLAQIGDQYADLFLAAKNLSDAILLSDILRVNTEITKAPLSASMIKRYDEHHQDLTLLKALVRQQLPEKYKEIFFDQSKNGYAGYIDGGASQEEFYKFIKPILEKMDGTEELLVKLNREDLLRKQRTFDNGSIPHQIHLGELHAILRRQEDFYPFLKDNREKIEKILTFRIPYYVGPLARGNSRFAWMTRKSEETITPWNFEEVVDKGASAQSFIERMTNFDKNLPNEKVLPKHSLLYEYFTVYNELTKVKYVTEGMRKPAFLSGEQKKAIVDLLFKTNRKVTVKQLKEDYFKKIECFDSVEISGVEDRFNASLGTYHDLLKIIKDKDFLDNEENEDILEDIVLTLTLFEDREMIEERLKTYAHLFDDKVMKQLKRRRYTGWGRLSRKLINGIRDKQSGKTILDFLKSDGFANRNFMQLIHDDSLTFKEDIQKAQVSGQGDSLHEHIANLAGSPAIKKGILQTVKVVDELVKVMGRHKPENIVIEMARENQTTQKGQKNSRERMKRIEEGIKELGSQILKEHPVENTQLQNEKLYLYYLQNGRDMYVDQELDINRLSDYDVDHIVPQSFLKDDSIDNKVLTRSDKARGKSDNVPSEEVVKKMKNYWRQLLNAKLITQRKFDNLTKAERGGLSELDKAGFIKRQLVETRQITKHVAQILDSRMNTKYDENDKLIREVKVITLKSKLVSDFRKDFQFYKVREINNYHHAHDAYLNAVVGTALIKKYPKLESEFVYGDYKVYDVRKMIAKSEQEIGKATAKYFFYSNIMNFFKTEITLANGEIRKRPLIETNGETGEIVWDKGRDFATVRKVLSMPQVNIVKKTEVQTGGFSKESILPKRNSDKLIARKKDWDPKKYGGFDSPTVAYSVLVVAKVEKGKSKKLKSVKELLGITIMERSSFEKNPIDFLEAKGYKEVKKDLIIKLPKYSLFELENGRKRMLASAGELQKGNELALPSKYVNFLYLASHYEKLKGSPEDNEQKQLFVEQHKHYLDEIIEQISEFSKRVILADANLDKVLSAYNKHRDKPIREQAENIIHLFTLTNLGAPAAFKYFDTTIDRKRYTSTKEVLDATLIHQSITGLYETRIDLSQLGGDGGPAPGGSGGTLGDQGSRGSDPLPEPRVTLTVEGIPTEFLVNTGAEHSVLTKPMGKMGSKRTVVAGATGSKVYPWTTKRLLKIGQKQVTHSFLVIPECPAPLLGRDLLTKLKAQIQFSTEGPQVTWEDRPAMCLVLNLEEEYRLHEKPVPPSIDPSWLQLFPMVWAEKAGMGLANQVPPVVVELKSDASPVAVRQYPMSKEAREGIRPHIQRFLDLGILVPCQSPWNTPLLPVKKPGTNDYRPVQDLREVNKRVQDIHPTVPNPYNLLSSLPPSHTWYSVLDLKDAFFCLKLHPNSQPLFAFEWRDPEKGNTGQLTWTRLPQGFKNSPTLFNEALHRDLASFRALNPQVVMLQYVDDLLVAAPTYRDCKEGTRRLLQELSKLGYRVSAKKAQLCREEVTYLGYLLKGGKRWLTPARKATVMKIPTPTTPRQVREFLGTAGFCRLWIPGFASLAAPLYPLTRPKVPFTWTEAHQEAFGRIKEALLSAPALALPDLTKPFALYVDEKEGVARGVLTQTLGPWRRPVAYLSKKLDPVASGWPTCLKAIAAVALLLKDADKLTLGQNVLVIAPHNLESIVRQPPDRWMTNARMTHYQSLLLNERVSFAPPAILNPATLLPVESDDTPIHICSEILAEETGTRPDLRDQPLPGVPAWYTDGSSFIMDGRRQAGAAIVDNKRTVWASNLPEGTSAQKAELIALTQALRLAEGKSINIYTDSRYAFATAHVHGAIYKQRGWLTSAGKDIKNKEEILALLEAIHLPKRVAIIHCPGHQRGTDPVATGNRKADEAAKQAAQSTRILTETTKNAGKRTADGSEFEKRTADGSEFESPKKKAKVE

SEQ ID NO: 6655 - protein, 2091 aa, synthetic construct
MPAAKRVKLDGGDKKYSIGLDIGTNSVGWAVITDEYKVPSKKFKVLGNTDRHSIKKNLIGALLFDSGETAEATRLKRTARRRYTRRKNRICYLQEIFSNEMAKVDDSFFHRLEESFLVEEDKKHERHPIFGNIVDEVAYHEKYPTIYHLRKKLVDSTDKADLRLIYLALAHMIKFRGHFLIEGDLNPDNSDVDKLFIQLVQTYNQLFEENPINASGVDAKAILSARLSKSRRLENLIAQLPGEKKNGLFGNLIALSLGLTPNFKSNFDLAEDAKLQLSKDTYDDDLDNLLAQIGDQYADLFLAAKNLSDAILLSDILRVNTEITKAPLSASMIKRYDEHHQDLTLLKALVRQQLPEKYKEIFFDQSKNGYAGYIDGGASQEEFYKFIKPILEKMDGTEELLVKLNREDLLRKQRTFDNGSIPHQIHLGELHAILRRQEDFYPFLKDNREKIEKILTFRIPYYVGPLARGNSRFAWMTRKSEETITPWNFEEVVDKGASAQSFIERMTNFDKNLPNEKVLPKHSLLYEYFTVYNELTKVKYVTEGMRKPAFLSGEQKKAIVDLLFKTNRKVTVKQLKEDYFKKIECFDSVEISGVEDRFNASLGTYHDLLKIIKDKDFLDNEENEDILEDIVLTLTLFEDREMIEERLKTYAHLFDDKVMKQLKRRRYTGWGRLSRKLINGIRDKQSGKTILDFLKSDGFANRNFMQLIHDDSLTFKEDIQKAQVSGQGDSLHEHIANLAGSPAIKKGILQTVKVVDELVKVMGRHKPENIVIEMARENQTTQKGQKNSRERMKRIEEGIKELGSQILKEHPVENTQLQNEKLYLYYLQNGRDMYVDQELDINRLSDYDVDHIVPQSFLKDDSIDNKVLTRSDKARGKSDNVPSEEVVKKMKNYWRQLLNAKLITQRKFDNLTKAERGGLSELDKAGFIKRQLVETRQITKHVAQILDSRMNTKYDENDKLIREVKVITLKSKLVSDFRKDFQFYKVREINNYHHAHDAYLNAVVGTALIKKYPKLESEFVYGDYKVYDVRKMIAKSEQEIGKATAKYFFYSNIMNFFKTEITLANGEIRKRPLIETNGETGEIVWDKGRDFATVRKVLSMPQVNIVKKTEVQTGGFSKESILPKRNSDKLIARKKDWDPKKYGGFDSPTVAYSVLVVAKVEKGKSKKLKSVKELLGITIMERSSFEKNPIDFLEAKGYKEVKKDLIIKLPKYSLFELENGRKRMLASAGELQKGNELALPSKYVNFLYLASHYEKLKGSPEDNEQKQLFVEQHKHYLDEIIEQISEFSKRVILADANLDKVLSAYNKHRDKPIREQAENIIHLFTLTNLGAPAAFKYFDTTIDRKRYTSTKEVLDATLIHQSITGLYETRIDLSQLGGDGGPAPGGSGGTLNLEDEYRLYETSAEPEVSPGSTWLSDFPQAWAETGGMGLAVRQAPLIIPLKATSTPVSIKQYPMSQEAKLGIKPHIQRLLDQGILVPCQSPWNTPLLPVKKPGTNDYRPVQDLREVNKRVEDIHPTVPNPYNLLSGLPPSHRWYTVLDLKDAFFCLRLHPTSQPLFAFEWRDPGMGISGQLTWTRLPQGFKNSPTLFNEALHRDLADFRIQHPDLILLQYVDDILLAATSELDCQQGTRALLLTLGNLGYRASAKKAQLCQKQVKYLGYLLKEGQRWLTEARKETVMGQPTPKTPRQLREFLGKAGFCRLFIPGFAEMAAPLYPLTKPGTLFNWGPDQQKAYQEIKQALLTAPALGLPDLTKPFELFVDEKQGYAKGVLTQKLGPWRRPVAYLSKKLDPVAAGWPPCLRMVAAIAVLRKDAGKLTMGQPLVILAPHAVEALVKQPPDRWLSNARMTHYQAMLLDTDRVQFGPVVALNPATLLPLPEEGAPHDCLEILAETHGTRPDLTDQPIPDADHTWYTDGSSFLQEGQRKAGAAVTTETEVIWARALPAGTSAQRAELIALTQALKMAEGKRLNVYTDSRYAFATAHIHGEIYRRRGWLTSEGREIKNKSEILALLKALFLPKRLSIIHCLGHQKGDSAEARGNRLADQAAREAAIKTPPDTSTLLAGKRTADGSEFEKRTADGSEFESPKKKAKVE

SEQ ID NO: 6656 - protein, 2082 aa, synthetic construct
MPAAKRVKLDGGDKKYSIGLDIGTNSVGWAVITDEYKVPSKKFKVLGNTDRHSIKKNLIGALLFDSGETAEATRLKRTARRRYTRRKNRICYLQEIFSNEMAKVDDSFFHRLEESFLVEEDKKHERHPIFGNIVDEVAYHEKYPTIYHLRKKLVDSTDKADLRLIYLALAHMIKFRGHFLIEGDLNPDNSDVDKLFIQLVQTYNQLFEENPINASGVDAKAILSARLSKSRRLENLIAQLPGEKKNGLFGNLIALSLGLTPNFKSNFDLAEDAKLQLSKDTYDDDLDNLLAQIGDQYADLFLAAKNLSDAILLSDILRVNTEITKAPLSASMIKRYDEHHQDLTLLKALVRQQLPEKYKEIFFDQSKNGYAGYIDGGASQEEFYKFIKPILEKMDGTEELLVKLNREDLLRKQRTFDNGSIPHQIHLGELHAILRRQEDFYPFLKDNREKIEKILTFRIPYYVGPLARGNSRFAWMTRKSEETITPWNFEEVVDKGASAQSFIERMTNFDKNLPNEKVLPKHSLLYEYFTVYNELTKVKYVTEGMRKPAFLSGEQKKAIVDLLFKTNRKVTVKQLKEDYFKKIECFDSVEISGVEDRFNASLGTYHDLLKIIKDKDFLDNEENEDILEDIVLTLTLFEDREMIEERLKTYAHLFDDKVMKQLKRRRYTGWGRLSRKLINGIRDKQSGKTILDFLKSDGFANRNFMQLIHDDSLTFKEDIQKAQVSGQGDSLHEHIANLAGSPAIKKGILQTVKVVDELVKVMGRHKPENIVIEMARENQTTQKGQKNSRERMKRIEEGIKELGSQILKEHPVENTQLQNEKLYLYYLQNGRDMYVDQELDINRLSDYDVDHIVPQSFLKDDSIDNKVLTRSDKARGKSDNVPSEEVVKKMKNYWRQLLNAKLITQRKFDNLTKAERGGLSELDKAGFIKRQLVETRQITKHVAQILDSRMNTKYDENDKLIREVKVITLKSKLVSDFRKDFQFYKVREINNYHHAHDAYLNAVVGTALIKKYPKLESEFVYGDYKVYDVRKMIAKSEQEIGKATAKYFFYSNIMNFFKTEITLANGEIRKRPLIETNGETGEIVWDKGRDFATVRKVLSMPQVNIVKKTEVQTGGFSKESILPKRNSDKLIARKKDWDPKKYGGFDSPTVAYSVLVVAKVEKGKSKKLKSVKELLGITIMERSSFEKNPIDFLEAKGYKEVKKDLIIKLPKYSLFELENGRKRMLASAGELQKGNELALPSKYVNFLYLASHYEKLKGSPEDNEQKQLFVEQHKHYLDEIIEQISEFSKRVILADANLDKVLSAYNKHRDKPIREQAENIIHLFTLTNLGAPAAFKYFDTTIDRKRYTSTKEVLDATLIHQSITGLYETRIDLSQLGGDGGPAPGGSGGIPWLMKKPLQLTTLVPLQEYEERLLKQTMLTGSYKEKLQSLFLKYDALWQHWENQVGHRRIKPHHIATGTVNPRPQKQYPINPKAKASIQTVINDLLKQGVLIQQNSIMNTPVYPVPKPDGKWRMVLDYREVNKTIPLIAAQNQHSAGILSSIFRGKYKTTLDLSNGFWAHSITPESYWLTAFTWLGQQYCWTRLPQGFLNSPALFNADVVDLLKEVPNVQVYVDDIYISHDDPREHLEQLEKVFSLLLNAGYVVSLKKSEIAQHEVEFLGFNITKEGRGLTETFKQKLLNITPPRDLKQLQSILGKLNFARNFIPNFSELVKPLYNIIATAPGKYITWTTDNSQQLQNIISMLNSAENLEERNPEVRLIMKVNTSPSAGYIRFYNEFAKRPIMYLNYVYTKAEVKFTNTEKLLTTIHKGLIKALDLGMGQEILVYSPIVSMTKIQKTPLPERKALPIRWITWMSYLEDPRIQFHYDKTLPELQQVPTVTDDIIAKIKHPSEFSMVFYTDGSAIKHPNVNKSHNAGMGIAQVQFKPEFTVINTWSIPLGDHTAQLAEVAAVEFACKKALKIDGPVLIVTDSFYVAESVNKELPYWQSNGFFNNKKKPLKHVSKWKSIADCIQLKPDIIIIHEKGHQPTASTFHTEGNNLADKLATQGSYVVNAGKRTADGSEFEKRTADGSEFESPKKKAKVE

SEQ ID NO: 6657 - protein, 2089 aa, synthetic construct
MPAAKRVKLDGGDKKYSIGLDIGTNSVGWAVITDEYKVPSKKFKVLGNTDRHSIKKNLIGALLFDSGETAEATRLKRTARRRYTRRKNRICYLQEIFSNEMAKVDDSFFHRLEESFLVEEDKKHERHPIFGNIVDEVAYHEKYPTIYHLRKKLVDSTDKADLRLIYLALAHMIKFRGHFLIEGDLNPDNSDVDKLFIQLVQTYNQLFEENPINASGVDAKAILSARLSKSRRLENLIAQLPGEKKNGLFGNLIALSLGLTPNFKSNFDLAEDAKLQLSKDTYDDDLDNLLAQIGDQYADLFLAAKNLSDAILLSDILRVNTEITKAPLSASMIKRYDEHHQDLTLLKALVRQQLPEKYKEIFFDQSKNGYAGYIDGGASQEEFYKFIKPILEKMDGTEELLVKLNREDLLRKQRTFDNGSIPHQIHLGELHAILRRQEDFYPFLKDNREKIEKILTFRIPYYVGPLARGNSRFAWMTRKSEETITPWNFEEVVDKGASAQSFIERMTNFDKNLPNEKVLPKHSLLYEYFTVYNELTKVKYVTEGMRKPAFLSGEQKKAIVDLLFKTNRKVTVKQLKEDYFKKIECFDSVEISGVEDRFNASLGTYHDLLKIIKDKDFLDNEENEDILEDIVLTLTLFEDREMIEERLKTYAHLFDDKVMKQLKRRRYTGWGRLSRKLINGIRDKQSGKTILDFLKSDGFANRNFMQLIHDDSLTFKEDIQKAQVSGQGDSLHEHIANLAGSPAIKKGILQTVKVVDELVKVMGRHKPENIVIEMARENQTTQKGQKNSRERMKRIEEGIKELGSQILKEHPVENTQLQNEKLYLYYLQNGRDMYVDQELDINRLSDYDVDHIVPQSFLKDDSIDNKVLTRSDKARGKSDNVPSEEVVKKMKNYWRQLLNAKLITQRKFDNLTKAERGGLSELDKAGFIKRQLVETRQITKHVAQILDSRMNTKYDENDKLIREVKVITLKSKLVSDFRKDFQFYKVREINNYHHAHDAYLNAVVGTALIKKYPKLESEFVYGDYKVYDVRKMIAKSEQEIGKATAKYFFYSNIMNFFKTEITLANGEIRKRPLIETNGETGEIVWDKGRDFATVRKVLSMPQVNIVKKTEVQTGGFSKESILPKRNSDKLIARKKDWDPKKYGGFDSPTVAYSVLVVAKVEKGKSKKLKSVKELLGITIMERSSFEKNPIDFLEAKGYKEVKKDLIIKLPKYSLFELENGRKRMLASAGELQKGNELALPSKYVNFLYLASHYEKLKGSPEDNEQKQLFVEQHKHYLDEIIEQISEFSKRVILADANLDKVLSAYNKHRDKPIREQAENIIHLFTLTNLGAPAAFKYFDTTIDRKRYTSTKEVLDATLIHQSITGLYETRIDLSQLGGDGGPAPGGSGGVLNLEEEYRLHEKPVPSSIDPSWLQLFPTVWAERAGMGLANQVPPVVVELRSGASPVAVRQYPMSKEAREGIRPHIQRFLDLGVLVPCQSPWNTPLLPVKKPGTNDYRPVQDLREINKRVQDIHPTVPNPYNLLSSLPPSHTWYSVLDLKDAFFCLKLHPNSQPLFAFEWRDPEKGNTGQLTWTRLPQGFKNSPTLFNEALHRDLAPFRALNPQVVLLQYVDDLLVAAPTYRDCKEGTQKLLQELSKLGYRVSAKKAQLCQKEVTYLGYLLKEGKRWLTPARKATVMKIPPPTTPRQVREFLGTAGFCRLWIPGFASLAAPLYPLTKPSIPFIWTEEHQKAFDRIKEALLSAPALALPDLTKPFTLYVDERAGVARGVLTQTLGPWRRPVAYLSKKLDPVASGWPTCLKAVAAVALLLKDADKLTLGQNVTVIASHSLESIVRQPPDRWMTNARMTHYQSLLLNERVSFAPPAVLNPATLLPVESEATPVHRCSEILAEETGTRRDLKDQPLPGVPAWYTDGSSFIAEGKRRAGAAIVDGKRTVWASSLPEGTSAQKAELVALTQALRLAEGKDINIYTDSRYAFATAHIHGAIYKQRGWLTSAGKDIKNKEEILALLEAIHLPKRVAIIHCPGHQKGNDPVATGNRRADEAAKQAALSTRVLAETTKPAGKRTADGSEFEKRTADGSEFESPKKKAKVE

SEQ ID NO: 6658 - protein, 2091 aa, synthetic construct
MPAAKRVKLDGGDKKYSIGLDIGTNSVGWAVITDEYKVPSKKFKVLGNTDRHSIKKNLIGALLFDSGETAEATRLKRTARRRYTRRKNRICYLQEIFSNEMAKVDDSFFHRLEESFLVEEDKKHERHPIFGNIVDEVAYHEKYPTIYHLRKKLVDSTDKADLRLIYLALAHMIKFRGHFLIEGDLNPDNSDVDKLFIQLVQTYNQLFEENPINASGVDAKAILSARLSKSRRLENLIAQLPGEKKNGLFGNLIALSLGLTPNFKSNFDLAEDAKLQLSKDTYDDDLDNLLAQIGDQYADLFLAAKNLSDAILLSDILRVNTEITKAPLSASMIKRYDEHHQDLTLLKALVRQQLPEKYKEIFFDQSKNGYAGYIDGGASQEEFYKFIKPILEKMDGTEELLVKLNREDLLRKQRTFDNGSIPHQIHLGELHAILRRQEDFYPFLKDNREKIEKILTFRIPYYVGPLARGNSRFAWMTRKSEETITPWNFEEVVDKGASAQSFIERMTNFDKNLPNEKVLPKHSLLYEYFTVYNELTKVKYVTEGMRKPAFLSGEQKKAIVDLLFKTNRKVTVKQLKEDYFKKIECFDSVEISGVEDRFNASLGTYHDLLKIIKDKDFLDNEENEDILEDIVLTLTLFEDREMIEERLKTYAHLFDDKVMKQLKRRRYTGWGRLSRKLINGIRDKQSGKTILDFLKSDGFANRNFMQLIHDDSLTFKEDIQKAQVSGQGDSLHEHIANLAGSPAIKKGILQTVKVVDELVKVMGRHKPENIVIEMARENQTTQKGQKNSRERMKRIEEGIKELGSQILKEHPVENTQLQNEKLYLYYLQNGRDMYVDQELDINRLSDYDVDHIVPQSFLKDDSIDNKVLTRSDKARGKSDNVPSEEVVKKMKNYWRQLLNAKLITQRKFDNLTKAERGGLSELDKAGFIKRQLVETRQITKHVAQILDSRMNTKYDENDKLIREVKVITLKSKLVSDFRKDFQFYKVREINNYHHAHDAYLNAVVGTALIKKYPKLESEFVYGDYKVYDVRKMIAKSEQEIGKATAKYFFYSNIMNFFKTEITLANGEIRKRPLIETNGETGEIVWDKGRDFATVRKVLSMPQVNIVKKTEVQTGGFSKESILPKRNSDKLIARKKDWDPKKYGGFDSPTVAYSVLVVAKVEKGKSKKLKSVKELLGITIMERSSFEKNPIDFLEAKGYKEVKKDLIIKLPKYSLFELENGRKRMLASAGELQKGNELALPSKYVNFLYLASHYEKLKGSPEDNEQKQLFVEQHKHYLDEIIEQISEFSKRVILADANLDKVLSAYNKHRDKPIREQAENIIHLFTLTNLGAPAAFKYFDTTIDRKRYTSTKEVLDATLIHQSITGLYETRIDLSQLGGDGGPAPGGSGGTLNIEDEYRLHETSKEPDVPLGSTWLSDFPQAWAETGGMGLAVRQAPLIIPLKATSTPVSIKQYPMSQEARLGIKPHIQRLLDQGILVPCQSPWNTPLLPVKKPGTNDYRPVQDLREVNKRVEDIHPTVPNPYNLLSGLPPSHQWYTVLDLKDAFFCLRLHPTSQPLFAFEWRDPEMGISGQLTWTRLPQGFKNSPTLFNEALHRDLADFRIQHPDLILLQYVDDLLLAATSEQDCQRGTRALLQTLGNLGYRASAKKAQICQKQVKYLGYLLKEGQRWLTEARKETVMGQPTPKTPRQLREFLGTAGFCRLWIPGFAEMAAPLYPLTKPGTLFNWGPDQQKAYQEIKQALLTAPALGLPDLTKPFELFVDEKQGYAKGVLTQKLGPWRRPVAYLSKKLDPVAAGWPPCLRMVAAIAVLTKDAGKLTMGQPLVILAPHAVEALVKQPPDRWLSNARMTHYQAMLLDTDRVQFGPVVALNPATLLPLPEKEAPHDCLEILAETHGTRPDLTDQPIPDADYTWYTDGSSFLQEGQRRAGAAVTTETEVIWARALPAGTSAQRAELIALTQALKMAEGKKLNVYTDSRYAFATAHVHGEIYRRRGWLTSEGREIKNKNEILALLKALFLPKRLSIIHCPGHQKGNSAEARGNRMADQAAREAAMKAVLETSTLLAGKRTADGSEFEKRTADGSEFESPKKKAKVE

SEQ ID NO: 6659 - protein, 2093 aa, synthetic construct
MPAAKRVKLDGGDKKYSIGLDIGTNSVGWAVITDEYKVPSKKFKVLGNTDRHSIKKNLIGALLFDSGETAEATRLKRTARRRYTRRKNRICYLQEIFSNEMAKVDDSFFHRLEESFLVEEDKKHERHPIFGNIVDEVAYHEKYPTIYHLRKKLVDSTDKADLRLIYLALAHMIKFRGHFLIEGDLNPDNSDVDKLFIQLVQTYNQLFEENPINASGVDAKAILSARLSKSRRLENLIAQLPGEKKNGLFGNLIALSLGLTPNFKSNFDLAEDAKLQLSKDTYDDDLDNLLAQIGDQYADLFLAAKNLSDAILLSDILRVNTEITKAPLSASMIKRYDEHHQDLTLLKALVRQQLPEKYKEIFFDQSKNGYAGYIDGGASQEEFYKFIKPILEKMDGTEELLVKLNREDLLRKQRTFDNGSIPHQIHLGELHAILRRQEDFYPFLKDNREKIEKILTFRIPYYVGPLARGNSRFAWMTRKSEETITPWNFEEVVDKGASAQSFIERMTNFDKNLPNEKVLPKHSLLYEYFTVYNELTKVKYVTEGMRKPAFLSGEQKKAIVDLLFKTNRKVTVKQLKEDYFKKIECFDSVEISGVEDRFNASLGTYHDLLKIIKDKDFLDNEENEDILEDIVLTLTLFEDREMIEERLKTYAHLFDDKVMKQLKRRRYTGWGRLSRKLINGIRDKQSGKTILDFLKSDGFANRNFMQLIHDDSLTFKEDIQKAQVSGQGDSLHEHIANLAGSPAIKKGILQTVKVVDELVKVMGRHKPENIVIEMARENQTTQKGQKNSRERMKRIEEGIKELGSQILKEHPVENTQLQNEKLYLYYLQNGRDMYVDQELDINRLSDYDVDHIVPQSFLKDDSIDNKVLTRSDKARGKSDNVPSEEVVKKMKNYWRQLLNAKLITQRKFDNLTKAERGGLSELDKAGFIKRQLVETRQITKHVAQILDSRMNTKYDENDKLIREVKVITLKSKLVSDFRKDFQFYKVREINNYHHAHDAYLNAVVGTALIKKYPKLESEFVYGDYKVYDVRKMIAKSEQEIGKATAKYFFYSNIMNFFKTEITLANGEIRKRPLIETNGETGEIVWDKGRDFATVRKVLSMPQVNIVKKTEVQTGGFSKESILPKRNSDKLIARKKDWDPKKYGGFDSPTVAYSVLVVAKVEKGKSKKLKSVKELLGITIMERSSFEKNPIDFLEAKGYKEVKKDLIIKLPKYSLFELENGRKRMLASAGELQKGNELALPSKYVNFLYLASHYEKLKGSPEDNEQKQLFVEQHKHYLDEIIEQISEFSKRVILADANLDKVLSAYNKHRDKPIREQAENIIHLFTLTNLGAPAAFKYFDTTIDRKRYTSTKEVLDATLIHQSITGLYETRIDLSQLGGDGGGGGGSSGGTAPLEEEYRLFLEAPIQNVTLLEQWKREIPKVWAEINPPGLASTQAPIHVQLLSTALPVRVRQYPITLEAKRSLRETIRKFRAAGILRPVHSPWNTPLLPVRKSGTSEYRMVQDLREVNKRVETIHPTVPNPYTLLSLLPPDRIWYSVLDLKDAFFCIPLAPESQLIFAFEWADAEEGESGQLTWTRLPQGFKNSPTLFNEALNRDLQGFRLDHPSVSLLQYVDDLLIAADTQAACLSATRDLLMTLAELGYRVSGKKAQLCQEEVTYLGFKIHKGSRSLSNSRTQAILQIPVPKTKRQVREFLGTIGYCRLWIPGFAELAQPLYAATRPGNDPLVWGEKEEEAFQSLKLALTQPPALALPSLDKPFQLFVEETSGAAKGVLTQALGPWKRPVAYLSKRLDPVAAGWPRCLRAIAAAALLTREASKLTFGQDIEITSSHNLESLLRSPPDKWLTNARITQYQVLLLDPPRVRFKQTAALNPATLLPETDDTLPIHHCLDTLDSLTSTRPDLTDQPLAQAEATLFTDGSSYIRDGKRYAGAAVVTLDSVIWAEPLPIGTSAQKAELIALTKALEWSKDKSVNIYTDSRYAFATLHVHGMIYRERGWLTAGGKAIKNAPEILALLTAVWLPKRVAVMHCKGHQKDDAPTSTGNRRADEVAREVAIRPLSTQATISAGKRTADGSEFEKRTADGSEFESPKKKAKVE

SEQ ID NO: 6660 - protein, 2082 aa, synthetic construct
MPAAKRVKLDGGDKKYSIGLDIGTNSVGWAVITDEYKVPSKKFKVLGNTDRHSIKKNLIGALLFDSGETAEATRLKRTARRRYTRRKNRICYLQEIFSNEMAKVDDSFFHRLEESFLVEEDKKHERHPIFGNIVDEVAYHEKYPTIYHLRKKLVDSTDKADLRLIYLALAHMIKFRGHFLIEGDLNPDNSDVDKLFIQLVQTYNQLFEENPINASGVDAKAILSARLSKSRRLENLIAQLPGEKKNGLFGNLIALSLGLTPNFKSNFDLAEDAKLQLSKDTYDDDLDNLLAQIGDQYADLFLAAKNLSDAILLSDILRVNTEITKAPLSASMIKRYDEHHQDLTLLKALVRQQLPEKYKEIFFDQSKNGYAGYIDGGASQEEFYKFIKPILEKMDGTEELLVKLNREDLLRKQRTFDNGSIPHQIHLGELHAILRRQEDFYPFLKDNREKIEKILTFRIPYYVGPLARGNSRFAWMTRKSEETITPWNFEEVVDKGASAQSFIERMTNFDKNLPNEKVLPKHSLLYEYFTVYNELTKVKYVTEGMRKPAFLSGEQKKAIVDLLFKTNRKVTVKQLKEDYFKKIECFDSVEISGVEDRFNASLGTYHDLLKIIKDKDFLDNEENEDILEDIVLTLTLFEDREMIEERLKTYAHLFDDKVMKQLKRRRYTGWGRLSRKLINGIRDKQSGKTILDFLKSDGFANRNFMQLIHDDSLTFKEDIQKAQVSGQGDSLHEHIANLAGSPAIKKGILQTVKVVDELVKVMGRHKPENIVIEMARENQTTQKGQKNSRERMKRIEEGIKELGSQILKEHPVENTQLQNEKLYLYYLQNGRDMYVDQELDINRLSDYDVDHIVPQSFLKDDSIDNKVLTRSDKARGKSDNVPSEEVVKKMKNYWRQLLNAKLITQRKFDNLTKAERGGLSELDKAGFIKRQLVETRQITKHVAQILDSRMNTKYDENDKLIREVKVITLKSKLVSDFRKDFQFYKVREINNYHHAHDAYLNAVVGTALIKKYPKLESEFVYGDYKVYDVRKMIAKSEQEIGKATAKYFFYSNIMNFFKTEITLANGEIRKRPLIETNGETGEIVWDKGRDFATVRKVLSMPQVNIVKKTEVQTGGFSKESILPKRNSDKLIARKKDWDPKKYGGFDSPTVAYSVLVVAKVEKGKSKKLKSVKELLGITIMERSSFEKNPIDFLEAKGYKEVKKDLIIKLPKYSLFELENGRKRMLASAGELQKGNELALPSKYVNFLYLASHYEKLKGSPEDNEQKQLFVEQHKHYLDEIIEQISEFSKRVILADANLDKVLSAYNKHRDKPIREQAENIIHLFTLTNLGAPAAFKYFDTTIDRKRYTSTKEVLDATLIHQSITGLYETRIDLSQLGGDGGGGGGSSGGVPWILKKPLELTIKLDLEEQQGTLLNNSILSKKGKEELKQLFEKYSALWQSWENQVGHRRIRPHKIATGTVKPTPQKQYHINPKAKPDIQIVINDLLKQGVLIQKESTMNTPVYPVPKPNGRWRMVLDYRAVNKVTPLIAVQNQHSYGILGSLFKGRYKTTIDLSNGFWAHPIVPEDYWITAFTWQGKQYCWTVLPQGFLNSPGLFTGDVVDLLQGIPNVEVYVDDVYISHDSEKEHLEYLDILFNRLKEAGYIISLKKSNIANSIVDFLGFQITNEGRGLTDTFKEKLENITAPTTLKQLQSILGLLNFARNFIPDFTELIAPLYALIPKSTKNYVPWQIEHSTTLETLITKLNGAEYLQGRKGDKTLIMKVNASYTTGYIRYYNEGEKKPISYVSIVFSKTELKFTELEKLLTTVHKGLLKALDLSMGQNIHVYSPIVSMQNIQKTPQTAKKALASRWLSWLSYLEDPRIRFFYDPQMPALKDLPAVDTGKDNKKHPSNFQHIFYTDGSAITSPTKEGHLNAGMGIVYFINKDGNLQKQQEWSISLGNHTAQFAEIAAFEFALKKCLPLGGNILVVTDSNYVAKAYNEELDVWASNGFVNNRKKPLKHISKWKSVADLKRLRPDVVVTHEPGHQKLDSSPHAYGNNLADQLATQASFKVHAGKRTADGSEFEKRTADGSEFESPKKKAKVE

SEQ ID NO: 6661 - protein, 2091 aa, synthetic construct
MPAAKRVKLDGGDKKYSIGLDIGTNSVGWAVITDEYKVPSKKFKVLGNTDRHSIKKNLIGALLFDSGETAEATRLKRTARRRYTRRKNRICYLQEIFSNEMAKVDDSFFHRLEESFLVEEDKKHERHPIFGNIVDEVAYHEKYPTIYHLRKKLVDSTDKADLRLIYLALAHMIKFRGHFLIEGDLNPDNSDVDKLFIQLVQTYNQLFEENPINASGVDAKAILSARLSKSRRLENLIAQLPGEKKNGLFGNLIALSLGLTPNFKSNFDLAEDAKLQLSKDTYDDDLDNLLAQIGDQYADLFLAAKNLSDAILLSDILRVNTEITKAPLSASMIKRYDEHHQDLTLLKALVRQQLPEKYKEIFFDQSKNGYAGYIDGGASQEEFYKFIKPILEKMDGTEELLVKLNREDLLRKQRTFDNGSIPHQIHLGELHAILRRQEDFYPFLKDNREKIEKILTFRIPYYVGPLARGNSRFAWMTRKSEETITPWNFEEVVDKGASAQSFIERMTNFDKNLPNEKVLPKHSLLYEYFTVYNELTKVKYVTEGMRKPAFLSGEQKKAIVDLLFKTNRKVTVKQLKEDYFKKIECFDSVEISGVEDRFNASLGTYHDLLKIIKDKDFLDNEENEDILEDIVLTLTLFEDREMIEERLKTYAHLFDDKVMKQLKRRRYTGWGRLSRKLINGIRDKQSGKTILDFLKSDGFANRNFMQLIHDDSLTFKEDIQKAQVSGQGDSLHEHIANLAGSPAIKKGILQTVKVVDELVKVMGRHKPENIVIEMARENQTTQKGQKNSRERMKRIEEGIKELGSQILKEHPVENTQLQNEKLYLYYLQNGRDMYVDQELDINRLSDYDVDHIVPQSFLKDDSIDNKVLTRSDKARGKSDNVPSEEVVKKMKNYWRQLLNAKLITQRKFDNLTKAERGGLSELDKAGFIKRQLVETRQITKHVAQILDSRMNTKYDENDKLIREVKVITLKSKLVSDFRKDFQFYKVREINNYHHAHDAYLNAVVGTALIKKYPKLESEFVYGDYKVYDVRKMIAKSEQEIGKATAKYFFYSNIMNFFKTEITLANGEIRKRPLIETNGETGEIVWDKGRDFATVRKVLSMPQVNIVKKTEVQTGGFSKESILPKRNSDKLIARKKDWDPKKYGGFDSPTVAYSVLVVAKVEKGKSKKLKSVKELLGITIMERSSFEKNPIDFLEAKGYKEVKKDLIIKLPKYSLFELENGRKRMLASAGELQKGNELALPSKYVNFLYLASHYEKLKGSPEDNEQKQLFVEQHKHYLDEIIEQISEFSKRVILADANLDKVLSAYNKHRDKPIREQAENIIHLFTLTNLGAPAAFKYFDTTIDRKRYTSTKEVLDATLIHQSITGLYETRIDLSQLGGDGGGGGGSSGGTLGIEDEYRLHETSTEPDVSLGSTWLSDFPQAWAETGGMGLAVRQAPLIIPLKATSTPVSIQQYPMSHEARLGIKPHIQRLLDQGILVPCQSPWNTPLLPVKKPGTNDYRPVQDLREVNKRVEDIHPTVPNPYNLLSGLPPSHQWYTVLDLKDAFFCLRLHPTSQPLFAFEWRDPGMGISGQLTWTRLPQGFKNSPTLFDEALHRDLADFRIQHPDLILLQYVDDILLAATSELDCQQGTRALLQTLGDLGYRASAKKAQICQKQVKYLGYLLREGQRWLTEARKETVMGQPVPKTPRQLREFLGTAGFCRLWIPGFAEMAAPLYPLTKTGTLFSWGPDQQKAYQEIKQALLTAPALGLPDLTKPFELFVDEKQGYAKGVLTQKLGPWRRPVAYLSKKLDPVAAGWPPCLRMVAAIAVLTKDAGKLTMGQPLVILAPHAVEALVKQPPDRWLSNARMTHYQAMLLDTDRVQFGPVVALNPATLLPLPEEGAPHDCLEILAETHGTRPDLTDQPIPDADHTWYTDGSSFLQEGQRKAGAAVTTETEVIWAGALPAGTSAQRAELIALTQALKMAEGKRLNVYTDSRYAFATAHIHGEIYRRRGLLTSEGREIKNKSEILALLKALFLPKRLSIIHCLGHQKGDSAEARGNRLADQAAREAAIKTPPDTSTLLAGKRTADGSEFEKRTADGSEFESPKKKAKVE

SEQ ID NO: 6662 - protein, 2091 aa, synthetic construct
MPAAKRVKLDGGDKKYSIGLDIGTNSVGWAVITDEYKVPSKKFKVLGNTDRHSIKKNLIGALLFDSGETAEATRLKRTARRRYTRRKNRICYLQEIFSNEMAKVDDSFFHRLEESFLVEEDKKHERHPIFGNIVDEVAYHEKYPTIYHLRKKLVDSTDKADLRLIYLALAHMIKFRGHFLIEGDLNPDNSDVDKLFIQLVQTYNQLFEENPINASGVDAKAILSARLSKSRRLENLIAQLPGEKKNGLFGNLIALSLGLTPNFKSNFDLAEDAKLQLSKDTYDDDLDNLLAQIGDQYADLFLAAKNLSDAILLSDILRVNTEITKAPLSASMIKRYDEHHQDLTLLKALVRQQLPEKYKEIFFDQSKNGYAGYIDGGASQEEFYKFIKPILEKMDGTEELLVKLNREDLLRKQRTFDNGSIPHQIHLGELHAILRRQEDFYPFLKDNREKIEKILTFRIPYYVGPLARGNSRFAWMTRKSEETITPWNFEEVVDKGASAQSFIERMTNFDKNLPNEKVLPKHSLLYEYFTVYNELTKVKYVTEGMRKPAFLSGEQKKAIVDLLFKTNRKVTVKQLKEDYFKKIECFDSVEISGVEDRFNASLGTYHDLLKIIKDKDFLDNEENEDILEDIVLTLTLFEDREMIEERLKTYAHLFDDKVMKQLKRRRYTGWGRLSRKLINGIRDKQSGKTILDFLKSDGFANRNFMQLIHDDSLTFKEDIQKAQVSGQGDSLHEHIANLAGSPAIKKGILQTVKVVDELVKVMGRHKPENIVIEMARENQTTQKGQKNSRERMKRIEEGIKELGSQILKEHPVENTQLQNEKLYLYYLQNGRDMYVDQELDINRLSDYDVDHIVPQSFLKDDSIDNKVLTRSDKARGKSDNVPSEEVVKKMKNYWRQLLNAKLITQRKFDNLTKAERGGLSELDKAGFIKRQLVETRQITKHVAQILDSRMNTKYDENDKLIREVKVITLKSKLVSDFRKDFQFYKVREINNYHHAHDAYLNAVVGTALIKKYPKLESEFVYGDYKVYDVRKMIAKSEQEIGKATAKYFFYSNIMNFFKTEITLANGEIRKRPLIETNGETGEIVWDKGRDFATVRKVLSMPQVNIVKKTEVQTGGFSKESILPKRNSDKLIARKKDWDPKKYGGFDSPTVAYSVLVVAKVEKGKSKKLKSVKELLGITIMERSSFEKNPIDFLEAKGYKEVKKDLIIKLPKYSLFELENGRKRMLASAGELQKGNELALPSKYVNFLYLASHYEKLKGSPEDNEQKQLFVEQHKHYLDEIIEQISEFSKRVILADANLDKVLSAYNKHRDKPIREQAENIIHLFTLTNLGAPAAFKYFDTTIDRKRYTSTKEVLDATLIHQSITGLYETRIDLSQLGGDGGGGGGSSGGTLNIEDEYRLHETSKEPDVSLGSTWLSDFPQAWAETGGMGLAVRQAPLIIPLKATSTPVSIKQYPMSQEARLGIKPHIQRLLDQGILVPCQSPWNTPLLPVKKPGTNDYRPVQDLREVNKRVEDIHPTVPNPYNLLSGLPPSHQWYTVLDLKDAFFCLRLHPTSQPLFAFEWRDPEMGISGQLTWTRLPQGFKNSPTLFNEALHRDLAGFRIQHPDLILLQYVDDLLLAATSELDCQQGTRALLQTLGDLGYRASAKKAQICQKQVKYLGYLLKEGQRWLTEARKETVMGQPIPKTPRQLREFLGTAGFCRLWIPGFAEMAAPLYPLTKPGTLFNWGPDQQKAFQEIKQALLTAPALGLPDLTKPFELFVDEKQGYAKGVLTQKLGPWRRPVAYLSKKLDPVAAGWPPCLRMVAAIAVLTKDAGKLTMGQPLVILAPHAVEALVKQPPDRWLSNARMTHYQALLLDTDRVQFGPVVALNPATLLPLPEEGLQHDCLDILAEAHGTRSDLMDQPLPDADHTWYTDGSSFLQEGQRKAGAAVTTETEVIWARALPAGTSAQRAELIALTQALKMAEGKKLNVYTDSRYAFATAHIHGEIYRRRGWLTSEGKEIKNKDEILALLKALFLPKRLSIIHCPGHQKGNSAEARGNRMADQAAREVATRETPETSTLLAGKRTADGSEFEKRTADGSEFESPKKKAKVE

SEQ ID NO: 6663 - protein, 2091 aa, synthetic construct
MPAAKRVKLDGGDKKYSIGLDIGTNSVGWAVITDEYKVPSKKFKVLGNTDRHSIKKNLIGALLFDSGETAEATRLKRTARRRYTRRKNRICYLQEIFSNEMAKVDDSFFHRLEESFLVEEDKKHERHPIFGNIVDEVAYHEKYPTIYHLRKKLVDSTDKADLRLIYLALAHMIKFRGHFLIEGDLNPDNSDVDKLFIQLVQTYNQLFEENPINASGVDAKAILSARLSKSRRLENLIAQLPGEKKNGLFGNLIALSLGLTPNFKSNFDLAEDAKLQLSKDTYDDDLDNLLAQIGDQYADLFLAAKNLSDAILLSDILRVNTEITKAPLSASMIKRYDEHHQDLTLLKALVRQQLPEKYKEIFFDQSKNGYAGYIDGGASQEEFYKFIKPILEKMDGTEELLVKLNREDLLRKQRTFDNGSIPHQIHLGELHAILRRQEDFYPFLKDNREKIEKILTFRIPYYVGPLARGNSRFAWMTRKSEETITPWNFEEVVDKGASAQSFIERMTNFDKNLPNEKVLPKHSLLYEYFTVYNELTKVKYVTEGMRKPAFLSGEQKKAIVDLLFKTNRKVTVKQLKEDYFKKIECFDSVEISGVEDRFNASLGTYHDLLKIIKDKDFLDNEENEDILEDIVLTLTLFEDREMIEERLKTYAHLFDDKVMKQLKRRRYTGWGRLSRKLINGIRDKQSGKTILDFLKSDGFANRNFMQLIHDDSLTFKEDIQKAQVSGQGDSLHEHIANLAGSPAIKKGILQTVKVVDELVKVMGRHKPENIVIEMARENQTTQKGQKNSRERMKRIEEGIKELGSQILKEHPVENTQLQNEKLYLYYLQNGRDMYVDQELDINRLSDYDVDHIVPQSFLKDDSIDNKVLTRSDKARGKSDNVPSEEVVKKMKNYWRQLLNAKLITQRKFDNLTKAERGGLSELDKAGFIKRQLVETRQITKHVAQILDSRMNTKYDENDKLIREVKVITLKSKLVSDFRKDFQFYKVREINNYHHAHDAYLNAVVGTALIKKYPKLESEFVYGDYKVYDVRKMIAKSEQEIGKATAKYFFYSNIMNFFKTEITLANGEIRKRPLIETNGETGEIVWDKGRDFATVRKVLSMPQVNIVKKTEVQTGGFSKESILPKRNSDKLIARKKDWDPKKYGGFDSPTVAYSVLVVAKVEKGKSKKLKSVKELLGITIMERSSFEKNPIDFLEAKGYKEVKKDLIIKLPKYSLFELENGRKRMLASAGELQKGNELALPSKYVNFLYLASHYEKLKGSPEDNEQKQLFVEQHKHYLDEIIEQISEFSKRVILADANLDKVLSAYNKHRDKPIREQAENIIHLFTLTNLGAPAAFKYFDTTIDRKRYTSTKEVLDATLIHQSITGLYETRIDLSQLGGDGGGGGGSSGGTLNIEDEHRLHETSKEPDVSLGSTWLSDFPQAWAETGGMGLAVRQAPLIIPLKATSTPVSIKQYPMSQEARLGIKPHIQRLLDQGILVPCQSPWNTPLLPVKKPGTNDYRPVQDLREVNKRVEDIHPTVPNPYNLLSGLPPSHQWYTVLDLKDAFFCLRLHPTSQPLFAFEWRDPEMGISGQLTWTRLPQGFKNSPTLFNEALHRDLADFRIQHPDLILLQYVDDLLLAATSELDCQQGTRALLQTLGNLGYRASAKKAQICQKQVKYLGYLLKEGQRWLTEARKETVMGQPTPKTPRQLREFLGTAGFCRLWIPGFAEMAAPLYPLTKPGTLFNWGPDQQKAYQEIKQALLTAPALGLPDLTKPFELFVDEKQGYAKGVLTQKLGPWRRPVAYLSKKLDPVAAGWPPCLRMVAAIAVLTKDAGKLTMGQPLVILAPHAVEALVKQPPDRWLSNARMTHYQALLLDTDRVQFGPVVALNPATLLPLPEEGLQHNCLDILAEAHGTRPDLTDQPLPDADHTWYTDGSSLLQEGQRKAGAAVTTETEVIWAKALPAGTSAQRAELIALTQALKMAEGKKLNVYTDSRYAFATAHIHGEIYRRRGWLTSEGKEIKNKDEILALLKALFLPKRLSIIHCPGHQKGHSAEARGNRMADQAARKAAITETPDTSTLLAGKRTADGSEFEKRTADGSEFESPKKKAKVE

SEQ ID NO: 6664 - protein, 2091 aa, synthetic construct; identical to SEQ ID NO: 6663

SEQ ID NO: 6665 - protein, 2083 aa, synthetic construct
MPAAKRVKLDGGDKKYSIGLDIGTNSVGWAVITDEYKVPSKKFKVLGNTDRHSIKKNLIGALLFDSGETAEATRLKRTARRRYTRRKNRICYLQEIFSNEMAKVDDSFFHRLEESFLVEEDKKHERHPIFGNIVDEVAYHEKYPTIYHLRKKLVDSTDKADLRLIYLALAHMIKFRGHFLIEGDLNPDNSDVDKLFIQLVQTYNQLFEENPINASGVDAKAILSARLSKSRRLENLIAQLPGEKKNGLFGNLIALSLGLTPNFKSNFDLAEDAKLQLSKDTYDDDLDNLLAQIGDQYADLFLAAKNLSDAILLSDILRVNTEITKAPLSASMIKRYDEHHQDLTLLKALVRQQLPEKYKEIFFDQSKNGYAGYIDGGASQEEFYKFIKPILEKMDGTEELLVKLNREDLLRKQRTFDNGSIPHQIHLGELHAILRRQEDFYPFLKDNREKIEKILTFRIPYYVGPLARGNSRFAWMTRKSEETITPWNFEEVVDKGASAQSFIERMTNFDKNLPNEKVLPKHSLLYEYFTVYNELTKVKYVTEGMRKPAFLSGEQKKAIVDLLFKTNRKVTVKQLKEDYFKKIECFDSVEISGVEDRFNASLGTYHDLLKIIKDKDFLDNEENEDILEDIVLTLTLFEDREMIEERLKTYAHLFDDKVMKQLKRRRYTGWGRLSRKLINGIRDKQSGKTILDFLKSDGFANRNFMQLIHDDSLTFKEDIQKAQVSGQGDSLHEHIANLAGSPAIKKGILQTVKVVDELVKVMGRHKPENIVIEMARENQTTQKGQKNSRERMKRIEEGIKELGSQILKEHPVENTQLQNEKLYLYYLQNGRDMYVDQELDINRLSDYDVDHIVPQSFLKDDSIDNKVLTRSDKARGKSDNVPSEEVVKKMKNYWRQLLNAKLITQRKFDNLTKAERGGLSELDKAGFIKRQLVETRQITKHVAQILDSRMNTKYDENDKLIREVKVITLKSKLVSDFRKDFQFYKVREINNYHHAHDAYLNAVVGTALIKKYPKLESEFVYGDYKVYDVRKMIAKSEQEIGKATAKYFFYSNIMNFFKTEITLANGEIRKRPLIETNGETGEIVWDKGRDFATVRKVLSMPQVNIVKKTEVQTGGFSKESILPKRNSDKLIARKKDWDPKKYGGFDSPTVAYSVLVVAKVEKGKSKKLKSVKELLGITIMERSSFEKNPIDFLEAKGYKEVKKDLIIKLPKYSLFELENGRKRMLASAGELQKGNELALPSKYVNFLYLASHYEKLKGSPEDNEQKQLFVEQHKHYLDEIIEQISEFSKRVILADANLDKVLSAYNKHRDKPIREQAENIIHLFTLTNLGAPAAFKYFDTTIDRKRYTSTKEVLDATLIHQSITGLYETRIDLSQLGGDGGGGGGSSGGLDDEYRLYSPLVKPDQNIQFWLEQFPQAWAETAGMGLAKQVPPQVIQLKASATPVSVRQYPLSKEAQEGIRPHVQRLIQQGILVPVQSPWNTPLLPVRKPGTNDYRPVQDLREVNKRVQDIHPTVPNPYNLLCALPPQRSWYTVLDLKDAFFCLRLHPTSQPLFAFEWRDPGTGRTGQLTWTRLPQGFKNSPTIFNEALHRDLANFRIQHPQVTLLQYVDDLLLAGATKQDCLEGTKALLLELSDLGYRASAKKAQICRREVTYLGYSLRDGQRWLTEARKKTVVQIPAPTTAKQVREFLGKAGFCRLFIPGFATLAAPLYPLTKPKGEFSWAPEHQKAFDAIKKALLSAPALALPDVTKPFTLYVDERKGVARGVLTQTLGPWRRPVAYLSKKLDPVASGWPVCLKAIAAVAILVKDADKLTLGQNITVIAPHALENIVRQPPDRWMTNARMTHYQSLLLTERVTFAPPAALNPATLLPEETDEPVTHDCHQLLIEETGVRKDLTDIPLTGEVLTWFTDGSSYVVEGKRMAGAAVVDGTRTIWASSLPEGTSAQKAELMALTQALRLAEGKSINIYTDSRYAFATAHVHGAIYKQRGWLTSAGREIKNKEEILSLLEALHLPKRLAIIHCPGHQKAKDPISRGNQMADRVAKQAAQGVNLLPAGKRTADGSEFEKRTADGSEFESPKKKAKVE

SEQ ID NO: 6666 - protein, 2083 aa, synthetic construct; identical to SEQ ID NO: 6665

SEQ ID NO: 6667 - protein, 2082 aa, synthetic construct
MPAAKRVKLDGGDKKYSIGLDIGTNSVGWAVITDEYKVPSKKFKVLGNTDRHSIKKNLIGALLFDSGETAEATRLKRTARRRYTRRKNRICYLQEIFSNEMAKVDDSFFHRLEESFLVEEDKKHERHPIFGNIVDEVAYHEKYPTIYHLRKKLVDSTDKADLRLIYLALAHMIKFRGHFLIEGDLNPDNSDVDKLFIQLVQTYNQLFEENPINASGVDAKAILSARLSKSRRLENLIAQLPGEKKNGLFGNLIALSLGLTPNFKSNFDLAEDAKLQLSKDTYDDDLDNLLAQIGDQYADLFLAAKNLSDAILLSDILRVNTEITKAPLSASMIKRYDEHHQDLTLLKALVRQQLPEKYKEIFFDQSKNGYAGYIDGGASQEEFYKFIKPILEKMDGTEELLVKLNREDLLRKQRTFDNGSIPHQIHLGELHAILRRQEDFYPFLKDNREKIEKILTFRIPYYVGPLARGNSRFAWMTRKSEETITPWNFEEVVDKGASAQSFIERMTNFDKNLPNEKVLPKHSLLYEYFTVYNELTKVKYVTEGMRKPAFLSGEQKKAIVDLLFKTNRKVTVKQLKEDYFKKIECFDSVEISGVEDRFNASLGTYHDLLKIIKDKDFLDNEENEDILEDIVLTLTLFEDREMIEERLKTYAHLFDDKVMKQLKRRRYTGWGRLSRKLINGIRDKQSGKTILDFLKSDGFANRNFMQLIHDDSLTFKEDIQKAQVSGQGDSLHEHIANLAGSPAIKKGILQTVKVVDELVKVMGRHKPENIVIEMARENQTTQKGQKNSRERMKRIEEGIKELGSQILKEHPVENTQLQNEKLYLYYLQNGRDMYVDQELDINRLSDYDVDHIVPQSFLKDDSIDNKVLTRSDKARGKSDNVPSEEVVKKMKNYWRQLLNAKLITQRKFDNLTKAERGGLSELDKAGFIKRQLVETRQITKHVAQILDSRMNTKYDENDKLIREVKVITLKSKLVSDFRKDFQFYKVREINNYHHAHDAYLNAVVGTALIKKYPKLESEFVYGDYKVYDVRKMIAKSEQEIGKATAKYFFYSNIMNFFKTEITLANGEIRKRPLIETNGETGEIVWDKGRDFATVRKVLSMPQVNIVKKTEVQTGGFSKESILPKRNSDKLIARKKDWDPKKYGGFDSPTVAYSVLVVAKVEKGKSKKLKSVKELLGITIMERSSFEKNPIDFLEAKGYKEVKKDLIIKLPKYSLFELENGRKRMLASAGELQKGNELALPSKYVNFLYLASHYEKLKGSPEDNEQKQLFVEQHKHYLDEIIEQISEFSKRVILADANLDKVLSAYNKHRDKPIREQAENIIHLFTLTNLGAPAAFKYFDTTIDRKRYTSTKEVLDATLIHQSITGLYETRIDLSQLGGDGGGGGGSSGGIPWLMKKPLQLTTLVPLQEYEERLLKQTMLTGSYKEKLQSLFLKYDALWQHWENQVGHRRIKPHHIATGTVNPRPQKQYPINPKAKASIQTVINDLLKQGVLIQQNSIMNTPVYPVPKPDGKWRMVLDYREVNKTIPLIAAQNQHSAGILSSIFRGKYKTTLDLSNGFWAHSITPESYWLTAFTWLGQQYCWTRLPQGFLNSPALFNADVVDLLKEVPNVQVYVDDIYISHDDPREHLEQLEKVFSLLLNAGYVVSLKKSEIAQHEVEFLGFNITKEGRGLTETFKQKLLNITPPRDLKQLQSILGLLNFARNFIPNFSELVKPLYNIIATAPGKYITWTTDNSQQLQNIISMLNSAENLEERNPEVRLIMKVNTSPSAGYIRFYNEFAKRPIMYLNYVYTKAEVKFTNTEKLLTTIHKGLIKALDLGMGQEILVYSPIVSMTKIQKTPLPERKALPIRWITWMSYLEDPRIQFHYDKTLPELQQVPTVTDDIIAKIKHPSEFSMVFYTDGSAIKHPNVNKSHNAGMGIAQVQFKPEFTVINTWSIPLGDHTAQLAEVAAVEFACKKALKIDGPVLIVTDSFYVAESVNKELPYWQSNGFFNNKKKPLKHVSKWKSIADCIQLKPDIIIIHEKGHQPTASTFHTEGNNLADKLATQGSYVVNAGKRTADGSEFEKRTADGSEFESPKKKAKVE

SEQ ID NO: 6668 - protein, 2089 aa, synthetic construct
MPAAKRVKLDGGDKKYSIGLDIGTNSVGWAVITDEYKVPSKKFKVLGNTDRHSIKKNLIGALLFDSGETAEATRLKRTARRRYTRRKNRICYLQEIFSNEMAKVDDSFFHRLEESFLVEEDKKHERHPIFGNIVDEVAYHEKYPTIYHLRKKLVDSTDKADLRLIYLALAHMIKFRGHFLIEGDLNPDNSDVDKLFIQLVQTYNQLFEENPINASGVDAKAILSARLSKSRRLENLIAQLPGEKKNGLFGNLIALSLGLTPNFKSNFDLAEDAKLQLSKDTYDDDLDNLLAQIGDQYADLFLAAKNLSDAILLSDILRVNTEITKAPLSASMIKRYDEHHQDLTLLKALVRQQLPEKYKEIFFDQSKNGYAGYIDGGASQEEFYKFIKPILEKMDGTEELLVKLNREDLLRKQRTFDNGSIPHQIHLGELHAILRRQEDFYPFLKDNREKIEKILTFRIPYYVGPLARGNSRFAWMTRKSEETITPWNFEEVVDKGASAQSFIERMTNFDKNLPNEKVLPKHSLLYEYFTVYNELTKVKYVTEGMRKPAFLSGEQKKAIVDLLFKTNRKVTVKQLKEDYFKKIECFDSVEISGVEDRFNASLGTYHDLLKIIKDKDFLDNEENEDILEDIVLTLTLFEDREMIEERLKTYAHLFDDKVMKQLKRRRYTGWGRLSRKLINGIRDKQSGKTILDFLKSDGFANRNFMQLIHDDSLTFKEDIQKAQVSGQGDSLHEHIANLAGSPAIKKGILQTVKVVDELVKVMGRHKPENIVIEMARENQTTQKGQKNSRERMKRIEEGIKELGSQILKEHPVENTQLQNEKLYLYYLQNGRDMYVDQELDINRLSDYDVDHIVPQSFLKDDSIDNKVLTRSDKARGKSDNVPSEEVVKKMKNYWRQLLNAKLITQRKFDNLTKAERGGLSELDKAGFIKRQLVETRQITKHVAQILDSRMNTKYDENDKLIREVKVITLKSKLVSDFRKDFQFYKVREINNYHHAHDAYLNAVVGTALIKKYPKLESEFVYGDYKVYDVRKMIAKSEQEIGKATAKYFFYSNIMNFFKTEITLANGEIRKRPLIETNGETGEIVWDKGRDFATVRKVLSMPQVNIVKKTEVQTGGFSKESILPKRNSDKLIARKKDWDPKKYGGFDSPTVAYSVLVVAKVEKGKSKKLKSVKELLGITIMERSSFEKNPIDFLEAKGYKEVKKDLIIKLPKYSLFELENGRKRMLASAGELQKGNELALPSKYVNFLYLASHYEKLKGSPEDNEQKQLFVEQHKHYLDEIIEQISEFSKRVILADANLDKVLSAYNKHRDKPIREQAENIIHLFTLTNLGAPAAFKYFDTTIDRKRYTSTKEVLDATLIHQSITGLYETRIDLSQLGGDGGGGGGSSGGVLNLEEEYRLHEKPVPSSIDPSWLQLFPTVWAERAGMGLANQVPPVVVELRSGASPVAVRQYPMSKEAREGIRPHIQRFLDLGVLVPCQSPWNTPLLPVKKPGTNDYRPVQDLREINKRVQDIHPTVPNPYNLLSSLPPSHTWYSVLDLKDAFFCLKLHPNSQPLFAFEWRDPEKGNTGQLTWTRLPQGFKNSPTLFNEALHRDLAPFRALNPQVVLLQYVDDLLVAAPTYRDCKEGTQKLLQELSKLGYRVSAKKAQLCQKEVTYLGYLLKEGKRWLTPARKATVMKIPPPTTPRQVREFLGTAGFCRLWIPGFASLAAPLYPLTKPSIPFIWTEEHQKAFDRIKEALLSAPALALPDLTKPFTLYVDERAGVARGVLTQTLGPWRRPVAYLSKKLDPVASGWPTCLKAVAAVALLLKDADKLTLGQNVTVIASHSLESIVRQPPDRWMTNARMTHYQSLLLNERVSFAPPAVLNPATLLPVESEATPVHRCSEILAEETGTRRDLKDQPLPGVPAWYTDGSSFIAEGKRRAGAAIVDGKRTVWASSLPEGTSAQKAELVALTQALRLAEGKDINIYTDSRYAFATAHIHGAIYKQRGWLTSAGKDIKNKEEILALLEAIHLPKRVAIIHCPGHQKGNDPVATGNRRADEAAKQAALSTRVLAETTKPAGKRTADGSEFEKRTADGSEFESPKKKAKVE

SEQ ID NO: 6669 - protein, 2089 aa, synthetic construct
MPAAKRVKLDGGDKKYSIGLDIGTNSVGWAVITDEYKVPSKKFKVLGNTDRHSIKKNLIGALLFDSGETAEATRLKRTARRRYTRRKNRICYLQEIFSNEMAKVDDSFFHRLEESFLVEEDKKHERHPIFGNIVDEVAYHEKYPTIYHLRKKLVDSTDKADLRLIYLALAHMIKFRGHFLIEGDLNPDNSDVDKLFIQLVQTYNQLFEENPINASGVDAKAILSARLSKSRRLENLIAQLPGEKKNGLFGNLIALSLGLTPNFKSNFDLAEDAKLQLSKDTYDDDLDNLLAQIGDQYADLFLAAKNLSDAILLSDILRVNTEITKAPLSASMIKRYDEHHQDLTLLKALVRQQLPEKYKEIFFDQSKNGYAGYIDGGASQEEFYKFIKPILEKMDGTEELLVKLNREDLLRKQRTFDNGSIPHQIHLGELHAILRRQEDFYPFLKDNREKIEKILTFRIPYYVGPLARGNSRFAWMTRKSEETITPWNFEEVVDKGASAQSFIERMTNFDKNLPNEKVLPKHSLLYEYFTVYNELTKVKYVTEGMRKPAFLSGEQKKAIVDLLFKTNRKVTVKQLKEDYFKKIECFDSVEISGVEDRFNASLGTYHDLLKIIKDKDFLDNEENEDILEDIVLTLTLFEDREMIEERLKTYAHLFDDKVMKQLKRRRYTGWGRLSRKLINGIRDKQSGKTILDFLKSDGFANRNFMQLIHDDSLTFKEDIQKAQVSGQGDSLHEHIANLAGSPAIKKGILQTVKVVDELVKVMGRHKPENIVIEMARENQTTQKGQKNSRERMKRIEEGIKELGSQILKEHPVENTQLQNEKLYLYYLQNGRDMYVDQELDINRLSDYDVDHIVPQSFLKDDSIDNKVLTRSDKARGKSDNVPSEEVVKKMKNYWRQLLNAKLITQRKFDNLTKAERGGLSELDKAGFIKRQLVETRQITKHVAQILDSRMNTKYDENDKLIREVKVITLKSKLVSDFRKDFQFYKVREINNYHHAHDAYLNAVVGTALIKKYPKLESEFVYGDYKVYDVRKMIAKSEQEIGKATAKYFFYSNIMNFFKTEITLANGEIRKRPLIETNGETGEIVWDKGRDFATVRKVLSMPQVNIVKKTEVQTGGFSKESILPKRNSDKLIARKKDWDPKKYGGFDSPTVAYSVLVVAKVEKGKSKKLKSVKELLGITIMERSSFEKNPIDFLEAKGYKEVKKDLIIKLPKYSLFELENGRKRMLASAGELQKGNELALPSKYVNFLYLASHYEKLKGSPEDNEQKQLFVEQHKHYLDEIIEQISEFSKRVILADANLDKVLSAYNKHRDKPIREQAENIIHLFTLTNLGAPAAFKYFDTTIDRKRYTSTKEVLDATLIHQSITGLYETRIDLSQLGGDGGGGGGSSGGVLNLEEEYRLHEKPVPSSIDPSWLQLFPTVWAERAGMGLANQVPPVVVELRSGASPVAVRQYPMSKEAREGIRPHIQRFLDLGVLVPCQSPWNTPLLPVKKPGTNDYRPVQDLREINKRVQDIHPTVPNPYNLLSSLPPSHTWYSVLDLKDAFFCLKLHPNSQPLFAFEWRDPEKGNTGQLTWTRLPQGFKNSPTLFNEALHRDLAPFRALNPQVVLLQYVDDLLVAAPTYRDCKEGTQKLLQELSKLGYRVSAKKAQLCQKEVTYLGYLLKEGKRWLTPARKATVMKIPPPTTPRQVREFLGKAGFCRLFIPGFASLAAPLYPLTKPSIPFIWTEEHQKAFDRIKEALLSAPALALPDLTKPFTLYVDERAGVARGVLTQTLGPWRRPVAYLSKKLDPVASGWPTCLKAVAAVALLLKDADKLTLGQNVTVIASHSLESIVRQPPDRWMTNARMTHYQSLLLNERVSFAPPAVLNPATLLPVESEATPVHRCSEILAEETGTRRDLKDQPLPGVPAWYTDGSSFIAEGKRRAGAAIVDGKRTVWASSLPEGTSAQKAELVALTQALRLAEGKDINIYTDSRYAFATAHIHGAIYKQRGWLTSAGKDIKNKEEILALLEAIHLPKRVAIIHCPGHQKGNDPVATGNRRADEAAKQAALSTRVLAETTKPAGKRTADGSEFEKRTADGSEFESPKKKAKVE

SEQ ID NO: 6670 - protein, 2091 aa, synthetic construct
MPAAKRVKLDGGDKKYSIGLDIGTNSVGWAVITDEYKVPSKKFKVLGNTDRHSIKKNLIGALLFDSGETAEATRLKRTARRRYTRRKNRICYLQEIFSNEMAKVDDSFFHRLEESFLVEEDKKHERHPIFGNIVDEVAYHEKYPTIYHLRKKLVDSTDKADLRLIYLALAHMIKFRGHFLIEGDLNPDNSDVDKLFIQLVQTYNQLFEENPINASGVDAKAILSARLSKSRRLENLIAQLPGEKKNGLFGNLIALSLGLTPNFKSNFDLAEDAKLQLSKDTYDDDLDNLLAQIGDQYADLFLAAKNLSDAILLSDILRVNTEITKAPLSASMIKRYDEHHQDLTLLKALVRQQLPEKYKEIFFDQSKNGYAGYIDGGASQEEFYKFIKPILEKMDGTEELLVKLNREDLLRKQRTFDNGSIPHQIHLGELHAILRRQEDFYPFLKDNREKIEKILTFRIPYYVGPLARGNSRFAWMTRKSEETITPWNFEEVVDKGASAQSFIERMTNFDKNLPNEKVLPKHSLLYEYFTVYNELTKVKYVTEGMRKPAFLSGEQKKAIVDLLFKTNRKVTVKQLKEDYFKKIECFDSVEISGVEDRFNASLGTYHDLLKIIKDKDFLDNEENEDILEDIVLTLTLFEDREMIEERLKTYAHLFDDKVMKQLKRRRYTGWGRLSRKLINGIRDKQSGKTILDFLKSDGFANRNFMQLIHDDSLTFKEDIQKAQVSGQGDSLHEHIANLAGSPAIKKGILQTVKVVDELVKVMGRHKPENIVIEMARENQTTQKGQKNSRERMKRIEEGIKELGSQILKEHPVENTQLQNEKLYLYYLQNGRDMYVDQELDINRLSDYDVDHIVPQSFLKDDSIDNKVLTRSDKARGKSDNVPSEEVVKKMKNYWRQLLNAKLITQRKFDNLTKAERGGLSELDKAGFIKRQLVETRQITKHVAQILDSRMNTKYDENDKLIREVKVITLKSKLVSDFRKDFQFYKVREINNYHHAHDAYLNAVVGTALIKKYPKLESEFVYGDYKVYDVRKMIAKSEQEIGKATAKYFFYSNIMNFFKTEITLANGEIRKRPLIETNGETGEIVWDKGRDFATVRKVLSMPQVNIVKKTEVQTGGFSKESILPKRNSDKLIARKKDWDPKKYGGFDSPTVAYSVLVVAKVEKGKSKKLKSVKELLGITIMERSSFEKNPIDFLEAKGYKEVKKDLIIKLPKYSLFELENGRKRMLASAGELQKGNELALPSKYVNFLYLASHYEKLKGSPEDNEQKQLFVEQHKHYLDEIIEQISEFSKRVILADANLDKVLSAYNKHRDKPIREQAENIIHLFTLTNLGAPAAFKYFDTTIDRKRYTSTKEVLDATLIHQSITGLYETRIDLSQLGGDGGGGGGSSGGTLNIEDEYRLHETSKEPDVPLGSTWLSDFPQAWAETGGMGLAVRQAPLIIPLKATSTPVSIKQYPMSQEARLGIKPHIQRLLDQGILVPCQSPWNTPLLPVKKPGTNDYRPVQDLREVNKRVEDIHPTVPNPYNLLSGLPPSHQWYTVLDLKDAFFCLRLHPTSQPLFAFEWRDPEMGISGQLTWTRLPQGFKNSPTLFNEALHRDLADFRIQHPDLILLQYVDDLLLAATSEQDCQRGTRALLQTLGNLGYRASAKKAQICQKQVKYLGYLLKEGQRWLTEARKETVMGQPTPKTPRQLREFLGTAGFCRLWIPGFAEMAAPLYPLTKPGTLFNWGPDQQKAYQEIKQALLTAPALGLPDLTKPFELFVDEKQGYAKGVLTQKLGPWRRPVAYLSKKLDPVAAGWPPCLRMVAAIAVLTKDAGKLTMGQPLVILAPHAVEALVKQPPDRWLSNARMTHYQAMLLDTDRVQFGPVVALNPATLLPLPEKEAPHDCLEILAETHGTRPDLTDQPIPDADYTWYTDGSSFLQEGQRRAGAAVTTETEVIWARALPAGTSAQRAELIALTQALKMAEGKKLNVYTDSRYAFATAHVHGEIYRRRGWLTSEGREIKNKNEILALLKALFLPKRLSIIHCPGHQKGNSAEARGNRMADQAAREAAMKAVLETSTLLAGKRTADGSEFEKRTADGSEFESPKKKAKVE

SEQ ID NO: 6671 - protein, 2093 aa, synthetic construct
MPAAKRVKLDGGDKKYSIGLDIGTNSVGWAVITDEYKVPSKKFKVLGNTDRHSIKKNLIGALLFDSGETAEATRLKRTARRRYTRRKNRICYLQEIFSNEMAKVDDSFFHRLEESFLVEEDKKHERHPIFGNIVDEVAYHEKYPTIYHLRKKLVDSTDKADLRLIYLALAHMIKFRGHFLIEGDLNPDNSDVDKLFIQLVQTYNQLFEENPINASGVDAKAILSARLSKSRRLENLIAQLPGEKKNGLFGNLIALSLGLTPNFKSNFDLAEDAKLQLSKDTYDDDLDNLLAQIGDQYADLFLAAKNLSDAILLSDILRVNTEITKAPLSASMIKRYDEHHQDLTLLKALVRQQLPEKYKEIFFDQSKNGYAGYIDGGASQEEFYKFIKPILEKMDGTEELLVKLNREDLLRKQRTFDNGSIPHQIHLGELHAILRRQEDFYPFLKDNREKIEKILTFRIPYYVGPLARGNSRFAWMTRKSEETITPWNFEEVVDKGASAQSFIERMTNFDKNLPNEKVLPKHSLLYEYFTVYNELTKVKYVTEGMRKPAFLSGEQKKAIVDLLFKTNRKVTVKQLKEDYFKKIECFDSVEISGVEDRFNASLGTYHDLLKIIKDKDFLDNEENEDILEDIVLTLTLFEDREMIEERLKTYAHLFDDKVMKQLKRRRYTGWGRLSRKLINGIRDKQSGKTILDFLKSDGFANRNFMQLIHDDSLTFKEDIQKAQVSGQGDSLHEHIANLAGSPAIKKGILQTVKVVDELVKVMGRHKPENIVIEMARENQTTQKGQKNSRERMKRIEEGIKELGSQILKEHPVENTQLQNEKLYLYYLQNGRDMYVDQELDINRLSDYDVDHIVPQSFLKDDSIDNKVLTRSDKARGKSDNVPSEEVVKKMKNYWRQLLNAKLITQRKFDNLTKAERGGLSELDKAGFIKRQLVETRQITKHVAQILDSRMNTKYDENDKLIREVKVITLKSKLVSDFRKDFQFYKVREINNYHHAHDAYLNAVVGTALIKKYPKLESEFVYGDYKVYDVRKMIAKSEQEIGKATAKYFFYSNIMNFFKTEITLANGEIRKRPLIETNGETGEIVWDKGRDFATVRKVLSMPQVNIVKKTEVQTGGFSKESILPKRNSDKLIARKKDWDPKKYGGFDSPTVAYSVLVVAKVEKGKSKKLKSVKELLGITIMERSSFEKNPIDFLEAKGYKEVKKDLIIKLPKYSLFELENGRKRMLASAGELQKGNELALPSKYVNFLYLASHYEKLKGSPEDNEQKQLFVEQHKHYLDEIIEQISEFSKRVILADANLDKVLSAYNKHRDKPIREQAENIIHLFTLTNLGAPAAFKYFDTTIDRKRYTSTKEVLDATLIHQSITGLYETRIDLSQLGGDGGGSSGGGGGTAPLEEEYRLFLEAPIQNVTLLEQWKREIPKVWAEINPPGLASTQAPIHVQLLSTALPVRVRQYPITLEAKRSLRETIRKFRAAGILRPVHSPWNTPLLPVRKSGTSEYRMVQDLREVNKRVETIHPTVPNPYTLLSLLPPDRIWYSVLDLKDAFFCIPLAPESQLIFAFEWADAEEGESGQLTWTRLPQGFKNSPTLFDEALNRDLQGFRLDHPSVSLLQYVDDLLIAADTQAACLSATRDLLMTLAELGYRVSGKKAQLCQEEVTYLGFKIHKGSRSLSNSRTQAILQIPVPKTKRQVREFLGTIGYCRLWIPGFAELAQPLYAATRGGNDPLVWGEKEEEAFQSLKLALTQPPALALPSLDKPFQLFVEETSGAAKGVLTQALGPWKRPVAYLSKRLDPVAAGWPRCLRAIAAAALLTREASKLTFGQDIEITSSHNLESLLRSPPDKWLTNARITQYQVLLLDPPRVRFKQTAALNPATLLPETDDTLPIHHCLDTLDSLTSTRPDLTDQPLAQAEATLFTDGSSYIRDGKRYAGAAVVTLDSVIWAEPLPIGTSAQKAELIALTKALEWSKDKSVNIYTDSRYAFATLHVHGMIYRERGLLTAGGKAIKNAPEILALLTAVWLPKRVAVMHCKGHQKDDAPTSTGNRRADEVAREVAIRPLSTQATISAGKRTADGSEFEKRTADGSEFESPKKKAKVE

SEQ ID NO: 6672 - protein, 2097 aa, synthetic construct
MPAAKRVKLDGGDKKYSIGLDIGTNSVGWAVITDEYKVPSKKFKVLGNTDRHSIKKNLIGALLFDSGETAEATRLKRTARRRYTRRKNRICYLQEIFSNEMAKVDDSFFHRLEESFLVEEDKKHERHPIFGNIVDEVAYHEKYPTIYHLRKKLVDSTDKADLRLIYLALAHMIKFRGHFLIEGDLNPDNSDVDKLFIQLVQTYNQLFEENPINASGVDAKAILSARLSKSRRLENLIAQLPGEKKNGLFGNLIALSLGLTPNFKSNFDLAEDAKLQLSKDTYDDDLDNLLAQIGDQYADLFLAAKNLSDAILLSDILRVNTEITKAPLSASMIKRYDEHHQDLTLLKALVRQQLPEKYKEIFFDQSKNGYAGYIDGGASQEEFYKFIKPILEKMDGTEELLVKLNREDLLRKQRTFDNGSIPHQIHLGELHAILRRQEDFYPFLKDNREKIEKILTFRIPYYVGPLARGNSRFAWMTRKSEETITPWNFEEVVDKGASAQSFIERMTNFDKNLPNEKVLPKHSLLYEYFTVYNELTKVKYVTEGMRKPAFLSGEQKKAIVDLLFKTNRKVTVKQLKEDYFKKIECFDSVEISGVEDRFNASLGTYHDLLKIIKDKDFLDNEENEDILEDIVLTLTLFEDREMIEERLKTYAHLFDDKVMKQLKRRRYTGWGRLSRKLINGIRDKQSGKTILDFLKSDGFANRNFMQLIHDDSLTFKEDIQKAQVSGQGDSLHEHIANLAGSPAIKKGILQTVKVVDELVKVMGRHKPENIVIEMARENQTTQKGQKNSRERMKRIEEGIKELGSQILKEHPVENTQLQNEKLYLYYLQNGRDMYVDQELDINRLSDYDVDHIVPQSFLKDDSIDNKVLTRSDKARGKSDNVPSEEVVKKMKNYWRQLLNAKLITQRKFDNLTKAERGGLSELDKAGFIKRQLVETRQITKHVAQILDSRMNTKYDENDKLIREVKVITLKSKLVSDFRKDFQFYKVREINNYHHAHDAYLNAVVGTALIKKYPKLESEFVYGDYKVYDVRKMIAKSEQEIGKATAKYFFYSNIMNFFKTEITLANGEIRKRPLIETNGETGEIVWDKGRDFATVRKVLSMPQVNIVKKTEVQTGGFSKESILPKRNSDKLIARKKDWDPKKYGGFDSPTVAYSVLVVAKVEKGKSKKLKSVKELLGITIMERSSFEKNPIDFLEAKGYKEVKKDLIIKLPKYSLFELENGRKRMLASAGELQKGNELALPSKYVNFLYLASHYEKLKGSPEDNEQKQLFVEQHKHYLDEIIEQISEFSKRVILADANLDKVLSAYNKHRDKPIREQAENIIHLFTLTNLGAPAAFKYFDTTIDRKRYTSTKEVLDATLIHQSITGLYETRIDLSQLGGDGGGSSGGGGGTVSLQDEHRLFDIPVTTSLPDVWLQDFPQAWAETGGLGRAKCQAPIIIDLKPTAVPVSIKQYPMSLEAHMGIRQHIIKFLELGVLRPCRSPWNTPLLPVKKPGTQDYRPVQDLREINKRTVDIHPTVPNPYNLLSTLKPDYSWYTVLDLKDAFFCLPLAPQSQELFAFEWKDPERGISGQLTWTRLPQGFKNSPTLFNEALHRDLTDFRTQHPEVTLLQYVDDLLLAAPTKKACTQGTRHLLQELGEKGYRASAKKAQICQTKVTYLGYILSEGKRWLTPGRIETVARIPPPRNPREVREFLGKAGFCRLFIPGFAELAAPLYALTKPSTPFTWQTEHQLAFEALKKALLSAPALGLPDTSKPFTLFLDERQGIAKGVLTQKLGPWKRPVAYLSKKLDPVAAGWPPCLRIMAATAMLVKDSAKLTLGQPLTVITPHTLEAIVRQPPDRWITNARLTHYQALLLDTDRVQFGPPVTLNPATLLPVPENQPSPHDCRQVLAETHGTREDLKDQELPDADHTWYTDGSSYLDSGTRRAGAAVVDGHNTIWAQSLPPGTSAQKAELIALTKALELSKGKKANIYTDSRYAFATAHTHGSIYERRGWLTSEGKEIKNKAEIIALLKALFLPQEVAIIHCPGHQKGQDPVAVGNRQADRVARQAAMAEVLTLATEPDNTSHITAGKRTADGSEFEKRTADGSEFESPKKKAKVE

SEQ ID NO: 6673 - protein, 2008 aa, synthetic construct
MPAAKRVKLDGGDKKYSIGLDIGTNSVGWAVITDEYKVPSKKFKVLGNTDRHSIKKNLIGALLFDSGETAEATRLKRTARRRYTRRKNRICYLQEIFSNEMAKVDDSFFHRLEESFLVEEDKKHERHPIFGNIVDEVAYHEKYPTIYHLRKKLVDSTDKADLRLIYLALAHMIKFRGHFLIEGDLNPDNSDVDKLFIQLVQTYNQLFEENPINASGVDAKAILSARLSKSRRLENLIAQLPGEKKNGLFGNLIALSLGLTPNFKSNFDLAEDAKLQLSKDTYDDDLDNLLAQIGDQYADLFLAAKNLSDAILLSDILRVNTEITKAPLSASMIKRYDEHHQDLTLLKALVRQQLPEKYKEIFFDQSKNGYAGYIDGGASQEEFYKFIKPILEKMDGTEELLVKLNREDLLRKQRTFDNGSIPHQIHLGELHAILRRQEDFYPFLKDNREKIEKILTFRIPYYVGPLARGNSRFAWMTRKSEETITPWNFEEVVDKGASAQSFIERMTNFDKNLPNEKVLPKHSLLYEYFTVYNELTKVKYVTEGMRKPAFLSGEQKKAIVDLLFKTNRKVTVKQLKEDYFKKIECFDSVEISGVEDRFNASLGTYHDLLKIIKDKDFLDNEENEDILEDIVLTLTLFEDREMIEERLKTYAHLFDDKVMKQLKRRRYTGWGRLSRKLINGIRDKQSGKTILDFLKSDGFANRNFMQLIHDDSLTFKEDIQKAQVSGQGDSLHEHIANLAGSPAIKKGILQTVKVVDELVKVMGRHKPENIVIEMARENQTTQKGQKNSRERMKRIEEGIKELGSQILKEHPVENTQLQNEKLYLYYLQNGRDMYVDQELDINRLSDYDVDHIVPQSFLKDDSIDNKVLTRSDKARGKSDNVPSEEVVKKMKNYWRQLLNAKLITQRKFDNLTKAERGGLSELDKAGFIKRQLVETRQITKHVAQILDSRMNTKYDENDKLIREVKVITLKSKLVSDFRKDFQFYKVREINNYHHAHDAYLNAVVGTALIKKYPKLESEFVYGDYKVYDVRKMIAKSEQEIGKATAKYFFYSNIMNFFKTEITLANGEIRKRPLIETNGETGEIVWDKGRDFATVRKVLSMPQVNIVKKTEVQTGGFSKESILPKRNSDKLIARKKDWDPKKYGGFDSPTVAYSVLVVAKVEKGKSKKLKSVKELLGITIMERSSFEKNPIDFLEAKGYKEVKKDLIIKLPKYSLFELENGRKRMLASAGELQKGNELALPSKYVNFLYLASHYEKLKGSPEDNEQKQLFVEQHKHYLDEIIEQISEFSKRVILADANLDKVLSAYNKHRDKPIREQAENIIHLFTLTNLGAPAAFKYFDTTIDRKRYTSTKEVLDATLIHQSITGLYETRIDLSQLGGDGGGSSGGGGGAVLGLEHLPRPPQISQFPLNPERLQALQHLVRKALEAGHIEPYTGPGNNPVFPVKKANGTWRFIHDLRATNSLTIDLSSSSPGPPDLSSLPTTLAHLQTIDLRDAFFQIPLPKQFQPYFAFTVPQQCNYGPGTRYAWKVLPQGFKNSPTLFEMQLAHILQPIRQAFPQCTILQYMDDILLASPSHEDLLLLSEATMASLISHGLPVSENKTQQTPGTIKFLGQIISPNHLTYDAVPTVPIRSRWALPELQALLGEIQWVSKGTPTLRQPLHSLYCALQRHTDPRDQIYLNPSQVQSLVQLRQALSQNCRSRLVQTLPLLGAIMLTLTGTTTVVFQSKEQWPLVWLHAPLPHTSQCPWGQLLASAVLLLDKYTLQSYGLLCQTIHHNISTQTFNQFIQTSDHPSVPILLHHSHRFKNLGAQTGELWNTFLKTAAPLAPVKALMPVFTLSPVIINTAPCLFSDGSTSRAAYILWDKQILSQRSFPLPPPHKSAQRAELLGLLHGLSSARSWRCLNIFLDSKYLYHYLRTLALGTFQGRSSQAPFQALLPRLLSRKVVYLHHVRSHTNLPDPISRLNALTDALLITPVLQLAGKRTADGSEFEKRTADGSEFESPKKKAKVE

SEQ ID NO: 6674 - protein, 2122 aa, synthetic construct
MPAAKRVKLDGGDKKYSIGLDIGTNSVGWAVITDEYKVPSKKFKVLGNTDRHSIKKNLIGALLFDSGETAEATRLKRTARRRYTRRKNRICYLQEIFSNEMAKVDDSFFHRLEESFLVEEDKKHERHPIFGNIVDEVAYHEKYPTIYHLRKKLVDSTDKADLRLIYLALAHMIKFRGHFLIEGDLNPDNSDVDKLFIQLVQTYNQLFEENPINASGVDAKAILSARLSKSRRLENLIAQLPGEKKNGLFGNLIALSLGLTPNFKSNFDLAEDAKLQLSKDTYDDDLDNLLAQIGDQYADLFLAAKNLSDAILLSDILRVNTEITKAPLSASMIKRYDEHHQDLTLLKALVRQQLPEKYKEIFFDQSKNGYAGYIDGGASQEEFYKFIKPILEKMDGTEELLVKLNREDLLRKQRTFDNGSIPHQIHLGELHAILRRQEDFYPFLKDNREKIEKILTFRIPYYVGPLARGNSRFAWMTRKSEETITPWNFEEVVDKGASAQSFIERMTNFDKNLPNEKVLPKHSLLYEYFTVYNELTKVKYVTEGMRKPAFLSGEQKKAIVDLLFKTNRKVTVKQLKEDYFKKIECFDSVEISGVEDRFNASLGTYHDLLKIIKDKDFLDNEENEDILEDIVLTLTLFEDREMIEERLKTYAHLFDDKVMKQLKRRRYTGWGRLSRKLINGIRDKQSGKTILDFLKSDGFANRNFMQLIHDDSLTFKEDIQKAQVSGQGDSLHEHIANLAGSPAIKKGILQTVKVVDELVKVMGRHKPENIVIEMARENQTTQKGQKNSRERMKRIEEGIKELGSQILKEHPVENTQLQNEKLYLYYLQNGRDMYVDQELDINRLSDYDVDHIVPQSFLKDDSIDNKVLTRSDKARGKSDNVPSEEVVKKMKNYWRQLLNAKLITQRKFDNLTKAERGGLSELDKAGFIKRQLVETRQITKHVAQILDSRMNTKYDENDKLIREVKVITLKSKLVSDFRKDFQFYKVREINNYHHAHDAYLNAVVGTALIKKYPKLESEFVYGDYKVYDVRKMIAKSEQEIGKATAKYFFYSNIMNFFKTEITLANGEIRKRPLIETNGETGEIVWDKGRDFATVRKVLSMPQVNIVKKTEVQTGGFSKESILPKRNSDKLIARKKDWDPKKYGGFDSPTVAYSVLVVAKVEKGKSKKLKSVKELLGITIMERSSFEKNPIDFLEAKGYKEVKKDLIIKLPKYSLFELENGRKRMLASAGELQKGNELALPSKYVNFLYLASHYEKLKGSPEDNEQKQLFVEQHKHYLDEIIEQISEFSKRVILADANLDKVLSAYNKHRDKPIREQAENIIHLFTLTNLGAPAAFKYFDTTIDRKRYTSTKEVLDATLIHQSITGLYETRIDLSQLGGDGGGSSGGGGGLLGRDLLTKLKAQIQFSTEGPQVTWEDRPAMCLVLNLEEEYRLHEKPVPPSIDPSWLQLFPMVWAEKAGMGLANQVPPVVVELKSDASPVAVRQYPMSKEAREGIRPHIQRFLDLGILVPCQSPWNTPLLPVKKPGTNDYRPVQDLREVNKRVQDIHPTVPNPYNLLSSLPPSHTWYSVLDLKDAFFCLKLHPNSQPLFAFEWRDPEKGNTGQLTWTRLPQGFKNSPTLFNEALHRDLASFRALNPQVVMLQYVDDLLVAAPTYRDCKEGTRRLLQELSKLGYRVSAKKAQLCREEVTYLGYLLKGGKRWLTPARKATVMKIPTPTTPRQVREFLGTAGFCRLWIPGFASLAAPLYPLTRPKVPFTWTEAHQEAFGRIKEALLSAPALALPDLTKPFALYVDEKEGVARGVLTQTLGPWRRPVAYLSKKLDPVASGWPTCLKAIAAVALLLKDADKLTLGQNVLVIAPHNLESIVRQPPDRWMTNARMTHYQSLLLNERVSFAPPAILNPATLLPVESDDTPIHICSEILAEETGTRPDLRDQPLPGVPAWYTDGSSFIMDGRRQAGAAIVDNKRTVWASNLPEGTSAQKAELIALTQALRLAEGKSINIYTDSRYAFATAHVHGAIYKQRGWLTSAGKDIKNKEEILALLEAIHLPKRVAIIHCPGHQRGTDPVATGNRKADEAAKQAAQSTRILTETTKNAGKRTADGSEFEKRTADGSEFESPKKKAKVE

SEQ ID NO: 6675 - protein, 2213 aa, synthetic construct
MPAAKRVKLDGGDKKYSIGLDIGTNSVGWAVITDEYKVPSKKFKVLGNTDRHSIKKNLIGALLFDSGETAEATRLKRTARRRYTRRKNRICYLQEIFSNEMAKVDDSFFHRLEESFLVEEDKKHERHPIFGNIVDEVAYHEKYPTIYHLRKKLVDSTDKADLRLIYLALAHMIKFRGHFLIEGDLNPDNSDVDKLFIQLVQTYNQLFEENPINASGVDAKAILSARLSKSRRLENLIAQLPGEKKNGLFGNLIALSLGLTPNFKSNFDLAEDAKLQLSKDTYDDDLDNLLAQIGDQYADLFLAAKNLSDAILLSDILRVNTEITKAPLSASMIKRYDEHHQDLTLLKALVRQQLPEKYKEIFFDQSKNGYAGYIDGGASQEEFYKFIKPILEKMDGTEELLVKLNREDLLRKQRTFDNGSIPHQIHLGELHAILRRQEDFYPFLKDNREKIEKILTFRIPYYVGPLARGNSRFAWMTRKSEETITPWNFEEVVDKGASAQSFIERMTNFDKNLPNEKVLPKHSLLYEYFTVYNELTKVKYVTEGMRKPAFLSGEQKKAIVDLLFKTNRKVTVKQLKEDYFKKIECFDSVEISGVEDRFNASLGTYHDLLKIIKDKDFLDNEENEDILEDIVLTLTLFEDREMIEERLKTYAHLFDDKVMKQLKRRRYTGWGRLSRKLINGIRDKQSGKTILDFLKSDGFANRNFMQLIHDDSLTFKEDIQKAQVSGQGDSLHEHIANLAGSPAIKKGILQTVKVVDELVKVMGRHKPENIVIEMARENQTTQKGQKNSRERMKRIEEGIKELGSQILKEHPVENTQLQNEKLYLYYLQNGRDMYVDQELDINRLSDYDVDHIVPQSFLKDDSIDNKVLTRSDKARGKSDNVPSEEVVKKMKNYWRQLLNAKLITQRKFDNLTKAERGGLSELDKAGFIKRQLVETRQITKHVAQILDSRMNTKYDENDKLIREVKVITLKSKLVSDFRKDFQFYKVREINNYHHAHDAYLNAVVGTALIKKYPKLESEFVYGDYKVYDVRKMIAKSEQEIGKATAKYFFYSNIMNFFKTEITLANGEIRKRPLIETNGETGEIVWDKGRDFATVRKVLSMPQVNIVKKTEVQTGGFSKESILPKRNSDKLIARKKDWDPKKYGGFDSPTVAYSVLVVAKVEKGKSKKLKSVKELLGITIMERSSFEKNPIDFLEAKGYKEVKKDLIIKLPKYSLFELENGRKRMLASAGELQKGNELALPSKYVNFLYLASHYEKLKGSPEDNEQKQLFVEQHKHYLDEIIEQISEFSKRVILADANLDKVLSAYNKHRDKPIREQAENIIHLFTLTNLGAPAAFKYFDTTIDRKRYTSTKEVLDATLIHQSITGLYETRIDLSQLGGDGGGSSGGGGGTLGDQGSRGSDPLPEPRVTLTVEGIPTEFLVNTGAEHSVLTKPMGKMGSKRTVVAGATGSKVYPWTTKRLLKIGQKQVTHSFLVIPECPAPLLGRDLLTKLKAQIQFSTEGPQVTWEDRPAMCLVLNLEEEYRLHEKPVPPSIDPSWLQLFPMVWAEKAGMGLANQVPPVVVELKSDASPVAVRQYPMSKEAREGIRPHIQRFLDLGILVPCQSPWNTPLLPVKKPGTNDYRPVQDLREVNKRVQDIHPTVPNPYNLLSSLPPSHTWYSVLDLKDAFFCLKLHPNSQPLFAFEWRDPEKGNTGQLTWTRLPQGFKNSPTLFNEALHRDLASFRALNPQVVMLQYVDDLLVAAPTYRDCKEGTRRLLQELSKLGYRVSAKKAQLCREEVTYLGYLLKGGKRWLTPARKATVMKIPTPTTPRQVREFLGTAGFCRLWIPGFASLAAPLYPLTRPKVPFTWTEAHQEAFGRIKEALLSAPALALPDLTKPFALYVDEKEGVARGVLTQTLGPWRRPVAYLSKKLDPVASGWPTCLKAIAAVALLLKDADKLTLGQNVLVIAPHNLESIVRQPPDRWMTNARMTHYQSLLLNERVSFAPPAILNPATLLPVESDDTPIHICSEILAEETGTRPDLRDQPLPGVPAWYTDGSSFIMDGRRQAGAAIVDNKRTVWASNLPEGTSAQKAELIALTQALRLAEGKSINIYTDSRYAFATAHVHGAIYKQRGWLTSAGKDIKNKEEILALLEAIHLPKRVAIIHCPGHQRGTDPVATGNRKADEAAKQAAQSTRILTETTKNAGKRTADGSEFEKRTADGSEFESPKKKAKVE

SEQ ID NO: 6676 - protein, 2213 aa, synthetic construct
MPAAKRVKLDGGDKKYSIGLDIGTNSVGWAVITDEYKVPSKKFKVLGNTDRHSIKKNLIGALLFDSGETAEATRLKRTARRRYTRRKNRICYLQEIFSNEMAKVDDSFFHRLEESFLVEEDKKHERHPIFGNIVDEVAYHEKYPTIYHLRKKLVDSTDKADLRLIYLALAHMIKFRGHFLIEGDLNPDNSDVDKLFIQLVQTYNQLFEENPINASGVDAKAILSARLSKSRRLENLIAQLPGEKKNGLFGNLIALSLGLTPNFKSNFDLAEDAKLQLSKDTYDDDLDNLLAQIGDQYADLFLAAKNLSDAILLSDILRVNTEITKAPLSASMIKRYDEHHQDLTLLKALVRQQLPEKYKEIFFDQSKNGYAGYIDGGASQEEFYKFIKPILEKMDGTEELLVKLNREDLLRKQRTFDNGSIPHQIHLGELHAILRRQEDFYPFLKDNREKIEKILTFRIPYYVGPLARGNSRFAWMTRKSEETITPWNFEEVVDKGASAQSFIERMTNFDKNLPNEKVLPKHSLLYEYFTVYNELTKVKYVTEGMRKPAFLSGEQKKAIVDLLFKTNRKVTVKQLKEDYFKKIECFDSVEISGVEDRFNASLGTYHDLLKIIKDKDFLDNEENEDILEDIVLTLTLFEDREMIEERLKTYAHLFDDKVMKQLKRRRYTGWGRLSRKLINGIRDKQSGKTILDFLKSDGFANRNFMQLIHDDSLTFKEDIQKAQVSGQGDSLHEHIANLAGSPAIKKGILQTVKVVDELVKVMGRHKPENIVIEMARENQTTQKGQKNSRERMKRIEEGIKELGSQILKEHPVENTQLQNEKLYLYYLQNGRDMYVDQELDINRLSDYDVDHIVPQSFLKDDSIDNKVLTRSDKARGKSDNVPSEEVVKKMKNYWRQLLNAKLITQRKFDNLTKAERGGLSELDKAGFIKRQLVETRQITKHVAQILDSRMNTKYDENDKLIREVKVITLKSKLVSDFRKDFQFYKVREINNYHHAHDAYLNAVVGTALIKKYPKLESEFVYGDYKVYDVRKMIAKSEQEIGKATAKYFFYSNIMNFFKTEITLANGEIRKRPLIETNGETGEIVWDKGRDFATVRKVLSMPQVNIVKKTEVQTGGFSKESILPKRNSDKLIARKKDWDPKKYGGFDSPTVAYSVLVVAKVEKGKSKKLKSVKELLGITIMERSSFEKNPIDFLEAKGYKEVKKDLIIKLPKYSLFELENGRKRMLASAGELQKGNELALPSKYVNFLYLASHYEKLKGSPEDNEQKQLFVEQHKHYLDEIIEQISEFSKRVILADANLDKVLSAYNKHRDKPIREQAENIIHLFTLTNLGAPAAFKYFDTTIDRKRYTSTKEVLDATLIHQSITGLYETRIDLSQLGGDGGGSSGGGGGTLGDQGSRGSDPLPEPRVTLTVEGIPTEFLVNTGAEHSVLTKPMGKMGSKRTVVAGATGSKVYPWTTKRLLKIGQKQVTHSFLVIPECPAPLLGRDLLTKLKAQIQFSTEGPQVTWEDRPAMCLVLNLEEEYRLHEKPVPPSIDPSWLQLFPMVWAEKAGMGLANQVPPVVVELKSDASPVAVRQYPMSKEAREGIRPHIQRFLDLGILVPCQSPWNTPLLPVKKPGTNDYRPVQDLREVNKRVQDIHPTVPNPYNLLSSLPPSHTWYSVLDLKDAFFCLKLHPNSQPLFAFEWRDPEKGNTGQLTWTRLPQGFKNSPTLFNEALHRDLASFRALNPQVVMLQYVDDLLVAAPTYRDCKEGTRRLLQELSKLGYRVSAKKAQLCREEVTYLGYLLKGGKRWLTPARKATVMKIPTPTTPRQVREFLGKAGFCRLFIPGFASLAAPLYPLTRPKVPFTWTEAHQEAFGRIKEALLSAPALALPDLTKPFALYVDEKEGVARGVLTQTLGPWRRPVAYLSKKLDPVASGWPTCLKAIAAVALLLKDADKLTLGQNVLVIAPHNLESIVRQPPDRWMTNARMTHYQSLLLNERVSFAPPAILNPATLLPVESDDTPIHICSEILAEETGTRPDLRDQPLPGVPAWYTDGSSFIMDGRRQAGAAIVDNKRTVWASNLPEGTSAQKAELIALTQALRLAEGKSINIYTDSRYAFATAHVHGAIYKQRGWLTSAGKDIKNKEEILALLEAIHLPKRVAIIHCPGHQRGTDPVATGNRKADEAAKQAAQSTRILTETTKNAGKRTADGSEFEKRTADGSEFESPKKKAKVE

SEQ ID NO: 6677 - protein, 2091 aa, synthetic construct
MPAAKRVKLDGGDKKYSIGLDIGTNSVGWAVITDEYKVPSKKFKVLGNTDRHSIKKNLIGALLFDSGETAEATRLKRTARRRYTRRKNRICYLQEIFSNEMAKVDDSFFHRLEESFLVEEDKKHERHPIFGNIVDEVAYHEKYPTIYHLRKKLVDSTDKADLRLIYLALAHMIKFRGHFLIEGDLNPDNSDVDKLFIQLVQTYNQLFEENPINASGVDAKAILSARLSKSRRLENLIAQLPGEKKNGLFGNLIALSLGLTPNFKSNFDLAEDAKLQLSKDTYDDDLDNLLAQIGDQYADLFLAAKNLSDAILLSDILRVNTEITKAPLSASMIKRYDEHHQDLTLLKALVRQQLPEKYKEIFFDQSKNGYAGYIDGGASQEEFYKFIKPILEKMDGTEELLVKLNREDLLRKQRTFDNGSIPHQIHLGELHAILRRQEDFYPFLKDNREKIEKILTFRIPYYVGPLARGNSRFAWMTRKSEETITPWNFEEVVDKGASAQSFIERMTNFDKNLPNEKVLPKHSLLYEYFTVYNELTKVKYVTEGMRKPAFLSGEQKKAIVDLLFKTNRKVTVKQLKEDYFKKIECFDSVEISGVEDRFNASLGTYHDLLKIIKDKDFLDNEENEDILEDIVLTLTLFEDREMIEERLKTYAHLFDDKVMKQLKRRRYTGWGRLSRKLINGIRDKQSGKTILDFLKSDGFANRNFMQLIHDDSLTFKEDIQKAQVSGQGDSLHEHIANLAGSPAIKKGILQTVKVVDELVKVMGRHKPENIVIEMARENQTTQKGQKNSRERMKRIEEGIKELGSQILKEHPVENTQLQNEKLYLYYLQNGRDMYVDQELDINRLSDYDVDHIVPQSFLKDDSIDNKVLTRSDKARGKSDNVPSEEVVKKMKNYWRQLLNAKLITQRKFDNLTKAERGGLSELDKAGFIKRQLVETRQITKHVAQILDSRMNTKYDENDKLIREVKVITLKSKLVSDFRKDFQFYKVREINNYHHAHDAYLNAVVGTALIKKYPKLESEFVYGDYKVYDVRKMIAKSEQEIGKATAKYFFYSNIMNFFKTEITLANGEIRKRPLIETNGETGEIVWDKGRDFATVRKVLSMPQVNIVKKTEVQTGGFSKESILPKRNSDKLIARKKDWDPKKYGGFDSPTVAYSVLVVAKVEKGKSKKLKSVKELLGITIMERSSFEKNPIDFLEAKGYKEVKKDLIIKLPKYSLFELENGRKRMLASAGELQKGNELALPSKYVNFLYLASHYEKLKGSPEDNEQKQLFVEQHKHYLDEIIEQISEFSKRVILADANLDKVLSAYNKHRDKPIREQAENIIHLFTLTNLGAPAAFKYFDTTIDRKRYTSTKEVLDATLIHQSITGLYETRIDLSQLGGDGGGSSGGGGGTLNLEDEYRLYETSAEPEVSPGSTWLSDFPQAWAETGGMGLAVRQAPLIIPLKATSTPVSIKQYPMSQEAKLGIKPHIQRLLDQGILVPCQSPWNTPLLPVKKPGTNDYRPVQDLREVNKRVEDIHPTVPNPYNLLSGLPPSHRWYTVLDLKDAFFCLRLHPTSQPLFAFEWRDPGMGISGQLTWTRLPQGFKNSPTLFNEALHRDLADFRIQHPDLILLQYVDDILLAATSELDCQQGTRALLLTLGNLGYRASAKKAQLCQKQVKYLGYLLKEGQRWLTEARKETVMGQPTPKTPRQLREFLGTAGFCRLWIPGFAEMAAPLYPLTKPGTLFNWGPDQQKAYQEIKQALLTAPALGLPDLTKPFELFVDEKQGYAKGVLTQKLGPWRRPVAYLSKKLDPVAAGWPPCLRMVAAIAVLRKDAGKLTMGQPLVILAPHAVEALVKQPPDRWLSNARMTHYQAMLLDTDRVQFGPVVALNPATLLPLPEEGAPHDCLEILAETHGTRPDLTDQPIPDADHTWYTDGSSFLQEGQRKAGAAVTTETEVIWARALPAGTSAQRAELIALTQALKMAEGKRLNVYTDSRYAFATAHIHGEIYRRRGWLTSEGREIKNKSEILALLKALFLPKRLSIIHCLGHQKGDSAEARGNRLADQAAREAAIKTPPDTSTLLAGKRTADGSEFEKRTADGSEFESPKKKAKVE

SEQ ID NO: 6678 - protein, 2091 aa, synthetic construct
MPAAKRVKLDGGDKKYSIGLDIGTNSVGWAVITDEYKVPSKKFKVLGNTDRHSIKKNLIGALLFDSGETAEATRLKRTARRRYTRRKNRICYLQEIFSNEMAKVDDSFFHRLEESFLVEEDKKHERHPIFGNIVDEVAYHEKYPTIYHLRKKLVDSTDKADLRLIYLALAHMIKFRGHFLIEGDLNPDNSDVDKLFIQLVQTYNQLFEENPINASGVDAKAILSARLSKSRRLENLIAQLPGEKKNGLFGNLIALSLGLTPNFKSNFDLAEDAKLQLSKDTYDDDLDNLLAQIGDQYADLFLAAKNLSDAILLSDILRVNTEITKAPLSASMIKRYDEHHQDLTLLKALVRQQLPEKYKEIFFDQSKNGYAGYIDGGASQEEFYKFIKPILEKMDGTEELLVKLNREDLLRKQRTFDNGSIPHQIHLGELHAILRRQEDFYPFLKDNREKIEKILTFRIPYYVGPLARGNSRFAWMTRKSEETITPWNFEEVVDKGASAQSFIERMTNFDKNLPNEKVLPKHSLLYEYFTVYNELTKVKYVTEGMRKPAFLSGEQKKAIVDLLFKTNRKVTVKQLKEDYFKKIECFDSVEISGVEDRFNASLGTYHDLLKIIKDKDFLDNEENEDILEDIVLTLTLFEDREMIEERLKTYAHLFDDKVMKQLKRRRYTGWGRLSRKLINGIRDKQSGKTILDFLKSDGFANRNFMQLIHDDSLTFKEDIQKAQVSGQGDSLHEHIANLAGSPAIKKGILQTVKVVDELVKVMGRHKPENIVIEMARENQTTQKGQKNSRERMKRIEEGIKELGSQILKEHPVENTQLQNEKLYLYYLQNGRDMYVDQELDINRLSDYDVDHIVPQSFLKDDSIDNKVLTRSDKARGKSDNVPSEEVVKKMKNYWRQLLNAKLITQRKFDNLTKAERGGLSELDKAGFIKRQLVETRQITKHVAQILDSRMNTKYDENDKLIREVKVITLKSKLVSDFRKDFQFYKVREINNYHHAHDAYLNAVVGTALIKKYPKLESEFVYGDYKVYDVRKMIAKSEQEIGKATAKYFFYSNIMNFFKTEITLANGEIRKRPLIETNGETGEIVWDKGRDFATVRKVLSMPQVNIVKKTEVQTGGFSKESILPKRNSDKLIARKKDWDPKKYGGFDSPTVAYSVLVVAKVEKGKSKKLKSVKELLGITIMERSSFEKNPIDFLEAKGYKEVKKDLIIKLPKYSLFELENGRKRMLASAGELQKGNELALPSKYVNFLYLASHYEKLKGSPEDNEQKQLFVEQHKHYLDEIIEQISEFSKRVILADANLDKVLSAYNKHRDKPIREQAENIIHLFTLTNLGAPAAFKYFDTTIDRKRYTSTKEVLDATLIHQSITGLYETRIDLSQLGGDGGGSSGGGGGTLGIEDEYRLHETSTEPDVSLGSTWLSDFPQAWAETGGMGLAVRQAPLIIPLKATSTPVSIQQYPMSHEARLGIKPHIQRLLDQGILVPCQSPWNTPLLPVKKPGTNDYRPVQDLREVNKRVEDIHPTVPNPYNLLSGLPPSHQWYTVLDLKDAFFCLRLHPTSQPLFAFEWRDPGMGISGQLTWTRLPQGFKNSPTLFDEALHRDLADFRIQHPDLILLQYVDDILLAATSELDCQQGTRALLQTLGDLGYRASAKKAQICQKQVKYLGYLLREGQRWLTEARKETVMGQPVPKTPRQLREFLGTAGFCRLWIPGFAEMAAPLYPLTKTGTLFSWGPDQQKAYQEIKQALLTAPALGLPDLTKPFELFVDEKQGYAKGVLTQKLGPWRRPVAYLSKKLDPVAAGWPPCLRMVAAIAVLTKDAGKLTMGQPLVILAPHAVEALVKQPPDRWLSNARMTHYQAMLLDTDRVQFGPVVALNPATLLPLPEEGAPHDCLEILAETHGTRPDLTDQPIPDADHTWYTDGSSFLQEGQRKAGAAVTTETEVIWAGALPAGTSAQRAELIALTQALKMAEGKRLNVYTDSRYAFATAHIHGEIYRRRGLLTSEGREIKNKSEILALLKALFLPKRLSIIHCLGHQKGDSAEARGNRLADQAAREAAIKTPPDTSTLLAGKRTADGSEFEKRTADGSEFESPKKKAKVE

SEQ ID NO: 6679 - protein, 2091 aa, synthetic construct
MPAAKRVKLDGGDKKYSIGLDIGTNSVGWAVITDEYKVPSKKFKVLGNTDRHSIKKNLIGALLFDSGETAEATRLKRTARRRYTRRKNRICYLQEIFSNEMAKVDDSFFHRLEESFLVEEDKKHERHPIFGNIVDEVAYHEKYPTIYHLRKKLVDSTDKADLRLIYLALAHMIKFRGHFLIEGDLNPDNSDVDKLFIQLVQTYNQLFEENPINASGVDAKAILSARLSKSRRLENLIAQLPGEKKNGLFGNLIALSLGLTPNFKSNFDLAEDAKLQLSKDTYDDDLDNLLAQIGDQYADLFLAAKNLSDAILLSDILRVNTEITKAPLSASMIKRYDEHHQDLTLLKALVRQQLPEKYKEIFFDQSKNGYAGYIDGGASQEEFYKFIKPILEKMDGTEELLVKLNREDLLRKQRTFDNGSIPHQIHLGELHAILRRQEDFYPFLKDNREKIEKILTFRIPYYVGPLARGNSRFAWMTRKSEETITPWNFEEVVDKGASAQSFIERMTNFDKNLPNEKVLPKHSLLYEYFTVYNELTKVKYVTEGMRKPAFLSGEQKKAIVDLLFKTNRKVTVKQLKEDYFKKIECFDSVEISGVEDRFNASLGTYHDLLKIIKDKDFLDNEENEDILEDIVLTLTLFEDREMIEERLKTYAHLFDDKVMKQLKRRRYTGWGRLSRKLINGIRDKQSGKTILDFLKSDGFANRNFMQLIHDDSLTFKEDIQKAQVSGQGDSLHEHIANLAGSPAIKKGILQTVKVVDELVKVMGRHKPENIVIEMARENQTTQKGQKNSRERMKRIEEGIKELGSQILKEHPVENTQLQNEKLYLYYLQNGRDMYVDQELDINRLSDYDVDHIVPQSFLKDDSIDNKVLTRSDKARGKSDNVPSEEVVKKMKNYWRQLLNAKLITQRKFDNLTKAERGGLSELDKAGFIKRQLVETRQITKHVAQILDSRMNTKYDENDKLIREVKVITLKSKLVSDFRKDFQFYKVREINNYHHAHDAYLNAVVGTALIKKYPKLESEFVYGDYKVYDVRKMIAKSEQEIGKATAKYFFYSNIMNFFKTEITLANGEIRKRPLIETNGETGEIVWDKGRDFATVRKVLSMPQVNIVKKTEVQTGGFSKESILPKRNSDKLIARKKDWDPKKYGGFDSPTVAYSVLVVAKVEKGKSKKLKSVKELLGITIMERSSFEKNPIDFLEAKGYKEVKKDLIIKLPKYSLFELENGRKRMLASAGELQKGNELALPSKYVNFLYLASHYEKLKGSPEDNEQKQLFVEQHKHYLDEIIEQISEFSKRVILADANLDKVLSAYNKHRDKPIREQAENIIHLFTLTNLGAPAAFKYFDTTIDRKRYTSTKEVLDATLIHQSITGLYETRIDLSQLGGDGGGSSGGGGGTLNIEDEYRLHETSKGPDVPLGSTWLSDFPQAWAETGGMGLAVRQAPLIIPLKATSTPVSIKQYPMSQEARLGIKPHIQRLLDQGILVPCQSPWNTPLLPVKKPGTNDYRPVQDLREVNKRVEDIHPTVPNPYNLLSGLPPSHQWYTVLDLKDAFFCLRLHPTSQSLFAFEWRDPEMGISGQLTWTRLPQGFKNSPTLFNEALHRDLADFRIQHPDLILLQYVDDLLLAATSELDCQQGTRALLQTLGDLGYRASAKKAQICQKQVKYLGYLLKEGQRWLTEARKETVMGQPTPKTPRQLREFLGTAGFCRLWIPGFAEMAAPLYPLTKPGTLFEWGPDQQKAYQEIKQALLTAPALGLPDLTKPFELFVDEKQGYAKGVLTQKLGPWRRPVAYLSKKLDPVAAGWPPCLRMVAAIAVLTKDAGKLTMGQPLVILAPHAVEALVKQPPDRWLSNARMTHYQALLLDTDRVQFGPIVALNPATLLPLPEEGLQHDCLDILAEAHGTRPDLTDQPLPDADHTWYTDGSSFLQEGQRKAGAAVTTETEVVWAKALPAGTSAQRAELIALTQALKMAEGKKLNVYTDSRYAFATAHIHGEIYRRRGWLTSEGKEIKNKDEILALLKALFLPKRLSIIHCPGHQKGNRAEARGNRMADQAAREVATRETPETSTLLAGKRTADGSEFEKRTADGSEFESPKKKAKVE

SEQ ID NO: 6680 - protein, 2085 aa, synthetic construct
MPAAKRVKLDGGDKKYSIGLDIGTNSVGWAVITDEYKVPSKKFKVLGNTDRHSIKKNLIGALLFDSGETAEATRLKRTARRRYTRRKNRICYLQEIFSNEMAKVDDSFFHRLEESFLVEEDKKHERHPIFGNIVDEVAYHEKYPTIYHLRKKLVDSTDKADLRLIYLALAHMIKFRGHFLIEGDLNPDNSDVDKLFIQLVQTYNQLFEENPINASGVDAKAILSARLSKSRRLENLIAQLPGEKKNGLFGNLIALSLGLTPNFKSNFDLAEDAKLQLSKDTYDDDLDNLLAQIGDQYADLFLAAKNLSDAILLSDILRVNTEITKAPLSASMIKRYDEHHQDLTLLKALVRQQLPEKYKEIFFDQSKNGYAGYIDGGASQEEFYKFIKPILEKMDGTEELLVKLNREDLLRKQRTFDNGSIPHQIHLGELHAILRRQEDFYPFLKDNREKIEKILTFRIPYYVGPLARGNSRFAWMTRKSEETITPWNFEEVVDKGASAQSFIERMTNFDKNLPNEKVLPKHSLLYEYFTVYNELTKVKYVTEGMRKPAFLSGEQKKAIVDLLFKTNRKVTVKQLKEDYFKKIECFDSVEISGVEDRFNASLGTYHDLLKIIKDKDFLDNEENEDILEDIVLTLTLFEDREMIEERLKTYAHLFDDKVMKQLKRRRYTGWGRLSRKLINGIRDKQSGKTILDFLKSDGFANRNFMQLIHDDSLTFKEDIQKAQVSGQGDSLHEHIANLAGSPAIKKGILQTVKVVDELVKVMGRHKPENIVIEMARENQTTQKGQKNSRERMKRIEEGIKELGSQILKEHPVENTQLQNEKLYLYYLQNGRDMYVDQELDINRLSDYDVDHIVPQSFLKDDSIDNKVLTRSDKARGKSDNVPSEEVVKKMKNYWRQLLNAKLITQRKFDNLTKAERGGLSELDKAGFIKRQLVETRQITKHVAQILDSRMNTKYDENDKLIREVKVITLKSKLVSDFRKDFQFYKVREINNYHHAHDAYLNAVVGTALIKKYPKLESEFVYGDYKVYDVRKMIAKSEQEIGKATAKYFFYSNIMNFFKTEITLANGEIRKRPLIETNGETGEIVWDKGRDFATVRKVLSMPQVNIVKKTEVQTGGFSKESILPKRNSDKLIARKKDWDPKKYGGFDSPTVAYSVLVVAKVEKGKSKKLKSVKELLGITIMERSSFEKNPIDFLEAKGYKEVKKDLIIKLPKYSLFELENGRKRMLASAGELQKGNELALPSKYVNFLYLASHYEKLKGSPEDNEQKQLFVEQHKHYLDEIIEQISEFSKRVILADANLDKVLSAYNKHRDKPIREQAENIIHLFTLTNLGAPAAFKYFDTTIDRKRYTSTKEVLDATLIHQSITGLYETRIDLSQLGGDGGGSSGGGGGTLQLDDEYRLYSPLVKPDQNIQFWLEQFPQAWAETAGMGLAKQVPPQVIQLKASATPVSVRQYPLSKEAQEGIRPHVQRLIQQGILVPVQSPWNTPLLPVRKPGTNDYRPVQDLREVNKRVQDIHPTVPNPYNLLCALPPQRSWYTVLDLKDAFFCLRLHPTSQPLFAFEWRDPGTGRTGQLTWTRLPQGFKNSPTIFDEALHRDLANFRIQHPQVTLLQYVDDLLLAGATKQDCLEGTKALLLELSDLGYRASAKKAQICRREVTYLGYSLRDGQRWLTEARKKTVVQIPAPTTAKQVREFLGTAGFCRLWIPGFATLAAPLYPLTKEKGEFSWAPEHQKAFDAIKKALLSAPALALPDVTKPFTLYVDERKGVARGVLTQTLGPWRRPVAYLSKKLDPVASGWPVCLKAIAAVAILVKDADKLTLGQNITVIAPHALENIVRQPPDRWMTNARMTHYQSLLLTERVTFAPPAALNPATLLPEETDEPVTHDCHQLLIEETGVRKDLTDIPLTGEVLTWFTDGSSYVVEGKRMAGAAVVDGTRTIWASSLPEGTSAQKAELMALTQALRLAEGKSINIYTDSRYAFATAHVHGAIYKQRGLLTSAGREIKNKEEILSLLEALHLPKRLAIIHCPGHQKAKDPISRGNQMADRVAKQAAQGVNLLAGKRTADGSEFEKRTADGSEFESPKKKAKVE

SEQ ID NO: 6681 - protein, 2171 aa, synthetic construct
MPAAKRVKLDGGDKKYSIGLDIGTNSVGWAVITDEYKVPSKKFKVLGNTDRHSIKKNLIGALLFDSGETAEATRLKRTARRRYTRRKNRICYLQEIFSNEMAKVDDSFFHRLEESFLVEEDKKHERHPIFGNIVDEVAYHEKYPTIYHLRKKLVDSTDKADLRLIYLALAHMIKFRGHFLIEGDLNPDNSDVDKLFIQLVQTYNQLFEENPINASGVDAKAILSARLSKSRRLENLIAQLPGEKKNGLFGNLIALSLGLTPNFKSNFDLAEDAKLQLSKDTYDDDLDNLLAQIGDQYADLFLAAKNLSDAILLSDILRVNTEITKAPLSASMIKRYDEHHQDLTLLKALVRQQLPEKYKEIFFDQSKNGYAGYIDGGASQEEFYKFIKPILEKMDGTEELLVKLNREDLLRKQRTFDNGSIPHQIHLGELHAILRRQEDFYPFLKDNREKIEKILTFRIPYYVGPLARGNSRFAWMTRKSEETITPWNFEEVVDKGASAQSFIERMTNFDKNLPNEKVLPKHSLLYEYFTVYNELTKVKYVTEGMRKPAFLSGEQKKAIVDLLFKTNRKVTVKQLKEDYFKKIECFDSVEISGVEDRFNASLGTYHDLLKIIKDKDFLDNEENEDILEDIVLTLTLFEDREMIEERLKTYAHLFDDKVMKQLKRRRYTGWGRLSRKLINGIRDKQSGKTILDFLKSDGFANRNFMQLIHDDSLTFKEDIQKAQVSGQGDSLHEHIANLAGSPAIKKGILQTVKVVDELVKVMGRHKPENIVIEMARENQTTQKGQKNSRERMKRIEEGIKELGSQILKEHPVENTQLQNEKLYLYYLQNGRDMYVDQELDINRLSDYDVDHIVPQSFLKDDSIDNKVLTRSDKARGKSDNVPSEEVVKKMKNYWRQLLNAKLITQRKFDNLTKAERGGLSELDKAGFIKRQLVETRQITKHVAQILDSRMNTKYDENDKLIREVKVITLKSKLVSDFRKDFQFYKVREINNYHHAHDAYLNAVVGTALIKKYPKLESEFVYGDYKVYDVRKMIAKSEQEIGKATAKYFFYSNIMNFFKTEITLANGEIRKRPLIETNGETGEIVWDKGRDFATVRKVLSMPQVNIVKKTEVQTGGFSKESILPKRNSDKLIARKKDWDPKKYGGFDSPTVAYSVLVVAKVEKGKSKKLKSVKELLGITIMERSSFEKNPIDFLEAKGYKEVKKDLIIKLPKYSLFELENGRKRMLASAGELQKGNELALPSKYVNFLYLASHYEKLKGSPEDNEQKQLFVEQHKHYLDEIIEQISEFSKRVILADANLDKVLSAYNKHRDKPIREQAENIIHLFTLTNLGAPAAFKYFDTTIDRKRYTSTKEVLDATLIHQSITGLYETRIDLSQLGGDGGGSSGGGGGMDPLQLLQPLEAEIKGTKLKAHWNSGATITCVPQAFLEEEVPIKNIWIKTIHGEKEQPVYYLTFKIQGRKVEAEVISSPYDYILVSPSDIPWLMKKPLQLTTLVPLQEYEERLLKQTMLTGSYKEKLQSLFLKYDALWQHWENQVGHRRIKPHHIATGTVNPRPQKQYPINPKAKASIQTVINDLLKQGVLIQQNSIMNTPVYPVPKPDGKWRMVLDYREVNKTIPLIAAQNQHSAGILSSIFRGKYKTTLDLSNGFWAHSITPESYWLTAFTWLGQQYCWTRLPQGFLNSPALFNADVVDLLKEVPNVQVYVDDIYISHDDPREHLEQLEKVFSLLLNAGYVVSLKKSEIAQHEVEFLGFNITKEGRGLTETFKQKLLNITPPRDLKQLQSILGKLNFARNFIPNFSELVKPLYNIIATAPGKYITWTTDNSQQLQNIISMLNSAENLEERNPEVRLIMKVNTSPSAGYIRFYNEFAKRPIMYLNYVYTKAEVKFTNTEKLLTTIHKGLIKALDLGMGQEILVYSPIVSMTKIQKTPLPERKALPIRWITWMSYLEDPRIQFHYDKTLPELQQVPTVTDDIIAKIKHPSEFSMVFYTDGSAIKHPNVNKSHNAGMGIAQVQFKPEFTVINTWSIPLGDHTAQLAEVAAVEFACKKALKIDGPVLIVTDSFYVAESVNKELPYWQSNGFFNNKKKPLKHVSKWKSIADCIQLKPDIIIIHEKGHQPTASTFHTEGNNLADKLATQGSYVVNAGKRTADGSEFEKRTADGSEFESPKKKAKVE

SEQ ID NO: 6682 - protein, 2089 aa, synthetic construct
MPAAKRVKLDGGDKKYSIGLDIGTNSVGWAVITDEYKVPSKKFKVLGNTDRHSIKKNLIGALLFDSGETAEATRLKRTARRRYTRRKNRICYLQEIFSNEMAKVDDSFFHRLEESFLVEEDKKHERHPIFGNIVDEVAYHEKYPTIYHLRKKLVDSTDKADLRLIYLALAHMIKFRGHFLIEGDLNPDNSDVDKLFIQLVQTYNQLFEENPINASGVDAKAILSARLSKSRRLENLIAQLPGEKKNGLFGNLIALSLGLTPNFKSNFDLAEDAKLQLSKDTYDDDLDNLLAQIGDQYADLFLAAKNLSDAILLSDILRVNTEITKAPLSASMIKRYDEHHQDLTLLKALVRQQLPEKYKEIFFDQSKNGYAGYIDGGASQEEFYKFIKPILEKMDGTEELLVKLNREDLLRKQRTFDNGSIPHQIHLGELHAILRRQEDFYPFLKDNREKIEKILTFRIPYYVGPLARGNSRFAWMTRKSEETITPWNFEEVVDKGASAQSFIERMTNFDKNLPNEKVLPKHSLLYEYFTVYNELTKVKYVTEGMRKPAFLSGEQKKAIVDLLFKTNRKVTVKQLKEDYFKKIECFDSVEISGVEDRFNASLGTYHDLLKIIKDKDFLDNEENEDILEDIVLTLTLFEDREMIEERLKTYAHLFDDKVMKQLKRRRYTGWGRLSRKLINGIRDKQSGKTILDFLKSDGFANRNFMQLIHDDSLTFKEDIQKAQVSGQGDSLHEHIANLAGSPAIKKGILQTVKVVDELVKVMGRHKPENIVIEMARENQTTQKGQKNSRERMKRIEEGIKELGSQILKEHPVENTQLQNEKLYLYYLQNGRDMYVDQELDINRLSDYDVDHIVPQSFLKDDSIDNKVLTRSDKARGKSDNVPSEEVVKKMKNYWRQLLNAKLITQRKFDNLTKAERGGLSELDKAGFIKRQLVETRQITKHVAQILDSRMNTKYDENDKLIREVKVITLKSKLVSDFRKDFQFYKVREINNYHHAHDAYLNAVVGTALIKKYPKLESEFVYGDYKVYDVRKMIAKSEQEIGKATAKYFFYSNIMNFFKTEITLANGEIRKRPLIETNGETGEIVWDKGRDFATVRKVLSMPQVNIVKKTEVQTGGFSKESILPKRNSDKLIARKKDWDPKKYGGFDSPTVAYSVLVVAKVEKGKSKKLKSVKELLGITIMERSSFEKNPIDFLEAKGYKEVKKDLIIKLPKYSLFELENGRKRMLASAGELQKGNELALPSKYVNFLYLASHYEKLKGSPEDNEQKQLFVEQHKHYLDEIIEQISEFSKRVILADANLDKVLSAYNKHRDKPIREQAENIIHLFTLTNLGAPAAFKYFDTTIDRKRYTSTKEVLDATLIHQSITGLYETRIDLSQLGGDGGGSSGGGGGVLNLEEEYRLHEKPVPSSIDPSWLQLFPTVWAERAGMGLANQVPPVVVELRSGASPVAVRQYPMSKEAREGIRPHIQRFLDLGVLVPCQSPWNTPLLPVKKPGTNDYRPVQDLREINKRVQDIHPTVPNPYNLLSSLPPSHTWYSVLDLKDAFFCLKLHPNSQPLFAFEWRDPEKGNTGQLTWTRLPQGFKNSPTLFDEALHRDLAPFRALNPQVVLLQYVDDLLVAAPTYRDCKEGTQKLLQELSKLGYRVSAKKAQLCQKEVTYLGYLLKEGKRWLTPARKATVMKIPPPTTPRQVREFLGTAGFCRLWIPGFASLAAPLYPLTKESIPFIWTEEHQKAFDRIKEALLSAPALALPDLTKPFTLYVDERAGVARGVLTQTLGPWRRPVAYLSKKLDPVASGWPTCLKAVAAVALLLKDADKLTLGQNVTVIASHSLESIVRQPPDRWMTNARMTHYQSLLLNERVSFAPPAVLNPATLLPVESEATPVHRCSEILAEETGTRRDLKDQPLPGVPAWYTDGSSFIAEGKRRAGAAIVDGKRTVWASSLPEGTSAQKAELVALTQALRLAEGKDINIYTDSRYAFATAHIHGAIYKQRGLLTSAGKDIKNKEEILALLEAIHLPKRVAIIHCPGHQKGNDPVATGNRRADEAAKQAALSTRVLAETTKPAGKRTADGSEFEKRTADGSEFESPKKKAKVE

SEQ ID NO: 6683 - protein, 2095 aa, synthetic construct
MPAAKRVKLDGGDKKYSIGLDIGTNSVGWAVITDEYKVPSKKFKVLGNTDRHSIKKNLIGALLFDSGETAEATRLKRTARRRYTRRKNRICYLQEIFSNEMAKVDDSFFHRLEESFLVEEDKKHERHPIFGNIVDEVAYHEKYPTIYHLRKKLVDSTDKADLRLIYLALAHMIKFRGHFLIEGDLNPDNSDVDKLFIQLVQTYNQLFEENPINASGVDAKAILSARLSKSRRLENLIAQLPGEKKNGLFGNLIALSLGLTPNFKSNFDLAEDAKLQLSKDTYDDDLDNLLAQIGDQYADLFLAAKNLSDAILLSDILRVNTEITKAPLSASMIKRYDEHHQDLTLLKALVRQQLPEKYKEIFFDQSKNGYAGYIDGGASQEEFYKFIKPILEKMDGTEELLVKLNREDLLRKQRTFDNGSIPHQIHLGELHAILRRQEDFYPFLKDNREKIEKILTFRIPYYVGPLARGNSRFAWMTRKSEETITPWNFEEVVDKGASAQSFIERMTNFDKNLPNEKVLPKHSLLYEYFTVYNELTKVKYVTEGMRKPAFLSGEQKKAIVDLLFKTNRKVTVKQLKEDYFKKIECFDSVEISGVEDRFNASLGTYHDLLKIIKDKDFLDNEENEDILEDIVLTLTLFEDREMIEERLKTYAHLFDDKVMKQLKRRRYTGWGRLSRKLINGIRDKQSGKTILDFLKSDGFANRNFMQLIHDDSLTFKEDIQKAQVSGQGDSLHEHIANLAGSPAIKKGILQTVKVVDELVKVMGRHKPENIVIEMARENQTTQKGQKNSRERMKRIEEGIKELGSQILKEHPVENTQLQNEKLYLYYLQNGRDMYVDQELDINRLSDYDVDHIVPQSFLKDDSIDNKVLTRSDKARGKSDNVPSEEVVKKMKNYWRQLLNAKLITQRKFDNLTKAERGGLSELDKAGFIKRQLVETRQITKHVAQILDSRMNTKYDENDKLIREVKVITLKSKLVSDFRKDFQFYKVREINNYHHAHDAYLNAVVGTALIKKYPKLESEFVYGDYKVYDVRKMIAKSEQEIGKATAKYFFYSNIMNFFKTEITLANGEIRKRPLIETNGETGEIVWDKGRDFATVRKVLSMPQVNIVKKTEVQTGGFSKESILPKRNSDKLIARKKDWDPKKYGGFDSPTVAYSVLVVAKVEKGKSKKLKSVKELLGITIMERSSFEKNPIDFLEAKGYKEVKKDLIIKLPKYSLFELENGRKRMLASAGELQKGNELALPSKYVNFLYLASHYEKLKGSPEDNEQKQLFVEQHKHYLDEIIEQISEFSKRVILADANLDKVLSAYNKHRDKPIREQAENIIHLFTLTNLGAPAAFKYFDTTIDRKRYTSTKEVLDATLIHQSITGLYETRIDLSQLGGDGGGGGEAAAKGGTAPLEEEYRLFLEAPIQNVTLLEQWKREIPKVWAEINPPGLASTQAPIHVQLLSTALPVRVRQYPITLEAKRSLRETIRKFRAAGILRPVHSPWNTPLLPVRKSGTSEYRMVQDLREVNKRVETIHPTVPNPYTLLSLLPPDRIWYSVLDLKDAFFCIPLAPESQLIFAFEWADAEEGESGQLTWTRLPQGFKNSPTLFNEALNRDLQGFRLDHPSVSLLQYVDDLLIAADTQAACLSATRDLLMTLAELGYRVSGKKAQLCQEEVTYLGFKIHKGSRSLSNSRTQAILQIPVPKTKRQVREFLGTIGYCRLWIPGFAELAQPLYAATRPGNDPLVWGEKEEEAFQSLKLALTQPPALALPSLDKPFQLFVEETSGAAKGVLTQALGPWKRPVAYLSKRLDPVAAGWPRCLRAIAAAALLTREASKLTFGQDIEITSSHNLESLLRSPPDKWLTNARITQYQVLLLDPPRVRFKQTAALNPATLLPETDDTLPIHHCLDTLDSLTSTRPDLTDQPLAQAEATLFTDGSSYIRDGKRYAGAAVVTLDSVIWAEPLPIGTSAQKAELIALTKALEWSKDKSVNIYTDSRYAFATLHVHGMIYRERGWLTAGGKAIKNAPEILALLTAVWLPKRVAVMHCKGHQKDDAPTSTGNRRADEVAREVAIRPLSTQATISAGKRTADGSEFEKRTADGSEFESPKKKAKVE

SEQ ID NO: 6684 - protein, 2099 aa, synthetic construct
MPAAKRVKLDGGDKKYSIGLDIGTNSVGWAVITDEYKVPSKKFKVLGNTDRHSIKKNLIGALLFDSGETAEATRLKRTARRRYTRRKNRICYLQEIFSNEMAKVDDSFFHRLEESFLVEEDKKHERHPIFGNIVDEVAYHEKYPTIYHLRKKLVDSTDKADLRLIYLALAHMIKFRGHFLIEGDLNPDNSDVDKLFIQLVQTYNQLFEENPINASGVDAKAILSARLSKSRRLENLIAQLPGEKKNGLFGNLIALSLGLTPNFKSNFDLAEDAKLQLSKDTYDDDLDNLLAQIGDQYADLFLAAKNLSDAILLSDILRVNTEITKAPLSASMIKRYDEHHQDLTLLKALVRQQLPEKYKEIFFDQSKNGYAGYIDGGASQEEFYKFIKPILEKMDGTEELLVKLNREDLLRKQRTFDNGSIPHQIHLGELHAILRRQEDFYPFLKDNREKIEKILTFRIPYYVGPLARGNSRFAWMTRKSEETITPWNFEEVVDKGASAQSFIERMTNFDKNLPNEKVLPKHSLLYEYFTVYNELTKVKYVTEGMRKPAFLSGEQKKAIVDLLFKTNRKVTVKQLKEDYFKKIECFDSVEISGVEDRFNASLGTYHDLLKIIKDKDFLDNEENEDILEDIVLTLTLFEDREMIEERLKTYAHLFDDKVMKQLKRRRYTGWGRLSRKLINGIRDKQSGKTILDFLKSDGFANRNFMQLIHDDSLTFKEDIQKAQVSGQGDSLHEHIANLAGSPAIKKGILQTVKVVDELVKVMGRHKPENIVIEMARENQTTQKGQKNSRERMKRIEEGIKELGSQILKEHPVENTQLQNEKLYLYYLQNGRDMYVDQELDINRLSDYDVDHIVPQSFLKDDSIDNKVLTRSDKARGKSDNVPSEEVVKKMKNYWRQLLNAKLITQRKFDNLTKAERGGLSELDKAGFIKRQLVETRQITKHVAQILDSRMNTKYDENDKLIREVKVITLKSKLVSDFRKDFQFYKVREINNYHHAHDAYLNAVVGTALIKKYPKLESEFVYGDYKVYDVRKMIAKSEQEIGKATAKYFFYSNIMNFFKTEITLANGEIRKRPLIETNGETGEIVWDKGRDFATVRKVLSMPQVNIVKKTEVQTGGFSKESILPKRNSDKLIARKKDWDPKKYGGFDSPTVAYSVLVVAKVEKGKSKKLKSVKELLGITIMERSSFEKNPIDFLEAKGYKEVKKDLIIKLPKYSLFELENGRKRMLASAGELQKGNELALPSKYVNFLYLASHYEKLKGSPEDNEQKQLFVEQHKHYLDEIIEQISEFSKRVILADANLDKVLSAYNKHRDKPIREQAENIIHLFTLTNLGAPAAFKYFDTTIDRKRYTSTKEVLDATLIHQSITGLYETRIDLSQLGGDGGGGGEAAAKGGTVSLQDEHRLFDIPVTTSLPDVWLQDFPQAWAETGGLGRAKCQAPIIIDLKPTAVPVSIKQYPMSLEAHMGIRQHIIKFLELGVLRPCRSPWNTPLLPVKKPGTQDYRPVQDLREINKRTVDIHPTVPNPYNLLSTLKPDYSWYTVLDLKDAFFCLPLAPQSQELFAFEWKDPERGISGQLTWTRLPQGFKNSPTLFDEALHRDLTDFRTQHPEVTLLQYVDDLLLAAPTKKACTQGTRHLLQELGEKGYRASAKKAQICQTKVTYLGYILSEGKRWLTPGRIETVARIPPPRNPREVREFLGTAGFCRLWIPGFAELAAPLYALTKESTPFTWQTEHQLAFEALKKALLSAPALGLPDTSKPFTLFLDERQGIAKGVLTQKLGPWKRPVAYLSKKLDPVAAGWPPCLRIMAATAMLVKDSAKLTLGQPLTVITPHTLEAIVRQPPDRWITNARLTHYQALLLDTDRVQFGPPVTLNPATLLPVPENQPSPHDCRQVLAETHGTREDLKDQELPDADHTWYTDGSSYLDSGTRRAGAAVVDGHNTIWAQSLPPGTSAQKAELIALTKALELSKGKKANIYTDSRYAFATAHTHGSIYERRGLLTSEGKEIKNKAEIIALLKALFLPQEVAIIHCPGHQKGQDPVAVGNRQADRVARQAAMAEVLTLATEPDNTSHITAGKRTADGSEFEKRTADGSEFESPKKKAKVE

SEQ ID NO: 6685 - protein, 2092 aa, synthetic construct
MPAAKRVKLDGGDKKYSIGLDIGTNSVGWAVITDEYKVPSKKFKVLGNTDRHSIKKNLIGALLFDSGETAEATRLKRTARRRYTRRKNRICYLQEIFSNEMAKVDDSFFHRLEESFLVEEDKKHERHPIFGNIVDEVAYHEKYPTIYHLRKKLVDSTDKADLRLIYLALAHMIKFRGHFLIEGDLNPDNSDVDKLFIQLVQTYNQLFEENPINASGVDAKAILSARLSKSRRLENLIAQLPGEKKNGLFGNLIALSLGLTPNFKSNFDLAEDAKLQLSKDTYDDDLDNLLAQIGDQYADLFLAAKNLSDAILLSDILRVNTEITKAPLSASMIKRYDEHHQDLTLLKALVRQQLPEKYKEIFFDQSKNGYAGYIDGGASQEEFYKFIKPILEKMDGTEELLVKLNREDLLRKQRTFDNGSIPHQIHLGELHAILRRQEDFYPFLKDNREKIEKILTFRIPYYVGPLARGNSRFAWMTRKSEETITPWNFEEVVDKGASAQSFIERMTNFDKNLPNEKVLPKHSLLYEYFTVYNELTKVKYVTEGMRKPAFLSGEQKKAIVDLLFKTNRKVTVKQLKEDYFKKIECFDSVEISGVEDRFNASLGTYHDLLKIIKDKDFLDNEENEDILEDIVLTLTLFEDREMIEERLKTYAHLFDDKVMKQLKRRRYTGWGRLSRKLINGIRDKQSGKTILDFLKSDGFANRNFMQLIHDDSLTFKEDIQKAQVSGQGDSLHEHIANLAGSPAIKKGILQTVKVVDELVKVMGRHKPENIVIEMARENQTTQKGQKNSRERMKRIEEGIKELGSQILKEHPVENTQLQNEKLYLYYLQNGRDMYVDQELDINRLSDYDVDHIVPQSFLKDDSIDNKVLTRSDKARGKSDNVPSEEVVKKMKNYWRQLLNAKLITQRKFDNLTKAERGGLSELDKAGFIKRQLVETRQITKHVAQILDSRMNTKYDENDKLIREVKVITLKSKLVSDFRKDFQFYKVREINNYHHAHDAYLNAVVGTALIKKYPKLESEFVYGDYKVYDVRKMIAKSEQEIGKATAKYFFYSNIMNFFKTEITLANGEIRKRPLIETNGETGEIVWDKGRDFATVRKVLSMPQVNIVKKTEVQTGGFSKESILPKRNSDKLIARKKDWDPKKYGGFDSPTVAYSVLVVAKVEKGKSKKLKSVKELLGITIMERSSFEKNPIDFLEAKGYKEVKKDLIIKLPKYSLFELENGRKRMLASAGELQKGNELALPSKYVNFLYLASHYEKLKGSPEDNEQKQLFVEQHKHYLDEIIEQISEFSKRVILADANLDKVLSAYNKHRDKPIREQAENIIHLFTLTNLGAPAAFKYFDTTIDRKRYTSTKEVLDATLIHQSITGLYETRIDLSQLGGDGGGGGEAAAKGGTLQLEEEYRLFEPESTQKQEMDIWLKNFPQAWAETGGMGTAHCQAPVLIQLKATATPISIRQYPMPHEAYQGIKPHIRRMLDQGILKPCQSPWNTPLLPVKKPGTEDYRPVQDLREVNKRVEDIHPTVPNPYNLLSTLPPSHPWYTVLDLKDAFFCLRLHSESQLLFAFEWRDPEIGLSGQLTWTRLPQGFKNSPTLFNEALHSDLADFRVRYPALVLLQYVDDLLLAAATRTECLEGTKALLETLGNKGYRASAKKAQICLQEVTYLGYSLKDGQRWLTKARKEAILSIPVPKNSRQVREFLGTAGYCRLWIPGFAELAAPLYPLTRPGTLFQWGTEQQLAFEDIKKALLSSPALGLPDITKPFELFIDENSGFAKGVLVQKLGPWKRPVAYLSKKLDTVASGWPPCLRMVAAIAILVKDAGKLTLGQPLTILTSHPVEALVRQPPNKWLSNARMTHYQAMLLDAERVHFGPTVSLNPATLLPLPSGGNHHDCLQILAETHGTRPDLTDQPLPDADLTWYTDGSSFIRNGEREAGAAVTTESEVIWAAPLPPGTSAQRAELIALTQALKMAEGKKLTVYTDSRYAFATTHVHGEIYRRRGWLTSEGKEIKNKNEILALLEALFLPKRLSIIHCPGHQKGDSPQAKGNRLADDTAKKAATETHSSLTVLPAGKRTADGSEFEKRTADGSEFESPKKKAKVE

SEQ ID NO: 6686 - protein, 2124 aa, synthetic construct
MPAAKRVKLDGGDKKYSIGLDIGTNSVGWAVITDEYKVPSKKFKVLGNTDRHSIKKNLIGALLFDSGETAEATRLKRTARRRYTRRKNRICYLQEIFSNEMAKVDDSFFHRLEESFLVEEDKKHERHPIFGNIVDEVAYHEKYPTIYHLRKKLVDSTDKADLRLIYLALAHMIKFRGHFLIEGDLNPDNSDVDKLFIQLVQTYNQLFEENPINASGVDAKAILSARLSKSRRLENLIAQLPGEKKNGLFGNLIALSLGLTPNFKSNFDLAEDAKLQLSKDTYDDDLDNLLAQIGDQYADLFLAAKNLSDAILLSDILRVNTEITKAPLSASMIKRYDEHHQDLTLLKALVRQQLPEKYKEIFFDQSKNGYAGYIDGGASQEEFYKFIKPILEKMDGTEELLVKLNREDLLRKQRTFDNGSIPHQIHLGELHAILRRQEDFYPFLKDNREKIEKILTFRIPYYVGPLARGNSRFAWMTRKSEETITPWNFEEVVDKGASAQSFIERMTNFDKNLPNEKVLPKHSLLYEYFTVYNELTKVKYVTEGMRKPAFLSGEQKKAIVDLLFKTNRKVTVKQLKEDYFKKIECFDSVEISGVEDRFNASLGTYHDLLKIIKDKDFLDNEENEDILEDIVLTLTLFEDREMIEERLKTYAHLFDDKVMKQLKRRRYTGWGRLSRKLINGIRDKQSGKTILDFLKSDGFANRNFMQLIHDDSLTFKEDIQKAQVSGQGDSLHEHIANLAGSPAIKKGILQTVKVVDELVKVMGRHKPENIVIEMARENQTTQKGQKNSRERMKRIEEGIKELGSQILKEHPVENTQLQNEKLYLYYLQNGRDMYVDQELDINRLSDYDVDHIVPQSFLKDDSIDNKVLTRSDKARGKSDNVPSEEVVKKMKNYWRQLLNAKLITQRKFDNLTKAERGGLSELDKAGFIKRQLVETRQITKHVAQILDSRMNTKYDENDKLIREVKVITLKSKLVSDFRKDFQFYKVREINNYHHAHDAYLNAVVGTALIKKYPKLESEFVYGDYKVYDVRKMIAKSEQEIGKATAKYFFYSNIMNFFKTEITLANGEIRKRPLIETNGETGEIVWDKGRDFATVRKVLSMPQVNIVKKTEVQTGGFSKESILPKRNSDKLIARKKDWDPKKYGGFDSPTVAYSVLVVAKVEKGKSKKLKSVKELLGITIMERSSFEKNPIDFLEAKGYKEVKKDLIIKLPKYSLFELENGRKRMLASAGELQKGNELALPSKYVNFLYLASHYEKLKGSPEDNEQKQLFVEQHKHYLDEIIEQISEFSKRVILADANLDKVLSAYNKHRDKPIREQAENIIHLFTLTNLGAPAAFKYFDTTIDRKRYTSTKEVLDATLIHQSITGLYETRIDLSQLGGDGGGGGEAAAKGGLLGRDLLTKLKAQIQFSTEGPQVTWEDRPAMCLVLNLEEEYRLHEKPVPPSIDPSWLQLFPMVWAEKAGMGLANQVPPVVVELKSDASPVAVRQYPMSKEAREGIRPHIQRFLDLGILVPCQSPWNTPLLPVKKPGTNDYRPVQDLREVNKRVQDIHPTVPNPYNLLSSLPPSHTWYSVLDLKDAFFCLKLHPNSQPLFAFEWRDPEKGNTGQLTWTRLPQGFKNSPTLFNEALHRDLASFRALNPQVVMLQYVDDLLVAAPTYRDCKEGTRRLLQELSKLGYRVSAKKAQLCREEVTYLGYLLKGGKRWLTPARKATVMKIPTPTTPRQVREFLGKAGFCRLFIPGFASLAAPLYPLTRPKVPFTWTEAHQEAFGRIKEALLSAPALALPDLTKPFALYVDEKEGVARGVLTQTLGPWRRPVAYLSKKLDPVASGWPTCLKAIAAVALLLKDADKLTLGQNVLVIAPHNLESIVRQPPDRWMTNARMTHYQSLLLNERVSFAPPAILNPATLLPVESDDTPIHICSEILAEETGTRPDLRDQPLPGVPAWYTDGSSFIMDGRRQAGAAIVDNKRTVWASNLPEGTSAQKAELIALTQALRLAEGKSINIYTDSRYAFATAHVHGAIYKQRGWLTSAGKDIKNKEEILALLEAIHLPKRVAIIHCPGHQRGTDPVATGNRKADEAAKQAAQSTRILTETTKNAGKRTADGSEFEKRTADGSEFESPKKKAKVE

SEQ ID NO: 6687 - protein, 2215 aa, synthetic construct
MPAAKRVKLDGGDKKYSIGLDIGTNSVGWAVITDEYKVPSKKFKVLGNTDRHSIKKNLIGALLFDSGETAEATRLKRTARRRYTRRKNRICYLQEIFSNEMAKVDDSFFHRLEESFLVEEDKKHERHPIFGNIVDEVAYHEKYPTIYHLRKKLVDSTDKADLRLIYLALAHMIKFRGHFLIEGDLNPDNSDVDKLFIQLVQTYNQLFEENPINASGVDAKAILSARLSKSRRLENLIAQLPGEKKNGLFGNLIALSLGLTPNFKSNFDLAEDAKLQLSKDTYDDDLDNLLAQIGDQYADLFLAAKNLSDAILLSDILRVNTEITKAPLSASMIKRYDEHHQDLTLLKALVRQQLPEKYKEIFFDQSKNGYAGYIDGGASQEEFYKFIKPILEKMDGTEELLVKLNREDLLRKQRTFDNGSIPHQIHLGELHAILRRQEDFYPFLKDNREKIEKILTFRIPYYVGPLARGNSRFAWMTRKSEETITPWNFEEVVDKGASAQSFIERMTNFDKNLPNEKVLPKHSLLYEYFTVYNELTKVKYVTEGMRKPAFLSGEQKKAIVDLLFKTNRKVTVKQLKEDYFKKIECFDSVEISGVEDRFNASLGTYHDLLKIIKDKDFLDNEENEDILEDIVLTLTLFEDREMIEERLKTYAHLFDDKVMKQLKRRRYTGWGRLSRKLINGIRDKQSGKTILDFLKSDGFANRNFMQLIHDDSLTFKEDIQKAQVSGQGDSLHEHIANLAGSPAIKKGILQTVKVVDELVKVMGRHKPENIVIEMARENQTTQKGQKNSRERMKRIEEGIKELGSQILKEHPVENTQLQNEKLYLYYLQNGRDMYVDQELDINRLSDYDVDHIVPQSFLKDDSIDNKVLTRSDKARGKSDNVPSEEVVKKMKNYWRQLLNAKLITQRKFDNLTKAERGGLSELDKAGFIKRQLVETRQITKHVAQILDSRMNTKYDENDKLIREVKVITLKSKLVSDFRKDFQFYKVREINNYHHAHDAYLNAVVGTALIKKYPKLESEFVYGDYKVYDVRKMIAKSEQEIGKATAKYFFYSNIMNFFKTEITLANGEIRKRPLIETNGETGEIVWDKGRDFATVRKVLSMPQVNIVKKTEVQTGGFSKESILPKRNSDKLIARKKDWDPKKYGGFDSPTVAYSVLVVAKVEKGKSKKLKSVKELLGITIMERSSFEKNPIDFLEAKGYKEVKKDLIIKLPKYSLFELENGRKRMLASAGELQKGNELALPSKYVNFLYLASHYEKLKGSPEDNEQKQLFVEQHKHYLDEIIEQISEFSKRVILADANLDKVLSAYNKHRDKPIREQAENIIHLFTLTNLGAPAAFKYFDTTIDRKRYTSTKEVLDATLIHQSITGLYETRIDLSQLGGDGGGGGEAAAKGGTLGDQGSRGSDPLPEPRVTLTVEGIPTEFLVNTGAEHSVLTKPMGKMGSKRTVVAGATGSKVYPWTTKRLLKIGQKQVTHSFLVIPECPAPLLGRDLLTKLKAQIQFSTEGPQVTWEDRPAMCLVLNLEEEYRLHEKPVPPSIDPSWLQLFPMVWAEKAGMGLANQVPPVVVELKSDASPVAVRQYPMSKEAREGIRPHIQRFLDLGILVPCQSPWNTPLLPVKKPGTNDYRPVQDLREVNKRVQDIHPTVPNPYNLLSSLPPSHTWYSVLDLKDAFFCLKLHPNSQPLFAFEWRDPEKGNTGQLTWTRLPQGFKNSPTLFNEALHRDLASFRALNPQVVMLQYVDDLLVAAPTYRDCKEGTRRLLQELSKLGYRVSAKKAQLCREEVTYLGYLLKGGKRWLTPARKATVMKIPTPTTPRQVREFLGTAGFCRLWIPGFASLAAPLYPLTRPKVPFTWTEAHQEAFGRIKEALLSAPALALPDLTKPFALYVDEKEGVARGVLTQTLGPWRRPVAYLSKKLDPVASGWPTCLKAIAAVALLLKDADKLTLGQNVLVIAPHNLESIVRQPPDRWMTNARMTHYQSLLLNERVSFAPPAILNPATLLPVESDDTPIHICSEILAEETGTRPDLRDQPLPGVPAWYTDGSSFIMDGRRQAGAAIVDNKRTVWASNLPEGTSAQKAELIALTQALRLAEGKSINIYTDSRYAFATAHVHGAIYKQRGWLTSAGKDIKNKEEILALLEAIHLPKRVAIIHCPGHQRGTDPVATGNRKADEAAKQAAQSTRILTETTKNAGKRTADGSEFEKRTADGSEFESPKKKAKVE

SEQ ID NO: 6688 - protein, 2215 aa, synthetic construct
MPAAKRVKLDGGDKKYSIGLDIGTNSVGWAVITDEYKVPSKKFKVLGNTDRHSIKKNLIGALLFDSGETAEATRLKRTARRRYTRRKNRICYLQEIFSNEMAKVDDSFFHRLEESFLVEEDKKHERHPIFGNIVDEVAYHEKYPTIYHLRKKLVDSTDKADLRLIYLALAHMIKFRGHFLIEGDLNPDNSDVDKLFIQLVQTYNQLFEENPINASGVDAKAILSARLSKSRRLENLIAQLPGEKKNGLFGNLIALSLGLTPNFKSNFDLAEDAKLQLSKDTYDDDLDNLLAQIGDQYADLFLAAKNLSDAILLSDILRVNTEITKAPLSASMIKRYDEHHQDLTLLKALVRQQLPEKYKEIFFDQSKNGYAGYIDGGASQEEFYKFIKPILEKMDGTEELLVKLNREDLLRKQRTFDNGSIPHQIHLGELHAILRRQEDFYPFLKDNREKIEKILTFRIPYYVGPLARGNSRFAWMTRKSEETITPWNFEEVVDKGASAQSFIERMTNFDKNLPNEKVLPKHSLLYEYFTVYNELTKVKYVTEGMRKPAFLSGEQKKAIVDLLFKTNRKVTVKQLKEDYFKKIECFDSVEISGVEDRFNASLGTYHDLLKIIKDKDFLDNEENEDILEDIVLTLTLFEDREMIEERLKTYAHLFDDKVMKQLKRRRYTGWGRLSRKLINGIRDKQSGKTILDFLKSDGFANRNFMQLIHDDSLTFKEDIQKAQVSGQGDSLHEHIANLAGSPAIKKGILQTVKVVDELVKVMGRHKPENIVIEMARENQTTQKGQKNSRERMKRIEEGIKELGSQILKEHPVENTQLQNEKLYLYYLQNGRDMYVDQELDINRLSDYDVDHIVPQSFLKDDSIDNKVLTRSDKARGKSDNVPSEEVVKKMKNYWRQLLNAKLITQRKFDNLTKAERGGLSELDKAGFIKRQLVETRQITKHVAQILDSRMNTKYDENDKLIREVKVITLKSKLVSDFRKDFQFYKVREINNYHHAHDAYLNAVVGTALIKKYPKLESEFVYGDYKVYDVRKMIAKSEQEIGKATAKYFFYSNIMNFFKTEITLANGEIRKRPLIETNGETGEIVWDKGRDFATVRKVLSMPQVNIVKKTEVQTGGFSKESILPKRNSDKLIARKKDWDPKKYGGFDSPTVAYSVLVVAKVEKGKSKKLKSVKELLGITIMERSSFEKNPIDFLEAKGYKEVKKDLIIKLPKYSLFELENGRKRMLASAGELQKGNELALPSKYVNFLYLASHYEKLKGSPEDNEQKQLFVEQHKHYLDEIIEQISEFSKRVILADANLDKVLSAYNKHRDKPIREQAENIIHLFTLTNLGAPAAFKYFDTTIDRKRYTSTKEVLDATLIHQSITGLYETRIDLSQLGGDGGGGGEAAAKGGTLGDQGSRGSDPLPEPRVTLTVEGIPTEFLVNTGAEHSVLTKPMGKMGSKRTVVAGATGSKVYPWTTKRLLKIGQKQVTHSFLVIPECPAPLLGRDLLTKLKAQIQFSTEGPQVTWEDRPAMCLVLNLEEEYRLHEKPVPPSIDPSWLQLFPMVWAEKAGMGLANQVPPVVVELKSDASPVAVRQYPMSKEAREGIRPHIQRFLDLGILVPCQSPWNTPLLPVKKPGTNDYRPVQDLREVNKRVQDIHPTVPNPYNLLSSLPPSHTWYSVLDLKDAFFCLKLHPNSQPLFAFEWRDPEKGNTGQLTWTRLPQGFKNSPTLFNEALHRDLASFRALNPQVVMLQYVDDLLVAAPTYRDCKEGTRRLLQELSKLGYRVSAKKAQLCREEVTYLGYLLKGGKRWLTPARKATVMKIPTPTTPRQVREFLGKAGFCRLFIPGFASLAAPLYPLTRPKVPFTWTEAHQEAFGRIKEALLSAPALALPDLTKPFALYVDEKEGVARGVLTQTLGPWRRPVAYLSKKLDPVASGWPTCLKAIAAVALLLKDADKLTLGQNVLVIAPHNLESIVRQPPDRWMTNARMTHYQSLLLNERVSFAPPAILNPATLLPVESDDTPIHICSEILAEETGTRPDLRDQPLPGVPAWYTDGSSFIMDGRRQAGAAIVDNKRTVWASNLPEGTSAQKAELIALTQALRLAEGKSINIYTDSRYAFATAHVHGAIYKQRGWLTSAGKDIKNKEEILALLEAIHLPKRVAIIHCPGHQRGTDPVATGNRKADEAAKQAAQSTRILTETTKNAGKRTADGSEFEKRTADGSEFESPKKKAKVE

SEQ ID NO: 6689 - protein, 2093 aa, synthetic construct
MPAAKRVKLDGGDKKYSIGLDIGTNSVGWAVITDEYKVPSKKFKVLGNTDRHSIKKNLIGALLFDSGETAEATRLKRTARRRYTRRKNRICYLQEIFSNEMAKVDDSFFHRLEESFLVEEDKKHERHPIFGNIVDEVAYHEKYPTIYHLRKKLVDSTDKADLRLIYLALAHMIKFRGHFLIEGDLNPDNSDVDKLFIQLVQTYNQLFEENPINASGVDAKAILSARLSKSRRLENLIAQLPGEKKNGLFGNLIALSLGLTPNFKSNFDLAEDAKLQLSKDTYDDDLDNLLAQIGDQYADLFLAAKNLSDAILLSDILRVNTEITKAPLSASMIKRYDEHHQDLTLLKALVRQQLPEKYKEIFFDQSKNGYAGYIDGGASQEEFYKFIKPILEKMDGTEELLVKLNREDLLRKQRTFDNGSIPHQIHLGELHAILRRQEDFYPFLKDNREKIEKILTFRIPYYVGPLARGNSRFAWMTRKSEETITPWNFEEVVDKGASAQSFIERMTNFDKNLPNEKVLPKHSLLYEYFTVYNELTKVKYVTEGMRKPAFLSGEQKKAIVDLLFKTNRKVTVKQLKEDYFKKIECFDSVEISGVEDRFNASLGTYHDLLKIIKDKDFLDNEENEDILEDIVLTLTLFEDREMIEERLKTYAHLFDDKVMKQLKRRRYTGWGRLSRKLINGIRDKQSGKTILDFLKSDGFANRNFMQLIHDDSLTFKEDIQKAQVSGQGDSLHEHIANLAGSPAIKKGILQTVKVVDELVKVMGRHKPENIVIEMARENQTTQKGQKNSRERMKRIEEGIKELGSQILKEHPVENTQLQNEKLYLYYLQNGRDMYVDQELDINRLSDYDVDHIVPQSFLKDDSIDNKVLTRSDKARGKSDNVPSEEVVKKMKNYWRQLLNAKLITQRKFDNLTKAERGGLSELDKAGFIKRQLVETRQITKHVAQILDSRMNTKYDENDKLIREVKVITLKSKLVSDFRKDFQFYKVREINNYHHAHDAYLNAVVGTALIKKYPKLESEFVYGDYKVYDVRKMIAKSEQEIGKATAKYFFYSNIMNFFKTEITLANGEIRKRPLIETNGETGEIVWDKGRDFATVRKVLSMPQVNIVKKTEVQTGGFSKESILPKRNSDKLIARKKDWDPKKYGGFDSPTVAYSVLVVAKVEKGKSKKLKSVKELLGITIMERSSFEKNPIDFLEAKGYKEVKKDLIIKLPKYSLFELENGRKRMLASAGELQKGNELALPSKYVNFLYLASHYEKLKGSPEDNEQKQLFVEQHKHYLDEIIEQISEFSKRVILADANLDKVLSAYNKHRDKPIREQAENIIHLFTLTNLGAPAAFKYFDTTIDRKRYTSTKEVLDATLIHQSITGLYETRIDLSQLGGDGGGGGEAAAKGGTLNLEDEYRLYETSAEPEVSPGSTWLSDFPQAWAETGGMGLAVRQAPLIIPLKATSTPVSIKQYPMSQEAKLGIKPHIQRLLDQGILVPCQSPWNTPLLPVKKPGTNDYRPVQDLREVNKRVEDIHPTVPNPYNLLSGLPPSHRWYTVLDLKDAFFCLRLHPTSQPLFAFEWRDPGMGISGQLTWTRLPQGFKNSPTLFNEALHRDLADFRIQHPDLILLQYVDDILLAATSELDCQQGTRALLLTLGNLGYRASAKKAQLCQKQVKYLGYLLKEGQRWLTEARKETVMGQPTPKTPRQLREFLGTAGFCRLWIPGFAEMAAPLYPLTKPGTLFNWGPDQQKAYQEIKQALLTAPALGLPDLTKPFELFVDEKQGYAKGVLTQKLGPWRRPVAYLSKKLDPVAAGWPPCLRMVAAIAVLRKDAGKLTMGQPLVILAPHAVEALVKQPPDRWLSNARMTHYQAMLLDTDRVQFGPVVALNPATLLPLPEEGAPHDCLEILAETHGTRPDLTDQPIPDADHTWYTDGSSFLQEGQRKAGAAVTTETEVIWARALPAGTSAQRAELIALTQALKMAEGKRLNVYTDSRYAFATAHIHGEIYRRRGWLTSEGREIKNKSEILALLKALFLPKRLSIIHCLGHQKGDSAEARGNRLADQAAREAAIKTPPDTSTLLAGKRTADGSEFEKRTADGSEFESPKKKAKVE

SEQ ID NO: 6690 - protein, 2093 aa, synthetic construct
MPAAKRVKLDGGDKKYSIGLDIGTNSVGWAVITDEYKVPSKKFKVLGNTDRHSIKKNLIGALLFDSGETAEATRLKRTARRRYTRRKNRICYLQEIFSNEMAKVDDSFFHRLEESFLVEEDKKHERHPIFGNIVDEVAYHEKYPTIYHLRKKLVDSTDKADLRLIYLALAHMIKFRGHFLIEGDLNPDNSDVDKLFIQLVQTYNQLFEENPINASGVDAKAILSARLSKSRRLENLIAQLPGEKKNGLFGNLIALSLGLTPNFKSNFDLAEDAKLQLSKDTYDDDLDNLLAQIGDQYADLFLAAKNLSDAILLSDILRVNTEITKAPLSASMIKRYDEHHQDLTLLKALVRQQLPEKYKEIFFDQSKNGYAGYIDGGASQEEFYKFIKPILEKMDGTEELLVKLNREDLLRKQRTFDNGSIPHQIHLGELHAILRRQEDFYPFLKDNREKIEKILTFRIPYYVGPLARGNSRFAWMTRKSEETITPWNFEEVVDKGASAQSFIERMTNFDKNLPNEKVLPKHSLLYEYFTVYNELTKVKYVTEGMRKPAFLSGEQKKAIVDLLFKTNRKVTVKQLKEDYFKKIECFDSVEISGVEDRFNASLGTYHDLLKIIKDKDFLDNEENEDILEDIVLTLTLFEDREMIEERLKTYAHLFDDKVMKQLKRRRYTGWGRLSRKLINGIRDKQSGKTILDFLKSDGFANRNFMQLIHDDSLTFKEDIQKAQVSGQGDSLHEHIANLAGSPAIKKGILQTVKVVDELVKVMGRHKPENIVIEMARENQTTQKGQKNSRERMKRIEEGIKELGSQILKEHPVENTQLQNEKLYLYYLQNGRDMYVDQELDINRLSDYDVDHIVPQSFLKDDSIDNKVLTRSDKARGKSDNVPSEEVVKKMKNYWRQLLNAKLITQRKFDNLTKAERGGLSELDKAGFIKRQLVETRQITKHVAQILDSRMNTKYDENDKLIREVKVITLKSKLVSDFRKDFQFYKVREINNYHHAHDAYLNAVVGTALIKKYPKLESEFVYGDYKVYDVRKMIAKSEQEIGKATAKYFFYSNIMNFFKTEITLANGEIRKRPLIETNGETGEIVWDKGRDFATVRKVLSMPQVNIVKKTEVQTGGFSKESILPKRNSDKLIARKKDWDPKKYGGFDSPTVAYSVLVVAKVEKGKSKKLKSVKELLGITIMERSSFEKNPIDFLEAKGYKEVKKDLIIKLPKYSLFELENGRKRMLASAGELQKGNELALPSKYVNFLYLASHYEKLKGSPEDNEQKQLFVEQHKHYLDEIIEQISEFSKRVILADANLDKVLSAYNKHRDKPIREQAENIIHLFTLTNLGAPAAFKYFDTTIDRKRYTSTKEVLDATLIHQSITGLYETRIDLSQLGGDGGGGGEAAAKGGTLNLEDEYRLYETSAEPEVSPGSTWLSDFPQAWAETGGMGLAVRQAPLIIPLKATSTPVSIKQYPMSQEAKLGIKPHIQRLLDQGILVPCQSPWNTPLLPVKKPGTNDYRPVQDLREVNKRVEDIHPTVPNPYNLLSGLPPSHRWYTVLDLKDAFFCLRLHPTSQPLFAFEWRDPGMGISGQLTWTRLPQGFKNSPTLFNEALHRDLADFRIQHPDLILLQYVDDILLAATSELDCQQGTRALLLTLGNLGYRASAKKAQLCQKQVKYLGYLLKEGQRWLTEARKETVMGQPTPKTPRQLREFLGKAGFCRLFIPGFAEMAAPLYPLTKPGTLFNWGPDQQKAYQEIKQALLTAPALGLPDLTKPFELFVDEKQGYAKGVLTQKLGPWRRPVAYLSKKLDPVAAGWPPCLRMVAAIAVLRKDAGKLTMGQPLVILAPHAVEALVKQPPDRWLSNARMTHYQAMLLDTDRVQFGPVVALNPATLLPLPEEGAPHDCLEILAETHGTRPDLTDQPIPDADHTWYTDGSSFLQEGQRKAGAAVTTETEVIWARALPAGTSAQRAELIALTQALKMAEGKRLNVYTDSRYAFATAHIHGEIYRRRGWLTSEGREIKNKSEILALLKALFLPKRLSIIHCLGHQKGDSAEARGNRLADQAAREAAIKTPPDTSTLLAGKRTADGSEFEKRTADGSEFESPKKKAKVE

SEQ ID NO: 6691 - protein, 2093 aa, synthetic construct
MPAAKRVKLDGGDKKYSIGLDIGTNSVGWAVITDEYKVPSKKFKVLGNTDRHSIKKNLIGALLFDSGETAEATRLKRTARRRYTRRKNRICYLQEIFSNEMAKVDDSFFHRLEESFLVEEDKKHERHPIFGNIVDEVAYHEKYPTIYHLRKKLVDSTDKADLRLIYLALAHMIKFRGHFLIEGDLNPDNSDVDKLFIQLVQTYNQLFEENPINASGVDAKAILSARLSKSRRLENLIAQLPGEKKNGLFGNLIALSLGLTPNFKSNFDLAEDAKLQLSKDTYDDDLDNLLAQIGDQYADLFLAAKNLSDAILLSDILRVNTEITKAPLSASMIKRYDEHHQDLTLLKALVRQQLPEKYKEIFFDQSKNGYAGYIDGGASQEEFYKFIKPILEKMDGTEELLVKLNREDLLRKQRTFDNGSIPHQIHLGELHAILRRQEDFYPFLKDNREKIEKILTFRIPYYVGPLARGNSRFAWMTRKSEETITPWNFEEVVDKGASAQSFIERMTNFDKNLPNEKVLPKHSLLYEYFTVYNELTKVKYVTEGMRKPAFLSGEQKKAIVDLLFKTNRKVTVKQLKEDYFKKIECFDSVEISGVEDRFNASLGTYHDLLKIIKDKDFLDNEENEDILEDIVLTLTLFEDREMIEERLKTYAHLFDDKVMKQLKRRRYTGWGRLSRKLINGIRDKQSGKTILDFLKSDGFANRNFMQLIHDDSLTFKEDIQKAQVSGQGDSLHEHIANLAGSPAIKKGILQTVKVVDELVKVMGRHKPENIVIEMARENQTTQKGQKNSRERMKRIEEGIKELGSQILKEHPVENTQLQNEKLYLYYLQNGRDMYVDQELDINRLSDYDVDHIVPQSFLKDDSIDNKVLTRSDKARGKSDNVPSEEVVKKMKNYWRQLLNAKLITQRKFDNLTKAERGGLSELDKAGFIKRQLVETRQITKHVAQILDSRMNTKYDENDKLIREVKVITLKSKLVSDFRKDFQFYKVREINNYHHAHDAYLNAVVGTALIKKYPKLESEFVYGDYKVYDVRKMIAKSEQEIGKATAKYFFYSNIMNFFKTEITLANGEIRKRPLIETNGETGEIVWDKGRDFATVRKVLSMPQVNIVKKTEVQTGGFSKESILPKRNSDKLIARKKDWDPKKYGGFDSPTVAYSVLVVAKVEKGKSKKLKSVKELLGITIMERSSFEKNPIDFLEAKGYKEVKKDLIIKLPKYSLFELENGRKRMLASAGELQKGNELALPSKYVNFLYLASHYEKLKGSPEDNEQKQLFVEQHKHYLDEIIEQISEFSKRVILADANLDKVLSAYNKHRDKPIREQAENIIHLFTLTNLGAPAAFKYFDTTIDRKRYTSTKEVLDATLIHQSITGLYETRIDLSQLGGDGGGGGEAAAKGGLGIEDEYRLHETSTEPDVSLGSTWLSDFPQAWAETGGMGLAVRQAPLIIPLKATSTPVSIQQYPMSHEARLGIKPHIQRLLDQGILVPCQSPWNTPLLPVKKPGTNDYRPVQDLREVNKRVEDIHPTVPNPYNLLSGLPPSHQWYTVLDLKDAFFCLRLHPTSQPLFAFEWRDPGMGISGQLTWTRLPQGFKNSPTLFNEALHRDLADFRIQHPDLILLQYVDDILLAATSELDCQQGTRALLQTLGDLGYRASAKKAQICQKQVKYLGYLLREGQRWLTEARKETVMGQPVPKTPRQLREFLGKAGFCRLFIPGFAEMAAPLYPLTKPGTLFSWGPDQQKAYQEIKQALLTAPALGLPDLTKPFELFVDEKQGYAKGVLTQKLGPWRRPVAYLSKKLDPVAAGWPPCLRMVAAIAVLTKDAGKLTMGQPLVILAPHAVEALVKQPPDRWLSNARMTHYQAMLLDTDRVQFGPVVALNPATLLPLPEEGAPHDCLEILAETHGTRPDLTDQPIPDADHTWYTDGSSFLQEGQRKAGAAVTTETEVIWAGALPAGTSAQRAELIALTQALKMAEGKRLNVYTDSRYAFATAHIHGEIYRRRGWLTSEGREIKNKSEILALLKALFLPKRLSIIHCLGHQKGDSAEARGNRLADQAAREAAIKTPPDTSTLLIAGKRTADGSEFEKRTADGSEFESPKKKAKVE

SEQ ID NO: 6692 - protein, 2093 aa, synthetic construct
MPAAKRVKLDGGDKKYSIGLDIGTNSVGWAVITDEYKVPSKKFKVLGNTDRHSIKKNLIGALLFDSGETAEATRLKRTARRRYTRRKNRICYLQEIFSNEMAKVDDSFFHRLEESFLVEEDKKHERHPIFGNIVDEVAYHEKYPTIYHLRKKLVDSTDKADLRLIYLALAHMIKFRGHFLIEGDLNPDNSDVDKLFIQLVQTYNQLFEENPINASGVDAKAILSARLSKSRRLENLIAQLPGEKKNGLFGNLIALSLGLTPNFKSNFDLAEDAKLQLSKDTYDDDLDNLLAQIGDQYADLFLAAKNLSDAILLSDILRVNTEITKAPLSASMIKRYDEHHQDLTLLKALVRQQLPEKYKEIFFDQSKNGYAGYIDGGASQEEFYKFIKPILEKMDGTEELLVKLNREDLLRKQRTFDNGSIPHQIHLGELHAILRRQEDFYPFLKDNREKIEKILTFRIPYYVGPLARGNSRFAWMTRKSEETITPWNFEEVVDKGASAQSFIERMTNFDKNLPNEKVLPKHSLLYEYFTVYNELTKVKYVTEGMRKPAFLSGEQKKAIVDLLFKTNRKVTVKQLKEDYFKKIECFDSVEISGVEDRFNASLGTYHDLLKIIKDKDFLDNEENEDILEDIVLTLTLFEDREMIEERLKTYAHLFDDKVMKQLKRRRYTGWGRLSRKLINGIRDKQSGKTILDFLKSDGFANRNFMQLIHDDSLTFKEDIQKAQVSGQGDSLHEHIANLAGSPAIKKGILQTVKVVDELVKVMGRHKPENIVIEMARENQTTQKGQKNSRERMKRIEEGIKELGSQILKEHPVENTQLQNEKLYLYYLQNGRDMYVDQELDINRLSDYDVDHIVPQSFLKDDSIDNKVLTRSDKARGKSDNVPSEEVVKKMKNYWRQLLNAKLITQRKFDNLTKAERGGLSELDKAGFIKRQLVETRQITKHVAQILDSRMNTKYDENDKLIREVKVITLKSKLVSDFRKDFQFYKVREINNYHHAHDAYLNAVVGTALIKKYPKLESEFVYGDYKVYDVRKMIAKSEQEIGKATAKYFFYSNIMNFFKTEITLANGEIRKRPLIETNGETGEIVWDKGRDFATVRKVLSMPQVNIVKKTEVQTGGFSKESILPKRNSDKLIARKKDWDPKKYGGFDSPTVAYSVLVVAKVEKGKSKKLKSVKELLGITIMERSSFEKNPIDFLEAKGYKEVKKDLIIKLPKYSLFELENGRKRMLASAGELQKGNELALPSKYVNFLYLASHYEKLKGSPEDNEQKQLFVEQHKHYLDEIIEQISEFSKRVILADANLDKVLSAYNKHRDKPIREQAENIIHLFTLTNLGAPAAFKYFDTTIDRKRYTSTKEVLDATLIHQSITGLYETRIDLSQLGGDGGGGGEAAAKGGTLNIEDEYRLHETSKGPDVPLGSTWLSDFPQAWAETGGMGLAVRQAPLIIPLKATSTPVSIKQYPMSQEARLGIKPHIQRLLDQGILVPCQSPWNTPLLPVKKPGTNDYRPVQDLREVNKRVEDIHPTVPNPYNLLSGLPPSHQWYTVLDLKDAFFCLRLHPTSQSLFAFEWRDPEMGISGQLTWTRLPQGFKNSPTLFNEALHRDLADFRIQHPDLILLQYVDDLLLAATSELDCQQGTRALLQTLGDLGYRASAKKAQICQKQVKYLGYLLKEGQRWLTEARKETVMGQPTPKTPRQLREFLGTAGFCRLWIPGFAEMAAPLYPLTKPGTLFEWGPDQQKAYQEIKQALLTAPALGLPDLTKPFELFVDEKQGYAKGVLTQKLGPWRRPVAYLSKKLDPVAAGWPPCLRMVAAIAVLTKDAGKLTMGQPLVILAPHAVEALVKQPPDRWLSNARMTHYQALLLDTDRVQFGPIVALNPATLLPLPEEGLQHDCLDILAEAHGTRPDLTDQPLPDADHTWYTDGSSFLQEGQRKAGAAVTTETEVVWAKALPAGTSAQRAELIALTQALKMAEGKKLNVYTDSRYAFATAHIHGEIYRRRGWLTSEGKEIKNKDEILALLKALFLPKRLSIIHCPGHQKGNRAEARGNRMADQAAREVATRETPETSTLLAGKRTADGSEFEKRTADGSEFESPKKKAKVE

SEQ ID NO: 6693 - protein, 2087 aa, synthetic construct
MPAAKRVKLDGGDKKYSIGLDIGTNSVGWAVITDEYKVPSKKFKVLGNTDRHSIKKNLIGALLFDSGETAEATRLKRTARRRYTRRKNRICYLQEIFSNEMAKVDDSFFHRLEESFLVEEDKKHERHPIFGNIVDEVAYHEKYPTIYHLRKKLVDSTDKADLRLIYLALAHMIKFRGHFLIEGDLNPDNSDVDKLFIQLVQTYNQLFEENPINASGVDAKAILSARLSKSRRLENLIAQLPGEKKNGLFGNLIALSLGLTPNFKSNFDLAEDAKLQLSKDTYDDDLDNLLAQIGDQYADLFLAAKNLSDAILLSDILRVNTEITKAPLSASMIKRYDEHHQDLTLLKALVRQQLPEKYKEIFFDQSKNGYAGYIDGGASQEEFYKFIKPILEKMDGTEELLVKLNREDLLRKQRTFDNGSIPHQIHLGELHAILRRQEDFYPFLKDNREKIEKILTFRIPYYVGPLARGNSRFAWMTRKSEETITPWNFEEVVDKGASAQSFIERMTNFDKNLPNEKVLPKHSLLYEYFTVYNELTKVKYVTEGMRKPAFLSGEQKKAIVDLLFKTNRKVTVKQLKEDYFKKIECFDSVEISGVEDRFNASLGTYHDLLKIIKDKDFLDNEENEDILEDIVLTLTLFEDREMIEERLKTYAHLFDDKVMKQLKRRRYTGWGRLSRKLINGIRDKQSGKTILDFLKSDGFANRNFMQLIHDDSLTFKEDIQKAQVSGQGDSLHEHIANLAGSPAIKKGILQTVKVVDELVKVMGRHKPENIVIEMARENQTTQKGQKNSRERMKRIEEGIKELGSQILKEHPVENTQLQNEKLYLYYLQNGRDMYVDQELDINRLSDYDVDHIVPQSFLKDDSIDNKVLTRSDKARGKSDNVPSEEVVKKMKNYWRQLLNAKLITQRKFDNLTKAERGGLSELDKAGFIKRQLVETRQITKHVAQILDSRMNTKYDENDKLIREVKVITLKSKLVSDFRKDFQFYKVREINNYHHAHDAYLNAVVGTALIKKYPKLESEFVYGDYKVYDVRKMIAKSEQEIGKATAKYFFYSNIMNFFKTEITLANGEIRKRPLIETNGETGEIVWDKGRDFATVRKVLSMPQVNIVKKTEVQTGGFSKESILPKRNSDKLIARKKDWDPKKYGGFDSPTVAYSVLVVAKVEKGKSKKLKSVKELLGITIMERSSFEKNPIDFLEAKGYKEVKKDLIIKLPKYSLFELENGRKRMLASAGELQKGNELALPSKYVNFLYLASHYEKLKGSPEDNEQKQLFVEQHKHYLDEIIEQISEFSKRVILADANLDKVLSAYNKHRDKPIREQAENIIHLFTLTNLGAPAAFKYFDTTIDRKRYTSTKEVLDATLIHQSITGLYETRIDLSQLGGDGGGGGEAAAKGGTLQLDDEYRLYSPLVKPDQNIQFWLEQFPQAWAETAGMGLAKQVPPQVIQLKASATPVSVRQYPLSKEAQEGIRPHVQRLIQQGILVPVQSPWNTPLLPVRKPGTNDYRPVQDLREVNKRVQDIHPTVPNPYNLLCALPPQRSWYTVLDLKDAFFCLRLHPTSQPLFAFEWRDPGTGRTGQLTWTRLPQGFKNSPTIFDEALHRDLANFRIQHPQVTLLQYVDDLLLAGATKQDCLEGTKALLLELSDLGYRASAKKAQICRREVTYLGYSLRDGQRWLTEARKKTVVQIPAPTTAKQVREFLGTAGFCRLWIPGFATLAAPLYPLTKEKGEFSWAPEHQKAFDAIKKALLSAPALALPDVTKPFTLYVDERKGVARGVLTQTLGPWRRPVAYLSKKLDPVASGWPVCLKAIAAVAILVKDADKLTLGQNITVIAPHALENIVRQPPDRWMTNARMTHYQSLLLTERVTFAPPAALNPATLLPEETDEPVTHDCHQLLIEETGVRKDLTDIPLTGEVLTWFTDGSSYVVEGKRMAGAAVVDGTRTIWASSLPEGTSAQKAELMALTQALRLAEGKSINIYTDSRYAFATAHVHGAIYKQRGLLTSAGREIKNKEEILSLLEALHLPKRLAIIHCPGHQKAKDPISRGNQMADRVAKQAAQGVNLLAGKRTADGSEFEKRTADGSEFESPKKKAKVE

SEQ ID NO: 6694 - protein, 2173 aa, synthetic construct
MPAAKRVKLDGGDKKYSIGLDIGTNSVGWAVITDEYKVPSKKFKVLGNTDRHSIKKNLIGALLFDSGETAEATRLKRTARRRYTRRKNRICYLQEIFSNEMAKVDDSFFHRLEESFLVEEDKKHERHPIFGNIVDEVAYHEKYPTIYHLRKKLVDSTDKADLRLIYLALAHMIKFRGHFLIEGDLNPDNSDVDKLFIQLVQTYNQLFEENPINASGVDAKAILSARLSKSRRLENLIAQLPGEKKNGLFGNLIALSLGLTPNFKSNFDLAEDAKLQLSKDTYDDDLDNLLAQIGDQYADLFLAAKNLSDAILLSDILRVNTEITKAPLSASMIKRYDEHHQDLTLLKALVRQQLPEKYKEIFFDQSKNGYAGYIDGGASQEEFYKFIKPILEKMDGTEELLVKLNREDLLRKQRTFDNGSIPHQIHLGELHAILRRQEDFYPFLKDNREKIEKILTFRIPYYVGPLARGNSRFAWMTRKSEETITPWNFEEVVDKGASAQSFIERMTNFDKNLPNEKVLPKHSLLYEYFTVYNELTKVKYVTEGMRKPAFLSGEQKKAIVDLLFKTNRKVTVKQLKEDYFKKIECFDSVEISGVEDRFNASLGTYHDLLKIIKDKDFLDNEENEDILEDIVLTLTLFEDREMIEERLKTYAHLFDDKVMKQLKRRRYTGWGRLSRKLINGIRDKQSGKTILDFLKSDGFANRNFMQLIHDDSLTFKEDIQKAQVSGQGDSLHEHIANLAGSPAIKKGILQTVKVVDELVKVMGRHKPENIVIEMARENQTTQKGQKNSRERMKRIEEGIKELGSQILKEHPVENTQLQNEKLYLYYLQNGRDMYVDQELDINRLSDYDVDHIVPQSFLKDDSIDNKVLTRSDKARGKSDNVPSEEVVKKMKNYWRQLLNAKLITQRKFDNLTKAERGGLSELDKAGFIKRQLVETRQITKHVAQILDSRMNTKYDENDKLIREVKVITLKSKLVSDFRKDFQFYKVREINNYHHAHDAYLNAVVGTALIKKYPKLESEFVYGDYKVYDVRKMIAKSEQEIGKATAKYFFYSNIMNFFKTEITLANGEIRKRPLIETNGETGEIVWDKGRDFATVRKVLSMPQVNIVKKTEVQTGGFSKESILPKRNSDKLIARKKDWDPKKYGGFDSPTVAYSVLVVAKVEKGKSKKLKSVKELLGITIMERSSFEKNPIDFLEAKGYKEVKKDLIIKLPKYSLFELENGRKRMLASAGELQKGNELALPSKYVNFLYLASHYEKLKGSPEDNEQKQLFVEQHKHYLDEIIEQISEFSKRVILADANLDKVLSAYNKHRDKPIREQAENIIHLFTLTNLGAPAAFKYFDTTIDRKRYTSTKEVLDATLIHQSITGLYETRIDLSQLGGDGGGGGEAAAKGGMDPLQLLQPLEAEIKGTKLKAHWNSGATITCVPQAFLEEEVPIKNIWIKTIHGEKEQPVYYLTFKIQGRKVEAEVISSPYDYILVSPSDIPWLMKKPLQLTTLVPLQEYEERLLKQTMLTGSYKEKLQSLFLKYDALWQHWENQVGHRRIKPHHIATGTVNPRPQKQYPINPKAKASIQTVINDLLKQGVLIQQNSIMNTPVYPVPKPDGKWRMVLDYREVNKTIPLIAAQNQHSAGILSSIFRGKYKTTLDLSNGFWAHSITPESYWLTAFTWLGQQYCWTRLPQGFLNSPALFNADVVDLLKEVPNVQVYVDDIYISHDDPREHLEQLEKVFSLLLNAGYVVSLKKSEIAQHEVEFLGFNITKEGRGLTETFKQKLLNITPPRDLKQLQSILGKLNFARNFIPNFSELVKPLYNIIATAPGKYITWTTDNSQQLQNIISMLNSAENLEERNPEVRLIMKVNTSPSAGYIRFYNEFAKRPIMYLNYVYTKAEVKFTNTEKLLTTIHKGLIKALDLGMGQEILVYSPIVSMTKIQKTPLPERKALPIRWITWMSYLEDPRIQFHYDKTLPELQQVPTVTDDIIAKIKHPSEFSMVFYTDGSAIKHPNVNKSHNAGMGIAQVQFKPEFTVINTWSIPLGDHTAQLAEVAAVEFACKKALKIDGPVLIVTDSFYVAESVNKELPYWQSNGFFNNKKKPLKHVSKWKSIADCIQLKPDIIIIHEKGHQPTASTFHTEGNNLADKLATQGSYVVNAGKRTADGSEFEKRTADGSEFESPKKKAKVE

SEQ ID NO: 6695 - protein, 2093 aa, synthetic construct
MPAAKRVKLDGGDKKYSIGLDIGTNSVGWAVITDEYKVPSKKFKVLGNTDRHSIKKNLIGALLFDSGETAEATRLKRTARRRYTRRKNRICYLQEIFSNEMAKVDDSFFHRLEESFLVEEDKKHERHPIFGNIVDEVAYHEKYPTIYHLRKKLVDSTDKADLRLIYLALAHMIKFRGHFLIEGDLNPDNSDVDKLFIQLVQTYNQLFEENPINASGVDAKAILSARLSKSRRLENLIAQLPGEKKNGLFGNLIALSLGLTPNFKSNFDLAEDAKLQLSKDTYDDDLDNLLAQIGDQYADLFLAAKNLSDAILLSDILRVNTEITKAPLSASMIKRYDEHHQDLTLLKALVRQQLPEKYKEIFFDQSKNGYAGYIDGGASQEEFYKFIKPILEKMDGTEELLVKLNREDLLRKQRTFDNGSIPHQIHLGELHAILRRQEDFYPFLKDNREKIEKILTFRIPYYVGPLARGNSRFAWMTRKSEETITPWNFEEVVDKGASAQSFIERMTNFDKNLPNEKVLPKHSLLYEYFTVYNELTKVKYVTEGMRKPAFLSGEQKKAIVDLLFKTNRKVTVKQLKEDYFKKIECFDSVEISGVEDRFNASLGTYHDLLKIIKDKDFLDNEENEDILEDIVLTLTLFEDREMIEERLKTYAHLFDDKVMKQLKRRRYTGWGRLSRKLINGIRDKQSGKTILDFLKSDGFANRNFMQLIHDDSLTFKEDIQKAQVSGQGDSLHEHIANLAGSPAIKKGILQTVKVVDELVKVMGRHKPENIVIEMARENQTTQKGQKNSRERMKRIEEGIKELGSQILKEHPVENTQLQNEKLYLYYLQNGRDMYVDQELDINRLSDYDVDHIVPQSFLKDDSIDNKVLTRSDKARGKSDNVPSEEVVKKMKNYWRQLLNAKLITQRKFDNLTKAERGGLSELDKAGFIKRQLVETRQITKHVAQILDSRMNTKYDENDKLIREVKVITLKSKLVSDFRKDFQFYKVREINNYHHAHDAYLNAVVGTALIKKYPKLESEFVYGDYKVYDVRKMIAKSEQEIGKATAKYFFYSNIMNFFKTEITLANGEIRKRPLIETNGETGEIVWDKGRDFATVRKVLSMPQVNIVKKTEVQTGGFSKESILPKRNSDKLIARKKDWDPKKYGGFDSPTVAYSVLVVAKVEKGKSKKLKSVKELLGITIMERSSFEKNPIDFLEAKGYKEVKKDLIIKLPKYSLFELENGRKRMLASAGELQKGNELALPSKYVNFLYLASHYEKLKGSPEDNEQKQLFVEQHKHYLDEIIEQISEFSKRVILADANLDKVLSAYNKHRDKPIREQAENIIHLFTLTNLGAPAAFKYFDTTIDRKRYTSTKEVLDATLIHQSITGLYETRIDLSQLGGDGGGGGEAAAKGGTLNIEDEYRLHETSKEPDVPLGSTWLSDFPQAWAETGGMGLAVRQAPLIIPLKATSTPVSIKQYPMSQEARLGIKPHIQRLLDQGILVPCQSPWNTPLLPVKKPGTNDYRPVQDLREVNKRVEDIHPTVPNPYNLLSGLPPSHQWYTVLDLKDAFFCLRLHPTSQPLFAFEWRDPEMGISGQLTWTRLPQGFKNSPTLFNEALHRDLADFRIQHPDLILLQYVDDLLLAATSEQDCQRGTRALLQTLGNLGYRASAKKAQICQKQVKYLGYLLKEGQRWLTEARKETVMGQPTPKTPRQLREFLGTAGFCRLWIPGFAEMAAPLYPLTKPGTLFNWGPDQQKAYQEIKQALLTAPALGLPDLTKPFELFVDEKQGYAKGVLTQKLGPWRRPVAYLSKKLDPVAAGWPPCLRMVAAIAVLTKDAGKLTMGQPLVILAPHAVEALVKQPPDRWLSNARMTHYQAMLLDTDRVQFGPVVALNPATLLPLPEKEAPHDCLEILAETHGTRPDLTDQPIPDADYTWYTDGSSFLQEGQRRAGAAVTTETEVIWARALPAGTSAQRAELIALTQALKMAEGKKLNVYTDSRYAFATAHVHGEIYRRRGWLTSEGREIKNKNEILALLKALFLPKRLSIIHCPGHQKGNSAEARGNRMADQAAREAAMKAVLETSTLLAGKRTADGSEFEKRTADGSEFESPKKKAKVE

SEQ ID NO: 6696 - protein, 2091 aa, synthetic construct
MPAAKRVKLDGGDKKYSIGLDIGTNSVGWAVITDEYKVPSKKFKVLGNTDRHSIKKNLIGALLFDSGETAEATRLKRTARRRYTRRKNRICYLQEIFSNEMAKVDDSFFHRLEESFLVEEDKKHERHPIFGNIVDEVAYHEKYPTIYHLRKKLVDSTDKADLRLIYLALAHMIKFRGHFLIEGDLNPDNSDVDKLFIQLVQTYNQLFEENPINASGVDAKAILSARLSKSRRLENLIAQLPGEKKNGLFGNLIALSLGLTPNFKSNFDLAEDAKLQLSKDTYDDDLDNLLAQIGDQYADLFLAAKNLSDAILLSDILRVNTEITKAPLSASMIKRYDEHHQDLTLLKALVRQQLPEKYKEIFFDQSKNGYAGYIDGGASQEEFYKFIKPILEKMDGTEELLVKLNREDLLRKQRTFDNGSIPHQIHLGELHAILRRQEDFYPFLKDNREKIEKILTFRIPYYVGPLARGNSRFAWMTRKSEETITPWNFEEVVDKGASAQSFIERMTNFDKNLPNEKVLPKHSLLYEYFTVYNELTKVKYVTEGMRKPAFLSGEQKKAIVDLLFKTNRKVTVKQLKEDYFKKIECFDSVEISGVEDRFNASLGTYHDLLKIIKDKDFLDNEENEDILEDIVLTLTLFEDREMIEERLKTYAHLFDDKVMKQLKRRRYTGWGRLSRKLINGIRDKQSGKTILDFLKSDGFANRNFMQLIHDDSLTFKEDIQKAQVSGQGDSLHEHIANLAGSPAIKKGILQTVKVVDELVKVMGRHKPENIVIEMARENQTTQKGQKNSRERMKRIEEGIKELGSQILKEHPVENTQLQNEKLYLYYLQNGRDMYVDQELDINRLSDYDVDHIVPQSFLKDDSIDNKVLTRSDKARGKSDNVPSEEVVKKMKNYWRQLLNAKLITQRKFDNLTKAERGGLSELDKAGFIKRQLVETRQITKHVAQILDSRMNTKYDENDKLIREVKVITLKSKLVSDFRKDFQFYKVREINNYHHAHDAYLNAVVGTALIKKYPKLESEFVYGDYKVYDVRKMIAKSEQEIGKATAKYFFYSNIMNFFKTEITLANGEIRKRPLIETNGETGEIVWDKGRDFATVRKVLSMPQVNIVKKTEVQTGGFSKESILPKRNSDKLIARKKDWDPKKYGGFDSPTVAYSVLVVAKVEKGKSKKLKSVKELLGITIMERSSFEKNPIDFLEAKGYKEVKKDLIIKLPKYSLFELENGRKRMLASAGELQKGNELALPSKYVNFLYLASHYEKLKGSPEDNEQKQLFVEQHKHYLDEIIEQISEFSKRVILADANLDKVLSAYNKHRDKPIREQAENIIHLFTLTNLGAPAAFKYFDTTIDRKRYTSTKEVLDATLIHQSITGLYETRIDLSQLGGDGGEAAAKGGGGGVLNLEEEYRLHEKPVPSSIDPSWLQLFPTVWAERAGMGLANQVPPVVVELRSGASPVAVRQYPMSKEAREGIRPHIQKFLDLGVLVPCRSPWNTPLLPVKKPGTNDYRPVQDLREINKRVQDIHPTVPNPYNLLSSLPPSYTWYSVLDLKDAFFCLRLHPNSQPLFAFEWKDPEKGNTGQLTWTRLPQGFKNSPTLFNEALHRDLAPFRALNPQVVLLQYVDDLLVAAPTYEDCKKGTQKLLQELSKLGYRVSAKKAQLCQREVTYLGYLLKEGKRWLTPARKATVMKIPVPTTPRQVREFLGTAGFCRLWIPGFASLAAPLYPLTKPSIPFIWTEEHQQAFDHIKKALLSAPALALPDLTKPFTLYIDERAGVARGVLTQTLGPWRRPVAYLSKKLDPVASGWPTCLKAVAAVALLLKDADKLTLGQNVTVIASHSLESIVRQPPDRWMTNARMTHYQSLLLNERVSFAPPAVLNPATLLPVESEATPVHRCSEILAEETGTRRDLEDQPLPGVPTWYTDGSSFITEGKRRAGAPIVDGKRTVWASSLPEGTSAQKAELVALTQALRLAEGKNINIYTDSRYAFATAHIHGAIYKQRGWLTSAGKDIKNKEEILALLEAIHLPRRVAIIHCPGHQRGSNPVATGNRRADEAAKQAALSTRVLAGTTKPAGKRTADGSEFEKRTADGSEFESPKKKAKVE

SEQ ID NO: 6697 - protein, 2091 aa, synthetic construct
MPAAKRVKLDGGDKKYSIGLDIGTNSVGWAVITDEYKVPSKKFKVLGNTDRHSIKKNLIGALLFDSGETAEATRLKRTARRRYTRRKNRICYLQEIFSNEMAKVDDSFFHRLEESFLVEEDKKHERHPIFGNIVDEVAYHEKYPTIYHLRKKLVDSTDKADLRLIYLALAHMIKFRGHFLIEGDLNPDNSDVDKLFIQLVQTYNQLFEENPINASGVDAKAILSARLSKSRRLENLIAQLPGEKKNGLFGNLIALSLGLTPNFKSNFDLAEDAKLQLSKDTYDDDLDNLLAQIGDQYADLFLAAKNLSDAILLSDILRVNTEITKAPLSASMIKRYDEHHQDLTLLKALVRQQLPEKYKEIFFDQSKNGYAGYIDGGASQEEFYKFIKPILEKMDGTEELLVKLNREDLLRKQRTFDNGSIPHQIHLGELHAILRRQEDFYPFLKDNREKIEKILTFRIPYYVGPLARGNSRFAWMTRKSEETITPWNFEEVVDKGASAQSFIERMTNFDKNLPNEKVLPKHSLLYEYFTVYNELTKVKYVTEGMRKPAFLSGEQKKAIVDLLFKTNRKVTVKQLKEDYFKKIECFDSVEISGVEDRFNASLGTYHDLLKIIKDKDFLDNEENEDILEDIVLTLTLFEDREMIEERLKTYAHLFDDKVMKQLKRRRYTGWGRLSRKLINGIRDKQSGKTILDFLKSDGFANRNFMQLIHDDSLTFKEDIQKAQVSGQGDSLHEHIANLAGSPAIKKGILQTVKVVDELVKVMGRHKPENIVIEMARENQTTQKGQKNSRERMKRIEEGIKELGSQILKEHPVENTQLQNEKLYLYYLQNGRDMYVDQELDINRLSDYDVDHIVPQSFLKDDSIDNKVLTRSDKARGKSDNVPSEEVVKKMKNYWRQLLNAKLITQRKFDNLTKAERGGLSELDKAGFIKRQLVETRQITKHVAQILDSRMNTKYDENDKLIREVKVITLKSKLVSDFRKDFQFYKVREINNYHHAHDAYLNAVVGTALIKKYPKLESEFVYGDYKVYDVRKMIAKSEQEIGKATAKYFFYSNIMNFFKTEITLANGEIRKRPLIETNGETGEIVWDKGRDFATVRKVLSMPQVNIVKKTEVQTGGFSKESILPKRNSDKLIARKKDWDPKKYGGFDSPTVAYSVLVVAKVEKGKSKKLKSVKELLGITIMERSSFEKNPIDFLEAKGYKEVKKDLIIKLPKYSLFELENGRKRMLASAGELQKGNELALPSKYVNFLYLASHYEKLKGSPEDNEQKQLFVEQHKHYLDEIIEQISEFSKRVILADANLDKVLSAYNKHRDKPIREQAENIIHLFTLTNLGAPAAFKYFDTTIDRKRYTSTKEVLDATLIHQSITGLYETRIDLSQLGGDGGEAAAKGGGGGVLNLEEEYRLHEKPVPSSIDPSWLQLFPTVWAERAGMGLANQVPPVVVELRSGASPVAVRQYPMSKEAREGIRPHIQKFLDLGVLVPCRSPWNTPLLPVKKPGTNDYRPVQDLREINKRVQDIHPTVPNPYNLLSSLPPSYTWYSVLDLKDAFFCLRLHPNSQPLFAFEWKDPEKGNTGQLTWTRLPQGFKNSPTLFNEALHRDLAPFRALNPQVVLLQYVDDLLVAAPTYEDCKKGTQKLLQELSKLGYRVSAKKAQLCQREVTYLGYLLKEGKRWLTPARKATVMKIPVPTTPRQVREFLGKAGFCRLFIPGFASLAAPLYPLTKPSIPFIWTEEHQQAFDHIKKALLSAPALALPDLTKPFTLYIDERAGVARGVLTQTLGPWRRPVAYLSKKLDPVASGWPTCLKAVAAVALLLKDADKLTLGQNVTVIASHSLESIVRQPPDRWMTNARMTHYQSLLLNERVSFAPPAVLNPATLLPVESEATPVHRCSEILAEETGTRRDLEDQPLPGVPTWYTDGSSFITEGKRRAGAPIVDGKRTVWASSLPEGTSAQKAELVALTQALRLAEGKNINIYTDSRYAFATAHIHGAIYKQRGWLTSAGKDIKNKEEILALLEAIHLPRRVAIIHCPGHQRGSNPVATGNRRADEAAKQAALSTRVLAGTTKPAGKRTADGSEFEKRTADGSEFESPKKKAKVE

SEQ ID NO: 6698 - protein, 2124 aa, synthetic construct
MPAAKRVKLDGGDKKYSIGLDIGTNSVGWAVITDEYKVPSKKFKVLGNTDRHSIKKNLIGALLFDSGETAEATRLKRTARRRYTRRKNRICYLQEIFSNEMAKVDDSFFHRLEESFLVEEDKKHERHPIFGNIVDEVAYHEKYPTIYHLRKKLVDSTDKADLRLIYLALAHMIKFRGHFLIEGDLNPDNSDVDKLFIQLVQTYNQLFEENPINASGVDAKAILSARLSKSRRLENLIAQLPGEKKNGLFGNLIALSLGLTPNFKSNFDLAEDAKLQLSKDTYDDDLDNLLAQIGDQYADLFLAAKNLSDAILLSDILRVNTEITKAPLSASMIKRYDEHHQDLTLLKALVRQQLPEKYKEIFFDQSKNGYAGYIDGGASQEEFYKFIKPILEKMDGTEELLVKLNREDLLRKQRTFDNGSIPHQIHLGELHAILRRQEDFYPFLKDNREKIEKILTFRIPYYVGPLARGNSRFAWMTRKSEETITPWNFEEVVDKGASAQSFIERMTNFDKNLPNEKVLPKHSLLYEYFTVYNELTKVKYVTEGMRKPAFLSGEQKKAIVDLLFKTNRKVTVKQLKEDYFKKIECFDSVEISGVEDRFNASLGTYHDLLKIIKDKDFLDNEENEDILEDIVLTLTLFEDREMIEERLKTYAHLFDDKVMKQLKRRRYTGWGRLSRKLINGIRDKQSGKTILDFLKSDGFANRNFMQLIHDDSLTFKEDIQKAQVSGQGDSLHEHIANLAGSPAIKKGILQTVKVVDELVKVMGRHKPENIVIEMARENQTTQKGQKNSRERMKRIEEGIKELGSQILKEHPVENTQLQNEKLYLYYLQNGRDMYVDQELDINRLSDYDVDHIVPQSFLKDDSIDNKVLTRSDKARGKSDNVPSEEVVKKMKNYWRQLLNAKLITQRKFDNLTKAERGGLSELDKAGFIKRQLVETRQITKHVAQILDSRMNTKYDENDKLIREVKVITLKSKLVSDFRKDFQFYKVREINNYHHAHDAYLNAVVGTALIKKYPKLESEFVYGDYKVYDVRKMIAKSEQEIGKATAKYFFYSNIMNFFKTEITLANGEIRKRPLIETNGETGEIVWDKGRDFATVRKVLSMPQVNIVKKTEVQTGGFSKESILPKRNSDKLIARKKDWDPKKYGGFDSPTVAYSVLVVAKVEKGKSKKLKSVKELLGITIMERSSFEKNPIDFLEAKGYKEVKKDLIIKLPKYSLFELENGRKRMLASAGELQKGNELALPSKYVNFLYLASHYEKLKGSPEDNEQKQLFVEQHKHYLDEIIEQISEFSKRVILADANLDKVLSAYNKHRDKPIREQAENIIHLFTLTNLGAPAAFKYFDTTIDRKRYTSTKEVLDATLIHQSITGLYETRIDLSQLGGDGGEAAAKGGGGGLLGRDLLTKLKAQIQFSTEGPQVTWEDRPAMCLVLNLEEEYRLHEKPVPPSIDPSWLQLFPMVWAEKAGMGLANQVPPVVVELKSDASPVAVRQYPMSKEAREGIRPHIQRFLDLGILVPCQSPWNTPLLPVKKPGTNDYRPVQDLREVNKRVQDIHPTVPNPYNLLSSLPPSHTWYSVLDLKDAFFCLKLHPNSQPLFAFEWRDPEKGNTGQLTWTRLPQGFKNSPTLFNEALHRDLASFRALNPQVVMLQYVDDLLVAAPTYRDCKEGTRRLLQELSKLGYRVSAKKAQLCREEVTYLGYLLKGGKRWLTPARKATVMKIPTPTTPRQVREFLGTAGFCRLWIPGFASLAAPLYPLTRPKVPFTWTEAHQEAFGRIKEALLSAPALALPDLTKPFALYVDEKEGVARGVLTQTLGPWRRPVAYLSKKLDPVASGWPTCLKAIAAVALLLKDADKLTLGQNVLVIAPHNLESIVRQPPDRWMTNARMTHYQSLLLNERVSFAPPAILNPATLLPVESDDTPIHICSEILAEETGTRPDLRDQPLPGVPAWYTDGSSFIMDGRRQAGAAIVDNKRTVWASNLPEGTSAQKAELIALTQALRLAEGKSINIYTDSRYAFATAHVHGAIYKQRGWLTSAGKDIKNKEEILALLEAIHLPKRVAIIHCPGHQRGTDPVATGNRKADEAAKQAAQSTRILTETTKNAGKRTADGSEFEKRTADGSEFESPKKKAKVE

SEQ ID NO: 6699 - protein, 2093 aa, synthetic construct
MPAAKRVKLDGGDKKYSIGLDIGTNSVGWAVITDEYKVPSKKFKVLGNTDRHSIKKNLIGALLFDSGETAEATRLKRTARRRYTRRKNRICYLQEIFSNEMAKVDDSFFHRLEESFLVEEDKKHERHPIFGNIVDEVAYHEKYPTIYHLRKKLVDSTDKADLRLIYLALAHMIKFRGHFLIEGDLNPDNSDVDKLFIQLVQTYNQLFEENPINASGVDAKAILSARLSKSRRLENLIAQLPGEKKNGLFGNLIALSLGLTPNFKSNFDLAEDAKLQLSKDTYDDDLDNLLAQIGDQYADLFLAAKNLSDAILLSDILRVNTEITKAPLSASMIKRYDEHHQDLTLLKALVRQQLPEKYKEIFFDQSKNGYAGYIDGGASQEEFYKFIKPILEKMDGTEELLVKLNREDLLRKQRTFDNGSIPHQIHLGELHAILRRQEDFYPFLKDNREKIEKILTFRIPYYVGPLARGNSRFAWMTRKSEETITPWNFEEVVDKGASAQSFIERMTNFDKNLPNEKVLPKHSLLYEYFTVYNELTKVKYVTEGMRKPAFLSGEQKKAIVDLLFKTNRKVTVKQLKEDYFKKIECFDSVEISGVEDRFNASLGTYHDLLKIIKDKDFLDNEENEDILEDIVLTLTLFEDREMIEERLKTYAHLFDDKVMKQLKRRRYTGWGRLSRKLINGIRDKQSGKTILDFLKSDGFANRNFMQLIHDDSLTFKEDIQKAQVSGQGDSLHEHIANLAGSPAIKKGILQTVKVVDELVKVMGRHKPENIVIEMARENQTTQKGQKNSRERMKRIEEGIKELGSQILKEHPVENTQLQNEKLYLYYLQNGRDMYVDQELDINRLSDYDVDHIVPQSFLKDDSIDNKVLTRSDKARGKSDNVPSEEVVKKMKNYWRQLLNAKLITQRKFDNLTKAERGGLSELDKAGFIKRQLVETRQITKHVAQILDSRMNTKYDENDKLIREVKVITLKSKLVSDFRKDFQFYKVREINNYHHAHDAYLNAVVGTALIKKYPKLESEFVYGDYKVYDVRKMIAKSEQEIGKATAKYFFYSNIMNFFKTEITLANGEIRKRPLIETNGETGEIVWDKGRDFATVRKVLSMPQVNIVKKTEVQTGGFSKESILPKRNSDKLIARKKDWDPKKYGGFDSPTVAYSVLVVAKVEKGKSKKLKSVKELLGITIMERSSFEKNPIDFLEAKGYKEVKKDLIIKLPKYSLFELENGRKRMLASAGELQKGNELALPSKYVNFLYLASHYEKLKGSPEDNEQKQLFVEQHKHYLDEIIEQISEFSKRVILADANLDKVLSAYNKHRDKPIREQAENIIHLFTLTNLGAPAAFKYFDTTIDRKRYTSTKEVLDATLIHQSITGLYETRIDLSQLGGDGGEAAAKGGGGGTLNIEDEHRLHETSKEPDVSLGSTWLSDFPQAWAETGGMGLAVRQAPLIIPLKATSTPVSIKQYPMSQEARLGIKPHIQRLLDQGILVPCQSPWNTPLLPVKKPGTNDYRPVQDLREVNKRVEDIHPTVPNPYNLLSGLPPSHQWYTVLDLKDAFFCLRLHPTSQPLFAFEWRDPEMGISGQLTWTRLPQGFKNSPTLFDEALHRDLADFRIQHPDLILLQYVDDLLLAATSELDCQQGTRALLQTLGNLGYRASAKKAQICQKQVKYLGYLLKEGQRWLTEARKETVMGQPTPKTPRQLREFLGTAGFCRLWIPGFAEMAAPLYPLTKTGTLFNWGPDQQKAYQEIKQALLTAPALGLPDLTKPFELFVDEKQGYAKGVLTQKLGPWRRPVAYLSKKLDPVAAGWPPCLRMVAAIAVLTKDAGKLTMGQPLVILAPHAVEALVKQPPDRWLSNARMTHYQALLLDTDRVQFGPVVALNPATLLPLPEEGLQHNCLDILAEAHGTRPDLTDQPLPDADHTWYTDGSSLLQEGQRKAGAAVTTETEVIWAKALPAGTSAQRAELIALTQALKMAEGKKLNVYTDSRYAFATAHIHGEIYRRRGLLTSEGKEIKNKDEILALLKALFLPKRLSIIHCPGHQKGHSAEARGNRMADQAARKAAITETPDTSTLLAGKRTADGSEFEKRTADGSEFESPKKKAKVE

SEQ ID NO: 6700 - protein, 2084 aa, synthetic construct
MPAAKRVKLDGGDKKYSIGLDIGTNSVGWAVITDEYKVPSKKFKVLGNTDRHSIKKNLIGALLFDSGETAEATRLKRTARRRYTRRKNRICYLQEIFSNEMAKVDDSFFHRLEESFLVEEDKKHERHPIFGNIVDEVAYHEKYPTIYHLRKKLVDSTDKADLRLIYLALAHMIKFRGHFLIEGDLNPDNSDVDKLFIQLVQTYNQLFEENPINASGVDAKAILSARLSKSRRLENLIAQLPGEKKNGLFGNLIALSLGLTPNFKSNFDLAEDAKLQLSKDTYDDDLDNLLAQIGDQYADLFLAAKNLSDAILLSDILRVNTEITKAPLSASMIKRYDEHHQDLTLLKALVRQQLPEKYKEIFFDQSKNGYAGYIDGGASQEEFYKFIKPILEKMDGTEELLVKLNREDLLRKQRTFDNGSIPHQIHLGELHAILRRQEDFYPFLKDNREKIEKILTFRIPYYVGPLARGNSRFAWMTRKSEETITPWNFEEVVDKGASAQSFIERMTNFDKNLPNEKVLPKHSLLYEYFTVYNELTKVKYVTEGMRKPAFLSGEQKKAIVDLLFKTNRKVTVKQLKEDYFKKIECFDSVEISGVEDRFNASLGTYHDLLKIIKDKDFLDNEENEDILEDIVLTLTLFEDREMIEERLKTYAHLFDDKVMKQLKRRRYTGWGRLSRKLINGIRDKQSGKTILDFLKSDGFANRNFMQLIHDDSLTFKEDIQKAQVSGQGDSLHEHIANLAGSPAIKKGILQTVKVVDELVKVMGRHKPENIVIEMARENQTTQKGQKNSRERMKRIEEGIKELGSQILKEHPVENTQLQNEKLYLYYLQNGRDMYVDQELDINRLSDYDVDHIVPQSFLKDDSIDNKVLTRSDKARGKSDNVPSEEVVKKMKNYWRQLLNAKLITQRKFDNLTKAERGGLSELDKAGFIKRQLVETRQITKHVAQILDSRMNTKYDENDKLIREVKVITLKSKLVSDFRKDFQFYKVREINNYHHAHDAYLNAVVGTALIKKYPKLESEFVYGDYKVYDVRKMIAKSEQEIGKATAKYFFYSNIMNFFKTEITLANGEIRKRPLIETNGETGEIVWDKGRDFATVRKVLSMPQVNIVKKTEVQTGGFSKESILPKRNSDKLIARKKDWDPKKYGGFDSPTVAYSVLVVAKVEKGKSKKLKSVKELLGITIMERSSFEKNPIDFLEAKGYKEVKKDLIIKLPKYSLFELENGRKRMLASAGELQKGNELALPSKYVNFLYLASHYEKLKGSPEDNEQKQLFVEQHKHYLDEIIEQISEFSKRVILADANLDKVLSAYNKHRDKPIREQAENIIHLFTLTNLGAPAAFKYFDTTIDRKRYTSTKEVLDATLIHQSITGLYETRIDLSQLGGDGGEAAAKGGGGGVPWLMKKPLQLTVLVPLHEYQERLLQQTALPKEQKELLQKLFLKYDALWQHWENQVGHRRIKPHNIATGTLAPRPQKQYPINPKAKPSIQIVIDDLLKQGVLIQQNSTMNTPVYPVPKPDGKWRMVLDYREVNKTIPLIAAQNQHSAGILSSIYRGKYKTTLDLTNGFWAHPITPESYWLTAFTWQGKQYCWTRLPQGFLNSPALFTADVVDLLKEIPNVQAYVDDIYISHDDPQEHLEQLEKIFSILLNAGYVVSLKKSEIAQREVEFLGFNITKEGRGLTDTFKQKLLNITPPKDLKQLQSILGLLNFARNFIPNYSELVKPLYTIVANANGKFISWTEDNSNQLQHIISVLNQADNLEERNPETRLIIKVNSSPSAGYIRYYNEGSKRPIMYVNYIFSKAEAKFTQTEKLLTTMHKGLIKAMDLAMGQEILVYSPIVSMTKIQRTPLPERKALPVRWITWMTYLEDPRIQFHYDKSLPELQQIPNVTEDVIAKTKHPSEFAMVFYTDGSAIKHPDVNKSHSAGMGIAQVQFIPEYKIVHQWSIPLGDHTAQLAEIAAVEFACKKALKISGPVLIVTDSFYVAESANKELPYWKSNGFLNNKKKPLRHVSKWKSIAECLQLKPDIIIMHEKGHQQPMTTLHTEGNNLADKLATQGSYVVHAGKRTADGSEFEKRTADGSEFESPKKKAKVE

SEQ ID NO: 6701 - protein, 2173 aa, synthetic construct
MPAAKRVKLDGGDKKYSIGLDIGTNSVGWAVITDEYKVPSKKFKVLGNTDRHSIKKNLIGALLFDSGETAEATRLKRTARRRYTRRKNRICYLQEIFSNEMAKVDDSFFHRLEESFLVEEDKKHERHPIFGNIVDEVAYHEKYPTIYHLRKKLVDSTDKADLRLIYLALAHMIKFRGHFLIEGDLNPDNSDVDKLFIQLVQTYNQLFEENPINASGVDAKAILSARLSKSRRLENLIAQLPGEKKNGLFGNLIALSLGLTPNFKSNFDLAEDAKLQLSKDTYDDDLDNLLAQIGDQYADLFLAAKNLSDAILLSDILRVNTEITKAPLSASMIKRYDEHHQDLTLLKALVRQQLPEKYKEIFFDQSKNGYAGYIDGGASQEEFYKFIKPILEKMDGTEELLVKLNREDLLRKQRTFDNGSIPHQIHLGELHAILRRQEDFYPFLKDNREKIEKILTFRIPYYVGPLARGNSRFAWMTRKSEETITPWNFEEVVDKGASAQSFIERMTNFDKNLPNEKVLPKHSLLYEYFTVYNELTKVKYVTEGMRKPAFLSGEQKKAIVDLLFKTNRKVTVKQLKEDYFKKIECFDSVEISGVEDRFNASLGTYHDLLKIIKDKDFLDNEENEDILEDIVLTLTLFEDREMIEERLKTYAHLFDDKVMKQLKRRRYTGWGRLSRKLINGIRDKQSGKTILDFLKSDGFANRNFMQLIHDDSLTFKEDIQKAQVSGQGDSLHEHIANLAGSPAIKKGILQTVKVVDELVKVMGRHKPENIVIEMARENQTTQKGQKNSRERMKRIEEGIKELGSQILKEHPVENTQLQNEKLYLYYLQNGRDMYVDQELDINRLSDYDVDHIVPQSFLKDDSIDNKVLTRSDKARGKSDNVPSEEVVKKMKNYWRQLLNAKLITQRKFDNLTKAERGGLSELDKAGFIKRQLVETRQITKHVAQILDSRMNTKYDENDKLIREVKVITLKSKLVSDFRKDFQFYKVREINNYHHAHDAYLNAVVGTALIKKYPKLESEFVYGDYKVYDVRKMIAKSEQEIGKATAKYFFYSNIMNFFKTEITLANGEIRKRPLIETNGETGEIVWDKGRDFATVRKVLSMPQVNIVKKTEVQTGGFSKESILPKRNSDKLIARKKDWDPKKYGGFDSPTVAYSVLVVAKVEKGKSKKLKSVKELLGITIMERSSFEKNPIDFLEAKGYKEVKKDLIIKLPKYSLFELENGRKRMLASAGELQKGNELALPSKYVNFLYLASHYEKLKGSPEDNEQKQLFVEQHKHYLDEIIEQISEFSKRVILADANLDKVLSAYNKHRDKPIREQAENIIHLFTLTNLGAPAAFKYFDTTIDRKRYTSTKEVLDATLIHQSITGLYETRIDLSQLGGDGGEAAAKGGGGGMDPLQLLQPLEAEIKGTKLKAHWNSGATITCVPQAFLEEEVPIKNIWIKTIHGEKEQPVYYLTFKIQGRKVEAEVISSPYDYILVSPSDIPWLMKKPLQLTTLVPLQEYEERLLKQTMLTGSYKEKLQSLFLKYDALWQHWENQVGHRRIKPHHIATGTVNPRPQKQYPINPKAKASIQTVINDLLKQGVLIQQNSIMNTPVYPVPKPDGKWRMVLDYREVNKTIPLIAAQNQHSAGILSSIFRGKYKTTLDLSNGFWAHSITPESYWLTAFTWLGQQYCWTRLPQGFLNSPALFNADVVDLLKEVPNVQVYVDDIYISHDDPREHLEQLEKVFSLLLNAGYVVSLKKSEIAQHEVEFLGFNITKEGRGLTETFKQKLLNITPPRDLKQLQSILGKLNFARNFIPNFSELVKPLYNIIATAPGKYITWTTDNSQQLQNIISMLNSAENLEERNPEVRLIMKVNTSPSAGYIRFYNEFAKRPIMYLNYVYTKAEVKFTNTEKLLTTIHKGLIKALDLGMGQEILVYSPIVSMTKIQKTPLPERKALPIRWITWMSYLEDPRIQFHYDKTLPELQQVPTVTDDIIAKIKHPSEFSMVFYTDGSAIKHPNVNKSHNAGMGIAQVQFKPEFTVINTWSIPLGDHTAQLAEVAAVEFACKKALKIDGPVLIVTDSFYVAESVNKELPYWQSNGFFNNKKKPLKHVSKWKSIADCIQLKPDIIIIHEKGHQPTASTFHTEGNNLADKLATQGSYVVNAGKRTADGSEFEKRTADGSEFESPKKKAKVE

SEQ ID NO: 6702 - protein, 2091 aa, synthetic construct
MPAAKRVKLDGGDKKYSIGLDIGTNSVGWAVITDEYKVPSKKFKVLGNTDRHSIKKNLIGALLFDSGETAEATRLKRTARRRYTRRKNRICYLQEIFSNEMAKVDDSFFHRLEESFLVEEDKKHERHPIFGNIVDEVAYHEKYPTIYHLRKKLVDSTDKADLRLIYLALAHMIKFRGHFLIEGDLNPDNSDVDKLFIQLVQTYNQLFEENPINASGVDAKAILSARLSKSRRLENLIAQLPGEKKNGLFGNLIALSLGLTPNFKSNFDLAEDAKLQLSKDTYDDDLDNLLAQIGDQYADLFLAAKNLSDAILLSDILRVNTEITKAPLSASMIKRYDEHHQDLTLLKALVRQQLPEKYKEIFFDQSKNGYAGYIDGGASQEEFYKFIKPILEKMDGTEELLVKLNREDLLRKQRTFDNGSIPHQIHLGELHAILRRQEDFYPFLKDNREKIEKILTFRIPYYVGPLARGNSRFAWMTRKSEETITPWNFEEVVDKGASAQSFIERMTNFDKNLPNEKVLPKHSLLYEYFTVYNELTKVKYVTEGMRKPAFLSGEQKKAIVDLLFKTNRKVTVKQLKEDYFKKIECFDSVEISGVEDRFNASLGTYHDLLKIIKDKDFLDNEENEDILEDIVLTLTLFEDREMIEERLKTYAHLFDDKVMKQLKRRRYTGWGRLSRKLINGIRDKQSGKTILDFLKSDGFANRNFMQLIHDDSLTFKEDIQKAQVSGQGDSLHEHIANLAGSPAIKKGILQTVKVVDELVKVMGRHKPENIVIEMARENQTTQKGQKNSRERMKRIEEGIKELGSQILKEHPVENTQLQNEKLYLYYLQNGRDMYVDQELDINRLSDYDVDHIVPQSFLKDDSIDNKVLTRSDKARGKSDNVPSEEVVKKMKNYWRQLLNAKLITQRKFDNLTKAERGGLSELDKAGFIKRQLVETRQITKHVAQILDSRMNTKYDENDKLIREVKVITLKSKLVSDFRKDFQFYKVREINNYHHAHDAYLNAVVGTALIKKYPKLESEFVYGDYKVYDVRKMIAKSEQEIGKATAKYFFYSNIMNFFKTEITLANGEIRKRPLIETNGETGEIVWDKGRDFATVRKVLSMPQVNIVKKTEVQTGGFSKESILPKRNSDKLIARKKDWDPKKYGGFDSPTVAYSVLVVAKVEKGKSKKLKSVKELLGITIMERSSFEKNPIDFLEAKGYKEVKKDLIIKLPKYSLFELENGRKRMLASAGELQKGNELALPSKYVNFLYLASHYEKLKGSPEDNEQKQLFVEQHKHYLDEIIEQISEFSKRVILADANLDKVLSAYNKHRDKPIREQAENIIHLFTLTNLGAPAAFKYFDTTIDRKRYTSTKEVLDATLIHQSITGLYETRIDLSQLGGDGGEAAAKGGGGGVLNLEEEYRLHEKPVPSSIDPSWLQLFPTVWAERAGMGLANQVPPVVVELRSGASPVAVRQYPMSKEAREGIRPHIQRFLDLGVLVPCQSPWNTPLLPVKKPGTNDYRPVQDLREINKRVQDIHPTVPNPYNLLSSLPPSHTWYSVLDLKDAFFCLKLHPNSQPLFAFEWRDPEKGNTGQLTWTRLPQGFKNSPTLFDEALHRDLAPFRALNPQVVLLQYVDDLLVAAPTYRDCKEGTQKLLQELSKLGYRVSAKKAQLCQKEVTYLGYLLKEGKRWLTPARKATVMKIPPPTTPRQVREFLGTAGFCRLWIPGFASLAAPLYPLTKESIPFIWTEEHQKAFDRIKEALLSAPALALPDLTKPFTLYVDERAGVARGVLTQTLGPWRRPVAYLSKKLDPVASGWPTCLKAVAAVALLLKDADKLTLGQNVTVIASHSLESIVRQPPDRWMTNARMTHYQSLLLNERVSFAPPAVLNPATLLPVESEATPVHRCSEILAEETGTRRDLKDQPLPGVPAWYTDGSSFIAEGKRRAGAAIVDGKRTVWASSLPEGTSAQKAELVALTQALRLAEGKDINIYTDSRYAFATAHIHGAIYKQRGLLTSAGKDIKNKEEILALLEAIHLPKRVAIIHCPGHQKGNDPVATGNRRADEAAKQAALSTRVLAETTKPAGKRTADGSEFEKRTADGSEFESPKKKAKVE

SEQ ID NO: 6703 - protein, 2093 aa, synthetic construct
MPAAKRVKLDGGDKKYSIGLDIGTNSVGWAVITDEYKVPSKKFKVLGNTDRHSIKKNLIGALLFDSGETAEATRLKRTARRRYTRRKNRICYLQEIFSNEMAKVDDSFFHRLEESFLVEEDKKHERHPIFGNIVDEVAYHEKYPTIYHLRKKLVDSTDKADLRLIYLALAHMIKFRGHFLIEGDLNPDNSDVDKLFIQLVQTYNQLFEENPINASGVDAKAILSARLSKSRRLENLIAQLPGEKKNGLFGNLIALSLGLTPNFKSNFDLAEDAKLQLSKDTYDDDLDNLLAQIGDQYADLFLAAKNLSDAILLSDILRVNTEITKAPLSASMIKRYDEHHQDLTLLKALVRQQLPEKYKEIFFDQSKNGYAGYIDGGASQEEFYKFIKPILEKMDGTEELLVKLNREDLLRKQRTFDNGSIPHQIHLGELHAILRRQEDFYPFLKDNREKIEKILTFRIPYYVGPLARGNSRFAWMTRKSEETITPWNFEEVVDKGASAQSFIERMTNFDKNLPNEKVLPKHSLLYEYFTVYNELTKVKYVTEGMRKPAFLSGEQKKAIVDLLFKTNRKVTVKQLKEDYFKKIECFDSVEISGVEDRFNASLGTYHDLLKIIKDKDFLDNEENEDILEDIVLTLTLFEDREMIEERLKTYAHLFDDKVMKQLKRRRYTGWGRLSRKLINGIRDKQSGKTILDFLKSDGFANRNFMQLIHDDSLTFKEDIQKAQVSGQGDSLHEHIANLAGSPAIKKGILQTVKVVDELVKVMGRHKPENIVIEMARENQTTQKGQKNSRERMKRIEEGIKELGSQILKEHPVENTQLQNEKLYLYYLQNGRDMYVDQELDINRLSDYDVDHIVPQSFLKDDSIDNKVLTRSDKARGKSDNVPSEEVVKKMKNYWRQLLNAKLITQRKFDNLTKAERGGLSELDKAGFIKRQLVETRQITKHVAQILDSRMNTKYDENDKLIREVKVITLKSKLVSDFRKDFQFYKVREINNYHHAHDAYLNAVVGTALIKKYPKLESEFVYGDYKVYDVRKMIAKSEQEIGKATAKYFFYSNIMNFFKTEITLANGEIRKRPLIETNGETGEIVWDKGRDFATVRKVLSMPQVNIVKKTEVQTGGFSKESILPKRNSDKLIARKKDWDPKKYGGFDSPTVAYSVLVVAKVEKGKSKKLKSVKELLGITIMERSSFEKNPIDFLEAKGYKEVKKDLIIKLPKYSLFELENGRKRMLASAGELQKGNELALPSKYVNFLYLASHYEKLKGSPEDNEQKQLFVEQHKHYLDEIIEQISEFSKRVILADANLDKVLSAYNKHRDKPIREQAENIIHLFTLTNLGAPAAFKYFDTTIDRKRYTSTKEVLDATLIHQSITGLYETRIDLSQLGGDGGGGGPAPGGTAPLEEEYRLFLEAPIQNVTLLEQWKREIPKVWAEINPPGLASTQAPIHVQLLSTALPVRVRQYPITLEAKRSLRETIRKFRAAGILRPVHSPWNTPLLPVRKSGTSEYRMVQDLREVNKRVETIHPTVPNPYTLLSLLPPDRIWYSVLDLKDAFFCIPLAPESQLIFAFEWADAEEGESGQLTWTRLPQGFKNSPTLFNEALNRDLQGFRLDHPSVSLLQYVDDLLIAADTQAACLSATRDLLMTLAELGYRVSGKKAQLCQEEVTYLGFKIHKGSRSLSNSRTQAILQIPVPKTKRQVREFLGTIGYCRLWIPGFAELAQPLYAATRPGNDPLVWGEKEEEAFQSLKLALTQPPALALPSLDKPFQLFVEETSGAAKGVLTQALGPWKRPVAYLSKRLDPVAAGWPRCLRAIAAAALLTREASKLTFGQDIEITSSHNLESLLRSPPDKWLTNARITQYQVLLLDPPRVRFKQTAALNPATLLPETDDTLPIHHCLDTLDSLTSTRPDLTDQPLAQAEATLFTDGSSYIRDGKRYAGAAVVTLDSVIWAEPLPIGTSAQKAELIALTKALEWSKDKSVNIYTDSRYAFATLHVHGMIYRERGWLTAGGKAIKNAPEILALLTAVWLPKRVAVMHCKGHQKDDAPTSTGNRRADEVAREVAIRPLSTQATISAGKRTADGSEFEKRTADGSEFESPKKKAKVE

SEQ ID NO: 6704 - protein, 2082 aa, synthetic construct
MPAAKRVKLDGGDKKYSIGLDIGTNSVGWAVITDEYKVPSKKFKVLGNTDRHSIKKNLIGALLFDSGETAEATRLKRTARRRYTRRKNRICYLQEIFSNEMAKVDDSFFHRLEESFLVEEDKKHERHPIFGNIVDEVAYHEKYPTIYHLRKKLVDSTDKADLRLIYLALAHMIKFRGHFLIEGDLNPDNSDVDKLFIQLVQTYNQLFEENPINASGVDAKAILSARLSKSRRLENLIAQLPGEKKNGLFGNLIALSLGLTPNFKSNFDLAEDAKLQLSKDTYDDDLDNLLAQIGDQYADLFLAAKNLSDAILLSDILRVNTEITKAPLSASMIKRYDEHHQDLTLLKALVRQQLPEKYKEIFFDQSKNGYAGYIDGGASQEEFYKFIKPILEKMDGTEELLVKLNREDLLRKQRTFDNGSIPHQIHLGELHAILRRQEDFYPFLKDNREKIEKILTFRIPYYVGPLARGNSRFAWMTRKSEETITPWNFEEVVDKGASAQSFIERMTNFDKNLPNEKVLPKHSLLYEYFTVYNELTKVKYVTEGMRKPAFLSGEQKKAIVDLLFKTNRKVTVKQLKEDYFKKIECFDSVEISGVEDRFNASLGTYHDLLKIIKDKDFLDNEENEDILEDIVLTLTLFEDREMIEERLKTYAHLFDDKVMKQLKRRRYTGWGRLSRKLINGIRDKQSGKTILDFLKSDGFANRNFMQLIHDDSLTFKEDIQKAQVSGQGDSLHEHIANLAGSPAIKKGILQTVKVVDELVKVMGRHKPENIVIEMARENQTTQKGQKNSRERMKRIEEGIKELGSQILKEHPVENTQLQNEKLYLYYLQNGRDMYVDQELDINRLSDYDVDHIVPQSFLKDDSIDNKVLTRSDKARGKSDNVPSEEVVKKMKNYWRQLLNAKLITQRKFDNLTKAERGGLSELDKAGFIKRQLVETRQITKHVAQILDSRMNTKYDENDKLIREVKVITLKSKLVSDFRKDFQFYKVREINNYHHAHDAYLNAVVGTALIKKYPKLESEFVYGDYKVYDVRKMIAKSEQEIGKATAKYFFYSNIMNFFKTEITLANGEIRKRPLIETNGETGEIVWDKGRDFATVRKVLSMPQVNIVKKTEVQTGGFSKESILPKRNSDKLIARKKDWDPKKYGGFDSPTVAYSVLVVAKVEKGKSKKLKSVKELLGITIMERSSFEKNPIDFLEAKGYKEVKKDLIIKLPKYSLFELENGRKRMLASAGELQKGNELALPSKYVNFLYLASHYEKLKGSPEDNEQKQLFVEQHKHYLDEIIEQISEFSKRVILADANLDKVLSAYNKHRDKPIREQAENIIHLFTLTNLGAPAAFKYFDTTIDRKRYTSTKEVLDATLIHQSITGLYETRIDLSQLGGDGGGGGPAPGGVPWILKKPLELTIKLDLEEQQGTLLNNSILSKKGKEELKQLFEKYSALWQSWENQVGHRRIRPHKIATGTVKPTPQKQYHINPKAKPDIQIVINDLLKQGVLIQKESTMNTPVYPVPKPNGRWRMVLDYRAVNKVTPLIAVQNQHSYGILGSLFKGRYKTTIDLSNGFWAHPIVPEDYWITAFTWQGKQYCWTVLPQGFLNSPGLFTGDVVDLLQGIPNVEVYVDDVYISHDSEKEHLEYLDILFNRLKEAGYIISLKKSNIANSIVDFLGFQITNEGRGLTDTFKEKLENITAPTTLKQLQSILGLLNFARNFIPDFTELIAPLYALIPKSTKNYVPWQIEHSTTLETLITKLNGAEYLQGRKGDKTLIMKVNASYTTGYIRYYNEGEKKPISYVSIVFSKTELKFTELEKLLTTVHKGLLKALDLSMGQNIHVYSPIVSMQNIQKTPQTAKKALASRWLSWLSYLEDPRIRFFYDPQMPALKDLPAVDTGKDNKKHPSNFQHIFYTDGSAITSPTKEGHLNAGMGIVYFINKDGNLQKQQEWSISLGNHTAQFAEIAAFEFALKKCLPLGGNILVVTDSNYVAKAYNEELDVWASNGFVNNRKKPLKHISKWKSVADLKRLRPDVVVTHEPGHQKLDSSPHAYGNNLADQLATQASFKVHAGKRTADGSEFEKRTADGSEFESPKKKAKVE

SEQ ID NO: 6705 - protein, 2213 aa, synthetic construct
MPAAKRVKLDGGDKKYSIGLDIGTNSVGWAVITDEYKVPSKKFKVLGNTDRHSIKKNLIGALLFDSGETAEATRLKRTARRRYTRRKNRICYLQEIFSNEMAKVDDSFFHRLEESFLVEEDKKHERHPIFGNIVDEVAYHEKYPTIYHLRKKLVDSTDKADLRLIYLALAHMIKFRGHFLIEGDLNPDNSDVDKLFIQLVQTYNQLFEENPINASGVDAKAILSARLSKSRRLENLIAQLPGEKKNGLFGNLIALSLGLTPNFKSNFDLAEDAKLQLSKDTYDDDLDNLLAQIGDQYADLFLAAKNLSDAILLSDILRVNTEITKAPLSASMIKRYDEHHQDLTLLKALVRQQLPEKYKEIFFDQSKNGYAGYIDGGASQEEFYKFIKPILEKMDGTEELLVKLNREDLLRKQRTFDNGSIPHQIHLGELHAILRRQEDFYPFLKDNREKIEKILTFRIPYYVGPLARGNSRFAWMTRKSEETITPWNFEEVVDKGASAQSFIERMTNFDKNLPNEKVLPKHSLLYEYFTVYNELTKVKYVTEGMRKPAFLSGEQKKAIVDLLFKTNRKVTVKQLKEDYFKKIECFDSVEISGVEDRFNASLGTYHDLLKIIKDKDFLDNEENEDILEDIVLTLTLFEDREMIEERLKTYAHLFDDKVMKQLKRRRYTGWGRLSRKLINGIRDKQSGKTILDFLKSDGFANRNFMQLIHDDSLTFKEDIQKAQVSGQGDSLHEHIANLAGSPAIKKGILQTVKVVDELVKVMGRHKPENIVIEMARENQTTQKGQKNSRERMKRIEEGIKELGSQILKEHPVENTQLQNEKLYLYYLQNGRDMYVDQELDINRLSDYDVDHIVPQSFLKDDSIDNKVLTRSDKARGKSDNVPSEEVVKKMKNYWRQLLNAKLITQRKFDNLTKAERGGLSELDKAGFIKRQLVETRQITKHVAQILDSRMNTKYDENDKLIREVKVITLKSKLVSDFRKDFQFYKVREINNYHHAHDAYLNAVVGTALIKKYPKLESEFVYGDYKVYDVRKMIAKSEQEIGKATAKYFFYSNIMNFFKTEITLANGEIRKRPLIETNGETGEIVWDKGRDFATVRKVLSMPQVNIVKKTEVQTGGFSKESILPKRNSDKLIARKKDWDPKKYGGFDSPTVAYSVLVVAKVEKGKSKKLKSVKELLGITIMERSSFEKNPIDFLEAKGYKEVKKDLIIKLPKYSLFELENGRKRMLASAGELQKGNELALPSKYVNFLYLASHYEKLKGSPEDNEQKQLFVEQHKHYLDEIIEQISEFSKRVILADANLDKVLSAYNKHRDKPIREQAENIIHLFTLTNLGAPAAFKYFDTTIDRKRYTSTKEVLDATLIHQSITGLYETRIDLSQLGGDGGGGGPAPGGTLGDQGSRGSDPLPEPRVTLTVEGIPTEFLVNTGAEHSVLTKPMGKMGSKRTVVAGATGSKVYPWTTKRLLKIGQKQVTHSFLVIPECPAPLLGRDLLTKLKAQIQFSTEGPQVTWEDRPAMCLVLNLEEEYRLHEKPVPPSIDPSWLQLFPMVWAEKAGMGLANQVPPVVVELKSDASPVAVRQYPMSKEAREGIRPHIQRFLDLGILVPCQSPWNTPLLPVKKPGTNDYRPVQDLREVNKRVQDIHPTVPNPYNLLSSLPPSHTWYSVLDLKDAFFCLKLHPNSQPLFAFEWRDPEKGNTGQLTWTRLPQGFKNSPTLFNEALHRDLASFRALNPQVVMLQYVDDLLVAAPTYRDCKEGTRRLLQELSKLGYRVSAKKAQLCREEVTYLGYLLKGGKRWLTPARKATVMKIPTPTTPRQVREFLGTAGFCRLWIPGFASLAAPLYPLTRPKVPFTWTEAHQEAFGRIKEALLSAPALALPDLTKPFALYVDEKEGVARGVLTQTLGPWRRPVAYLSKKLDPVASGWPTCLKAIAAVALLLKDADKLTLGQNVLVIAPHNLESIVRQPPDRWMTNARMTHYQSLLLNERVSFAPPAILNPATLLPVESDDTPIHICSEILAEETGTRPDLRDQPLPGVPAWYTDGSSFIMDGRRQAGAAIVDNKRTVWASNLPEGTSAQKAELIALTQALRLAEGKSINIYTDSRYAFATAHVHGAIYKQRGWLTSAGKDIKNKEEILALLEAIHLPKRVAIIHCPGHQRGTDPVATGNRKADEAAKQAAQSTRILTETTKNAGKRTADGSEFEKRTADGSEFESPKKKAKVE

SEQ ID NO: 6706 - protein, 2091 aa, synthetic construct
MPAAKRVKLDGGDKKYSIGLDIGTNSVGWAVITDEYKVPSKKFKVLGNTDRHSIKKNLIGALLFDSGETAEATRLKRTARRRYTRRKNRICYLQEIFSNEMAKVDDSFFHRLEESFLVEEDKKHERHPIFGNIVDEVAYHEKYPTIYHLRKKLVDSTDKADLRLIYLALAHMIKFRGHFLIEGDLNPDNSDVDKLFIQLVQTYNQLFEENPINASGVDAKAILSARLSKSRRLENLIAQLPGEKKNGLFGNLIALSLGLTPNFKSNFDLAEDAKLQLSKDTYDDDLDNLLAQIGDQYADLFLAAKNLSDAILLSDILRVNTEITKAPLSASMIKRYDEHHQDLTLLKALVRQQLPEKYKEIFFDQSKNGYAGYIDGGASQEEFYKFIKPILEKMDGTEELLVKLNREDLLRKQRTFDNGSIPHQIHLGELHAILRRQEDFYPFLKDNREKIEKILTFRIPYYVGPLARGNSRFAWMTRKSEETITPWNFEEVVDKGASAQSFIERMTNFDKNLPNEKVLPKHSLLYEYFTVYNELTKVKYVTEGMRKPAFLSGEQKKAIVDLLFKTNRKVTVKQLKEDYFKKIECFDSVEISGVEDRFNASLGTYHDLLKIIKDKDFLDNEENEDILEDIVLTLTLFEDREMIEERLKTYAHLFDDKVMKQLKRRRYTGWGRLSRKLINGIRDKQSGKTILDFLKSDGFANRNFMQLIHDDSLTFKEDIQKAQVSGQGDSLHEHIANLAGSPAIKKGILQTVKVVDELVKVMGRHKPENIVIEMARENQTTQKGQKNSRERMKRIEEGIKELGSQILKEHPVENTQLQNEKLYLYYLQNGRDMYVDQELDINRLSDYDVDHIVPQSFLKDDSIDNKVLTRSDKARGKSDNVPSEEVVKKMKNYWRQLLNAKLITQRKFDNLTKAERGGLSELDKAGFIKRQLVETRQITKHVAQILDSRMNTKYDENDKLIREVKVITLKSKLVSDFRKDFQFYKVREINNYHHAHDAYLNAVVGTALIKKYPKLESEFVYGDYKVYDVRKMIAKSEQEIGKATAKYFFYSNIMNFFKTEITLANGEIRKRPLIETNGETGEIVWDKGRDFATVRKVLSMPQVNIVKKTEVQTGGFSKESILPKRNSDKLIARKKDWDPKKYGGFDSPTVAYSVLVVAKVEKGKSKKLKSVKELLGITIMERSSFEKNPIDFLEAKGYKEVKKDLIIKLPKYSLFELENGRKRMLASAGELQKGNELALPSKYVNFLYLASHYEKLKGSPEDNEQKQLFVEQHKHYLDEIIEQISEFSKRVILADANLDKVLSAYNKHRDKPIREQAENIIHLFTLTNLGAPAAFKYFDTTIDRKRYTSTKEVLDATLIHQSITGLYETRIDLSQLGGDGGGGGPAPGGTLNLEDEYRLYETSAEPEVSPGSTWLSDFPQAWAETGGMGLAVRQAPLIIPLKATSTPVSIKQYPMSQEAKLGIKPHIQRLLDQGILVPCQSPWNTPLLPVKKPGTNDYRPVQDLREVNKRVEDIHPTVPNPYNLLSGLPPSHRWYTVLDLKDAFFCLRLHPTSQPLFAFEWRDPGMGISGQLTWTRLPQGFKNSPTLFNEALHRDLADFRIQHPDLILLQYVDDILLAATSELDCQQGTRALLLTLGNLGYRASAKKAQLCQKQVKYLGYLLKEGQRWLTEARKETVMGQPTPKTPRQLREFLGKAGFCRLFIPGFAEMAAPLYPLTKPGTLFNWGPDQQKAYQEIKQALLTAPALGLPDLTKPFELFVDEKQGYAKGVLTQKLGPWRRPVAYLSKKLDPVAAGWPPCLRMVAAIAVLRKDAGKLTMGQPLVILAPHAVEALVKQPPDRWLSNARMTHYQAMLLDTDRVQFGPVVALNPATLLPLPEEGAPHDCLEILAETHGTRPDLTDQPIPDADHTWYTDGSSFLQEGQRKAGAAVTTETEVIWARALPAGTSAQRAELIALTQALKMAEGKRLNVYTDSRYAFATAHIHGEIYRRRGWLTSEGREIKNKSEILALLKALFLPKRLSIIHCLGHQKGDSAEARGNRLADQAAREAAIKTPPDTSTLLAGKRTADGSEFEKRTADGSEFESPKKKAKVE

SEQ ID NO: 6707 - protein, 2091 aa, synthetic construct
MPAAKRVKLDGGDKKYSIGLDIGTNSVGWAVITDEYKVPSKKFKVLGNTDRHSIKKNLIGALLFDSGETAEATRLKRTARRRYTRRKNRICYLQEIFSNEMAKVDDSFFHRLEESFLVEEDKKHERHPIFGNIVDEVAYHEKYPTIYHLRKKLVDSTDKADLRLIYLALAHMIKFRGHFLIEGDLNPDNSDVDKLFIQLVQTYNQLFEENPINASGVDAKAILSARLSKSRRLENLIAQLPGEKKNGLFGNLIALSLGLTPNFKSNFDLAEDAKLQLSKDTYDDDLDNLLAQIGDQYADLFLAAKNLSDAILLSDILRVNTEITKAPLSASMIKRYDEHHQDLTLLKALVRQQLPEKYKEIFFDQSKNGYAGYIDGGASQEEFYKFIKPILEKMDGTEELLVKLNREDLLRKQRTFDNGSIPHQIHLGELHAILRRQEDFYPFLKDNREKIEKILTFRIPYYVGPLARGNSRFAWMTRKSEETITPWNFEEVVDKGASAQSFIERMTNFDKNLPNEKVLPKHSLLYEYFTVYNELTKVKYVTEGMRKPAFLSGEQKKAIVDLLFKTNRKVTVKQLKEDYFKKIECFDSVEISGVEDRFNASLGTYHDLLKIIKDKDFLDNEENEDILEDIVLTLTLFEDREMIEERLKTYAHLFDDKVMKQLKRRRYTGWGRLSRKLINGIRDKQSGKTILDFLKSDGFANRNFMQLIHDDSLTFKEDIQKAQVSGQGDSLHEHIANLAGSPAIKKGILQTVKVVDELVKVMGRHKPENIVIEMARENQTTQKGQKNSRERMKRIEEGIKELGSQILKEHPVENTQLQNEKLYLYYLQNGRDMYVDQELDINRLSDYDVDHIVPQSFLKDDSIDNKVLTRSDKARGKSDNVPSEEVVKKMKNYWRQLLNAKLITQRKFDNLTKAERGGLSELDKAGFIKRQLVETRQITKHVAQILDSRMNTKYDENDKLIREVKVITLKSKLVSDFRKDFQFYKVREINNYHHAHDAYLNAVVGTALIKKYPKLESEFVYGDYKVYDVRKMIAKSEQEIGKATAKYFFYSNIMNFFKTEITLANGEIRKRPLIETNGETGEIVWDKGRDFATVRKVLSMPQVNIVKKTEVQTGGFSKESILPKRNSDKLIARKKDWDPKKYGGFDSPTVAYSVLVVAKVEKGKSKKLKSVKELLGITIMERSSFEKNPIDFLEAKGYKEVKKDLIIKLPKYSLFELENGRKRMLASAGELQKGNELALPSKYVNFLYLASHYEKLKGSPEDNEQKQLFVEQHKHYLDEIIEQISEFSKRVILADANLDKVLSAYNKHRDKPIREQAENIIHLFTLTNLGAPAAFKYFDTTIDRKRYTSTKEVLDATLIHQSITGLYETRIDLSQLGGDGGGGGPAPGGTLGIEDEYRLHETSTEPDVSLGSTWLSDFPQAWAETGGMGLAVRQAPLIIPLKATSTPVSIQQYPMSHEARLGIKPHIQRLLDQGILVPCQSPWNTPLLPVKKPGTNDYRPVQDLREVNKRVEDIHPTVPNPYNLLSGLPPSHQWYTVLDLKDAFFCLRLHPTSQPLFAFEWRDPGMGISGQLTWTRLPQGFKNSPTLFNEALHRDLADFRIQHPDLILLQYVDDILLAATSELDCQQGTRALLQTLGDLGYRASAKKAQICQKQVKYLGYLLREGQRWLTEARKETVMGQPVPKTPRQLREFLGTAGFCRLWIPGFAEMAAPLYPLTKPGTLFSWGPDQQKAYQEIKQALLTAPALGLPDLTKPFELFVDEKQGYAKGVLTQKLGPWRRPVAYLSKKLDPVAAGWPPCLRMVAAIAVLTKDAGKLTMGQPLVILAPHAVEALVKQPPDRWLSNARMTHYQAMLLDTDRVQFGPVVALNPATLLPLPEEGAPHDCLEILAETHGTRPDLTDQPIPDADHTWYTDGSSFLQEGQRKAGAAVTTETEVIWAGALPAGTSAQRAELIALTQALKMAEGKRLNVYTDSRYAFATAHIHGEIYRRRGWLTSEGREIKNKSEILALLKALFLPKRLSIIHCLGHQKGDSAEARGNRLADQAAREAAIKTPPDTSTLLAGKRTADGSEFEKRTADGSEFESPKKKAKVE

SEQ ID NO: 6708 - protein, 2091 aa, synthetic construct
MPAAKRVKLDGGDKKYSIGLDIGTNSVGWAVITDEYKVPSKKFKVLGNTDRHSIKKNLIGALLFDSGETAEATRLKRTARRRYTRRKNRICYLQEIFSNEMAKVDDSFFHRLEESFLVEEDKKHERHPIFGNIVDEVAYHEKYPTIYHLRKKLVDSTDKADLRLIYLALAHMIKFRGHFLIEGDLNPDNSDVDKLFIQLVQTYNQLFEENPINASGVDAKAILSARLSKSRRLENLIAQLPGEKKNGLFGNLIALSLGLTPNFKSNFDLAEDAKLQLSKDTYDDDLDNLLAQIGDQYADLFLAAKNLSDAILLSDILRVNTEITKAPLSASMIKRYDEHHQDLTLLKALVRQQLPEKYKEIFFDQSKNGYAGYIDGGASQEEFYKFIKPILEKMDGTEELLVKLNREDLLRKQRTFDNGSIPHQIHLGELHAILRRQEDFYPFLKDNREKIEKILTFRIPYYVGPLARGNSRFAWMTRKSEETITPWNFEEVVDKGASAQSFIERMTNFDKNLPNEKVLPKHSLLYEYFTVYNELTKVKYVTEGMRKPAFLSGEQKKAIVDLLFKTNRKVTVKQLKEDYFKKIECFDSVEISGVEDRFNASLGTYHDLLKIIKDKDFLDNEENEDILEDIVLTLTLFEDREMIEERLKTYAHLFDDKVMKQLKRRRYTGWGRLSRKLINGIRDKQSGKTILDFLKSDGFANRNFMQLIHDDSLTFKEDIQKAQVSGQGDSLHEHIANLAGSPAIKKGILQTVKVVDELVKVMGRHKPENIVIEMARENQTTQKGQKNSRERMKRIEEGIKELGSQILKEHPVENTQLQNEKLYLYYLQNGRDMYVDQELDINRLSDYDVDHIVPQSFLKDDSIDNKVLTRSDKARGKSDNVPSEEVVKKMKNYWRQLLNAKLITQRKFDNLTKAERGGLSELDKAGFIKRQLVETRQITKHVAQILDSRMNTKYDENDKLIREVKVITLKSKLVSDFRKDFQFYKVREINNYHHAHDAYLNAVVGTALIKKYPKLESEFVYGDYKVYDVRKMIAKSEQEIGKATAKYFFYSNIMNFFKTEITLANGEIRKRPLIETNGETGEIVWDKGRDFATVRKVLSMPQVNIVKKTEVQTGGFSKESILPKRNSDKLIARKKDWDPKKYGGFDSPTVAYSVLVVAKVEKGKSKKLKSVKELLGITIMERSSFEKNPIDFLEAKGYKEVKKDLIIKLPKYSLFELENGRKRMLASAGELQKGNELALPSKYVNFLYLASHYEKLKGSPEDNEQKQLFVEQHKHYLDEIIEQISEFSKRVILADANLDKVLSAYNKHRDKPIREQAENIIHLFTLTNLGAPAAFKYFDTTIDRKRYTSTKEVLDATLIHQSITGLYETRIDLSQLGGDGGGGGPAPGGTLNIEDEHRLHETSKEPDVSLGSTWLSDFPQAWAETGGMGLAVRQAPLIIPLKATSTPVSIKQYPMSQEARLGIKPHIQRLLDQGILVPCQSPWNTPLLPVKKPGTNDYRPVQDLREVNKRVEDIHPTVPNPYNLLSGLPPSHQWYTVLDLKDAFFCLRLHPTSQPLFAFEWRDPEMGISGQLTWTRLPQGFKNSPTLFNEALHRDLADFRIQHPDLILLQYVDDLLLAATSELDCQQGTRALLQTLGNLGYRASAKKAQICQKQVKYLGYLLKEGQRWLTEARKETVMGQPTPKTPRQLREFLGTAGFCRLWIPGFAEMAAPLYPLTKPGTLFNWGPDQQKAYQEIKQALLTAPALGLPDLTKPFELFVDEKQGYAKGVLTQKLGPWRRPVAYLSKKLDPVAAGWPPCLRMVAAIAVLTKDAGKLTMGQPLVILAPHAVEALVKQPPDRWLSNARMTHYQALLLDTDRVQFGPVVALNPATLLPLPEEGLQHNCLDILAEAHGTRPDLTDQPLPDADHTWYTDGSSLLQEGQRKAGAAVTTETEVIWAKALPAGTSAQRAELIALTQALKMAEGKKLNVYTDSRYAFATAHIHGEIYRRRGWLTSEGKEIKNKDEILALLKALFLPKRLSIIHCPGHQKGHSAEARGNRMADQAARKAAITETPDTSTLLAGKRTADGSEFEKRTADGSEFESPKKKAKVE

SEQ ID NO: 6709 - protein, 2091 aa, synthetic construct; identical to SEQ ID NO: 6708

SEQ ID NO: 6710 - protein, 2085 aa, synthetic construct
MPAAKRVKLDGGDKKYSIGLDIGTNSVGWAVITDEYKVPSKKFKVLGNTDRHSIKKNLIGALLFDSGETAEATRLKRTARRRYTRRKNRICYLQEIFSNEMAKVDDSFFHRLEESFLVEEDKKHERHPIFGNIVDEVAYHEKYPTIYHLRKKLVDSTDKADLRLIYLALAHMIKFRGHFLIEGDLNPDNSDVDKLFIQLVQTYNQLFEENPINASGVDAKAILSARLSKSRRLENLIAQLPGEKKNGLFGNLIALSLGLTPNFKSNFDLAEDAKLQLSKDTYDDDLDNLLAQIGDQYADLFLAAKNLSDAILLSDILRVNTEITKAPLSASMIKRYDEHHQDLTLLKALVRQQLPEKYKEIFFDQSKNGYAGYIDGGASQEEFYKFIKPILEKMDGTEELLVKLNREDLLRKQRTFDNGSIPHQIHLGELHAILRRQEDFYPFLKDNREKIEKILTFRIPYYVGPLARGNSRFAWMTRKSEETITPWNFEEVVDKGASAQSFIERMTNFDKNLPNEKVLPKHSLLYEYFTVYNELTKVKYVTEGMRKPAFLSGEQKKAIVDLLFKTNRKVTVKQLKEDYFKKIECFDSVEISGVEDRFNASLGTYHDLLKIIKDKDFLDNEENEDILEDIVLTLTLFEDREMIEERLKTYAHLFDDKVMKQLKRRRYTGWGRLSRKLINGIRDKQSGKTILDFLKSDGFANRNFMQLIHDDSLTFKEDIQKAQVSGQGDSLHEHIANLAGSPAIKKGILQTVKVVDELVKVMGRHKPENIVIEMARENQTTQKGQKNSRERMKRIEEGIKELGSQILKEHPVENTQLQNEKLYLYYLQNGRDMYVDQELDINRLSDYDVDHIVPQSFLKDDSIDNKVLTRSDKARGKSDNVPSEEVVKKMKNYWRQLLNAKLITQRKFDNLTKAERGGLSELDKAGFIKRQLVETRQITKHVAQILDSRMNTKYDENDKLIREVKVITLKSKLVSDFRKDFQFYKVREINNYHHAHDAYLNAVVGTALIKKYPKLESEFVYGDYKVYDVRKMIAKSEQEIGKATAKYFFYSNIMNFFKTEITLANGEIRKRPLIETNGETGEIVWDKGRDFATVRKVLSMPQVNIVKKTEVQTGGFSKESILPKRNSDKLIARKKDWDPKKYGGFDSPTVAYSVLVVAKVEKGKSKKLKSVKELLGITIMERSSFEKNPIDFLEAKGYKEVKKDLIIKLPKYSLFELENGRKRMLASAGELQKGNELALPSKYVNFLYLASHYEKLKGSPEDNEQKQLFVEQHKHYLDEIIEQISEFSKRVILADANLDKVLSAYNKHRDKPIREQAENIIHLFTLTNLGAPAAFKYFDTTIDRKRYTSTKEVLDATLIHQSITGLYETRIDLSQLGGDGGGGGPAPGGTLQLDDEYRLYSPLVKPDQNIQFWLEQFPQAWAETAGMGLAKQVPPQVIQLKASATPVSVRQYPLSKEAQEGIRPHVQRLIQQGILVPVQSPWNTPLLPVRKPGTNDYRPVQDLREVNKRVQDIHPTVPNPYNLLCALPPQRSWYTVLDLKDAFFCLRLHPTSQPLFAFEWRDPGTGRTGQLTWTRLPQGFKNSPTIFDEALHRDLANFRIQHPQVTLLQYVDDLLLAGATKQDCLEGTKALLLELSDLGYRASAKKAQICRREVTYLGYSLRDGQRWLTEARKKTVVQIPAPTTAKQVREFLGTAGFCRLWIPGFATLAAPLYPLTKEKGEFSWAPEHQKAFDAIKKALLSAPALALPDVTKPFTLYVDERKGVARGVLTQTLGPWRRPVAYLSKKLDPVASGWPVCLKAIAAVAILVKDADKLTLGQNITVIAPHALENIVRQPPDRWMTNARMTHYQSLLLTERVTFAPPAALNPATLLPEETDEPVTHDCHQLLIEETGVRKDLTDIPLTGEVLTWFTDGSSYVVEGKRMAGAAVVDGTRTIWASSLPEGTSAQKAELMALTQALRLAEGKSINIYTDSRYAFATAHVHGAIYKQRGLLTSAGREIKNKEEILSLLEALHLPKRLAIIHCPGHQKAKDPISRGNQMADRVAKQAAQGVNLLAGKRTADGSEFEKRTADGSEFESPKKKAKVE

SEQ ID NO: 6711 - protein, 2085 aa, synthetic construct; identical to SEQ ID NO: 6710

SEQ ID NO: 6712 - protein, 2171 aa, synthetic construct
MPAAKRVKLDGGDKKYSIGLDIGTNSVGWAVITDEYKVPSKKFKVLGNTDRHSIKKNLIGALLFDSGETAEATRLKRTARRRYTRRKNRICYLQEIFSNEMAKVDDSFFHRLEESFLVEEDKKHERHPIFGNIVDEVAYHEKYPTIYHLRKKLVDSTDKADLRLIYLALAHMIKFRGHFLIEGDLNPDNSDVDKLFIQLVQTYNQLFEENPINASGVDAKAILSARLSKSRRLENLIAQLPGEKKNGLFGNLIALSLGLTPNFKSNFDLAEDAKLQLSKDTYDDDLDNLLAQIGDQYADLFLAAKNLSDAILLSDILRVNTEITKAPLSASMIKRYDEHHQDLTLLKALVRQQLPEKYKEIFFDQSKNGYAGYIDGGASQEEFYKFIKPILEKMDGTEELLVKLNREDLLRKQRTFDNGSIPHQIHLGELHAILRRQEDFYPFLKDNREKIEKILTFRIPYYVGPLARGNSRFAWMTRKSEETITPWNFEEVVDKGASAQSFIERMTNFDKNLPNEKVLPKHSLLYEYFTVYNELTKVKYVTEGMRKPAFLSGEQKKAIVDLLFKTNRKVTVKQLKEDYFKKIECFDSVEISGVEDRFNASLGTYHDLLKIIKDKDFLDNEENEDILEDIVLTLTLFEDREMIEERLKTYAHLFDDKVMKQLKRRRYTGWGRLSRKLINGIRDKQSGKTILDFLKSDGFANRNFMQLIHDDSLTFKEDIQKAQVSGQGDSLHEHIANLAGSPAIKKGILQTVKVVDELVKVMGRHKPENIVIEMARENQTTQKGQKNSRERMKRIEEGIKELGSQILKEHPVENTQLQNEKLYLYYLQNGRDMYVDQELDINRLSDYDVDHIVPQSFLKDDSIDNKVLTRSDKARGKSDNVPSEEVVKKMKNYWRQLLNAKLITQRKFDNLTKAERGGLSELDKAGFIKRQLVETRQITKHVAQILDSRMNTKYDENDKLIREVKVITLKSKLVSDFRKDFQFYKVREINNYHHAHDAYLNAVVGTALIKKYPKLESEFVYGDYKVYDVRKMIAKSEQEIGKATAKYFFYSNIMNFFKTEITLANGEIRKRPLIETNGETGEIVWDKGRDFATVRKVLSMPQVNIVKKTEVQTGGFSKESILPKRNSDKLIARKKDWDPKKYGGFDSPTVAYSVLVVAKVEKGKSKKLKSVKELLGITIMERSSFEKNPIDFLEAKGYKEVKKDLIIKLPKYSLFELENGRKRMLASAGELQKGNELALPSKYVNFLYLASHYEKLKGSPEDNEQKQLFVEQHKHYLDEIIEQISEFSKRVILADANLDKVLSAYNKHRDKPIREQAENIIHLFTLTNLGAPAAFKYFDTTIDRKRYTSTKEVLDATLIHQSITGLYETRIDLSQLGGDGGGGGPAPGGMDPLQLLQPLEAEIKGTKLKAHWNSGATITCVPEAFLEDERPIQTMLIKTIHGEKQQDVYYLTFKVQGRKVEAEVLASPYDYILLNPSDVPWLMKKPLQLTVLVPLHEYQERLLQQTALPKEQKELLQKLFLKYDALWQHWENQVGHRRIKPHNIATGTLAPRPQKQYPINPKAKPSIQIVIDDLLKQGVLIQQNSTMNTPVYPVPKPDGKWRMVLDYREVNKTIPLIAAQNQHSAGILSSIYRGKYKTTLDLTNGFWAHPITPESYWLTAFTWQGKQYCWTRLPQGFLNSPALFNADVVDLLKEIPNVQAYVDDIYISHDDPQEHLEQLEKIFSILLNAGYVVSLKKSEIAQREVEFLGFNITKEGRGLTDTFKQKLLNITPPKDLKQLQSILGKLNFARNFIPNYSELVKPLYTIVAPANGKFISWTEDNSNQLQHIISVLNQADNLEERNPETRLIIKVNSSPSAGYIRYYNEGSKRPIMYVNYIFSKAEAKFTQTEKLLTTMHKGLIKAMDLAMGQEILVYSPIVSMTKIQRTPLPERKALPVRWITWMTYLEDPRIQFHYDKSLPELQQIPNVTEDVIAKTKHPSEFAMVFYTDGSAIKHPDVNKSHSAGMGIAQVQFIPEYKIVHQWSIPLGDHTAQLAEIAAVEFACKKALKISGPVLIVTDSFYVAESANKELPYWKSNGFLNNKKKPLRHVSKWKSIAECLQLKPDIIIMHEKGHQQPMTTLHTEGNNLADKLATQGSYVVHAGKRTADGSEFEKRTADGSEFESPKKKAKVE

SEQ ID NO: 6713 - protein, 2082 aa, synthetic construct
MPAAKRVKLDGGDKKYSIGLDIGTNSVGWAVITDEYKVPSKKFKVLGNTDRHSIKKNLIGALLFDSGETAEATRLKRTARRRYTRRKNRICYLQEIFSNEMAKVDDSFFHRLEESFLVEEDKKHERHPIFGNIVDEVAYHEKYPTIYHLRKKLVDSTDKADLRLIYLALAHMIKFRGHFLIEGDLNPDNSDVDKLFIQLVQTYNQLFEENPINASGVDAKAILSARLSKSRRLENLIAQLPGEKKNGLFGNLIALSLGLTPNFKSNFDLAEDAKLQLSKDTYDDDLDNLLAQIGDQYADLFLAAKNLSDAILLSDILRVNTEITKAPLSASMIKRYDEHHQDLTLLKALVRQQLPEKYKEIFFDQSKNGYAGYIDGGASQEEFYKFIKPILEKMDGTEELLVKLNREDLLRKQRTFDNGSIPHQIHLGELHAILRRQEDFYPFLKDNREKIEKILTFRIPYYVGPLARGNSRFAWMTRKSEETITPWNFEEVVDKGASAQSFIERMTNFDKNLPNEKVLPKHSLLYEYFTVYNELTKVKYVTEGMRKPAFLSGEQKKAIVDLLFKTNRKVTVKQLKEDYFKKIECFDSVEISGVEDRFNASLGTYHDLLKIIKDKDFLDNEENEDILEDIVLTLTLFEDREMIEERLKTYAHLFDDKVMKQLKRRRYTGWGRLSRKLINGIRDKQSGKTILDFLKSDGFANRNFMQLIHDDSLTFKEDIQKAQVSGQGDSLHEHIANLAGSPAIKKGILQTVKVVDELVKVMGRHKPENIVIEMARENQTTQKGQKNSRERMKRIEEGIKELGSQILKEHPVENTQLQNEKLYLYYLQNGRDMYVDQELDINRLSDYDVDHIVPQSFLKDDSIDNKVLTRSDKARGKSDNVPSEEVVKKMKNYWRQLLNAKLITQRKFDNLTKAERGGLSELDKAGFIKRQLVETRQITKHVAQILDSRMNTKYDENDKLIREVKVITLKSKLVSDFRKDFQFYKVREINNYHHAHDAYLNAVVGTALIKKYPKLESEFVYGDYKVYDVRKMIAKSEQEIGKATAKYFFYSNIMNFFKTEITLANGEIRKRPLIETNGETGEIVWDKGRDFATVRKVLSMPQVNIVKKTEVQTGGFSKESILPKRNSDKLIARKKDWDPKKYGGFDSPTVAYSVLVVAKVEKGKSKKLKSVKELLGITIMERSSFEKNPIDFLEAKGYKEVKKDLIIKLPKYSLFELENGRKRMLASAGELQKGNELALPSKYVNFLYLASHYEKLKGSPEDNEQKQLFVEQHKHYLDEIIEQISEFSKRVILADANLDKVLSAYNKHRDKPIREQAENIIHLFTLTNLGAPAAFKYFDTTIDRKRYTSTKEVLDATLIHQSITGLYETRIDLSQLGGDGGGGGPAPGGIPWLMKKPLQLTTLVPLQEYEERLLKQTMLTGSYKEKLQSLFLKYDALWQHWENQVGHRRIKPHHIATGTVNPRPQKQYPINPKAKASIQTVINDLLKQGVLIQQNSIMNTPVYPVPKPDGKWRMVLDYREVNKTIPLIAAQNQHSAGILSSIFRGKYKTTLDLSNGFWAHSITPESYWLTAFTWLGQQYCWTRLPQGFLNSPALFNADVVDLLKEVPNVQVYVDDIYISHDDPREHLEQLEKVFSLLLNAGYVVSLKKSEIAQHEVEFLGFNITKEGRGLTETFKQKLLNITPPRDLKQLQSILGLLNFARNFIPNFSELVKPLYNIIATAPGKYITWTTDNSQQLQNIISMLNSAENLEERNPEVRLIMKVNTSPSAGYIRFYNEFAKRPIMYLNYVYTKAEVKFTNTEKLLTTIHKGLIKALDLGMGQEILVYSPIVSMTKIQKTPLPERKALPIRWITWMSYLEDPRIQFHYDKTLPELQQVPTVTDDIIAKIKHPSEFSMVFYTDGSAIKHPNVNKSHNAGMGIAQVQFKPEFTVINTWSIPLGDHTAQLAEVAAVEFACKKALKIDGPVLIVTDSFYVAESVNKELPYWQSNGFFNNKKKPLKHVSKWKSIADCIQLKPDIIIIHEKGHQPTASTFHTEGNNLADKLATQGSYVVNAGKRTADGSEFEKRTADGSEFESPKKKAKVE

SEQ ID NO: 6714 - protein, 2171 aa, synthetic construct
MPAAKRVKLDGGDKKYSIGLDIGTNSVGWAVITDEYKVPSKKFKVLGNTDRHSIKKNLIGALLFDSGETAEATRLKRTARRRYTRRKNRICYLQEIFSNEMAKVDDSFFHRLEESFLVEEDKKHERHPIFGNIVDEVAYHEKYPTIYHLRKKLVDSTDKADLRLIYLALAHMIKFRGHFLIEGDLNPDNSDVDKLFIQLVQTYNQLFEENPINASGVDAKAILSARLSKSRRLENLIAQLPGEKKNGLFGNLIALSLGLTPNFKSNFDLAEDAKLQLSKDTYDDDLDNLLAQIGDQYADLFLAAKNLSDAILLSDILRVNTEITKAPLSASMIKRYDEHHQDLTLLKALVRQQLPEKYKEIFFDQSKNGYAGYIDGGASQEEFYKFIKPILEKMDGTEELLVKLNREDLLRKQRTFDNGSIPHQIHLGELHAILRRQEDFYPFLKDNREKIEKILTFRIPYYVGPLARGNSRFAWMTRKSEETITPWNFEEVVDKGASAQSFIERMTNFDKNLPNEKVLPKHSLLYEYFTVYNELTKVKYVTEGMRKPAFLSGEQKKAIVDLLFKTNRKVTVKQLKEDYFKKIECFDSVEISGVEDRFNASLGTYHDLLKIIKDKDFLDNEENEDILEDIVLTLTLFEDREMIEERLKTYAHLFDDKVMKQLKRRRYTGWGRLSRKLINGIRDKQSGKTILDFLKSDGFANRNFMQLIHDDSLTFKEDIQKAQVSGQGDSLHEHIANLAGSPAIKKGILQTVKVVDELVKVMGRHKPENIVIEMARENQTTQKGQKNSRERMKRIEEGIKELGSQILKEHPVENTQLQNEKLYLYYLQNGRDMYVDQELDINRLSDYDVDHIVPQSFLKDDSIDNKVLTRSDKARGKSDNVPSEEVVKKMKNYWRQLLNAKLITQRKFDNLTKAERGGLSELDKAGFIKRQLVETRQITKHVAQILDSRMNTKYDENDKLIREVKVITLKSKLVSDFRKDFQFYKVREINNYHHAHDAYLNAVVGTALIKKYPKLESEFVYGDYKVYDVRKMIAKSEQEIGKATAKYFFYSNIMNFFKTEITLANGEIRKRPLIETNGETGEIVWDKGRDFATVRKVLSMPQVNIVKKTEVQTGGFSKESILPKRNSDKLIARKKDWDPKKYGGFDSPTVAYSVLVVAKVEKGKSKKLKSVKELLGITIMERSSFEKNPIDFLEAKGYKEVKKDLIIKLPKYSLFELENGRKRMLASAGELQKGNELALPSKYVNFLYLASHYEKLKGSPEDNEQKQLFVEQHKHYLDEIIEQISEFSKRVILADANLDKVLSAYNKHRDKPIREQAENIIHLFTLTNLGAPAAFKYFDTTIDRKRYTSTKEVLDATLIHQSITGLYETRIDLSQLGGDGGGGGPAPGGMNPLQLLQPLPAEVKGTKLLAHWNSGATITCIPESFLEDEQPIKQTLIKTIHGEKQQNVYYLTFKVKGRKVEAEVIASPYEYILLSPTDVPWLTQQPLQLTILVPLQEYQDRILNKTALPEEQKQQLKALFTKYDNLWQHWENQVGHRKIRPHNIATGDYPPRPQKQYPINPKAKPSIQIVIDDLLKQGVLTPQNSTMNTPVYPVPKPDGRWRMVLDYREVNKTIPLTAAQNQHSAGILATIVRQKYKTTLDLANGFWAHPITPDSYWLTAFTWQGKQYCWTRLPQGFLNSPALFTADAVDLLKEVPNVQVYVDDIYLSHDNPHEHIQQLEKVFQILLQAGYVVSLKKSEIGQRTVEFLGFNITKEGRGLTDTFKTKLLNVTPPKDLKQLQSILGLLNFARNFIPNFAELVQTLYNLIASSKGKYIEWTEDNTKQLNKVIEALNTASNLEERLPDQRLVIKVNTSPSAGYVRYYNESGKKPIMYLNYVFSKAELKFSMLEKLLTTMHKALIKAMDLAMGQEILVYSPIVSMTKIQKTPLPERKALPIRWITWMTYLEDPRIQFHYDKTLPELKHIPDVYTSSIPPLKHPSQYEGVFCTDGSAIKSPDPTKSNNAGMGIVHAIYNPEYKILNQWSIPLGHHTAQMAEIAAVEFACKKALKVPGPVLVITDSFYVAESANKELPYWKSNGFVNNKKEPLKHISKWKSIAECLSIKPDITIQHEKGHQPINTSIHTEGNALADKLATQGSYVVNAGKRTADGSEFEKRTADGSEFESPKKKAKVE

SEQ ID NO: 6715 - protein, 2089 aa, synthetic construct
MPAAKRVKLDGGDKKYSIGLDIGTNSVGWAVITDEYKVPSKKFKVLGNTDRHSIKKNLIGALLFDSGETAEATRLKRTARRRYTRRKNRICYLQEIFSNEMAKVDDSFFHRLEESFLVEEDKKHERHPIFGNIVDEVAYHEKYPTIYHLRKKLVDSTDKADLRLIYLALAHMIKFRGHFLIEGDLNPDNSDVDKLFIQLVQTYNQLFEENPINASGVDAKAILSARLSKSRRLENLIAQLPGEKKNGLFGNLIALSLGLTPNFKSNFDLAEDAKLQLSKDTYDDDLDNLLAQIGDQYADLFLAAKNLSDAILLSDILRVNTEITKAPLSASMIKRYDEHHQDLTLLKALVRQQLPEKYKEIFFDQSKNGYAGYIDGGASQEEFYKFIKPILEKMDGTEELLVKLNREDLLRKQRTFDNGSIPHQIHLGELHAILRRQEDFYPFLKDNREKIEKILTFRIPYYVGPLARGNSRFAWMTRKSEETITPWNFEEVVDKGASAQSFIERMTNFDKNLPNEKVLPKHSLLYEYFTVYNELTKVKYVTEGMRKPAFLSGEQKKAIVDLLFKTNRKVTVKQLKEDYFKKIECFDSVEISGVEDRFNASLGTYHDLLKIIKDKDFLDNEENEDILEDIVLTLTLFEDREMIEERLKTYAHLFDDKVMKQLKRRRYTGWGRLSRKLINGIRDKQSGKTILDFLKSDGFANRNFMQLIHDDSLTFKEDIQKAQVSGQGDSLHEHIANLAGSPAIKKGILQTVKVVDELVKVMGRHKPENIVIEMARENQTTQKGQKNSRERMKRIEEGIKELGSQILKEHPVENTQLQNEKLYLYYLQNGRDMYVDQELDINRLSDYDVDHIVPQSFLKDDSIDNKVLTRSDKARGKSDNVPSEEVVKKMKNYWRQLLNAKLITQRKFDNLTKAERGGLSELDKAGFIKRQLVETRQITKHVAQILDSRMNTKYDENDKLIREVKVITLKSKLVSDFRKDFQFYKVREINNYHHAHDAYLNAVVGTALIKKYPKLESEFVYGDYKVYDVRKMIAKSEQEIGKATAKYFFYSNIMNFFKTEITLANGEIRKRPLIETNGETGEIVWDKGRDFATVRKVLSMPQVNIVKKTEVQTGGFSKESILPKRNSDKLIARKKDWDPKKYGGFDSPTVAYSVLVVAKVEKGKSKKLKSVKELLGITIMERSSFEKNPIDFLEAKGYKEVKKDLIIKLPKYSLFELENGRKRMLASAGELQKGNELALPSKYVNFLYLASHYEKLKGSPEDNEQKQLFVEQHKHYLDEIIEQISEFSKRVILADANLDKVLSAYNKHRDKPIREQAENIIHLFTLTNLGAPAAFKYFDTTIDRKRYTSTKEVLDATLIHQSITGLYETRIDLSQLGGDGGGGGPAPGGVLNLEEEYRLHEKPVPSSIDPSWLQLFPTVWAERAGMGLANQVPPVVVELRSGASPVAVRQYPMSKEAREGIRPHIQRFLDLGVLVPCQSPWNTPLLPVKKPGTNDYRPVQDLREINKRVQDIHPTVPNPYNLLSSLPPSHTWYSVLDLKDAFFCLKLHPNSQPLFAFEWRDPEKGNTGQLTWTRLPQGFKNSPTLFNEALHRDLAPFRALNPQVVLLQYVDDLLVAAPTYRDCKEGTQKLLQELSKLGYRVSAKKAQLCQKEVTYLGYLLKEGKRWLTPARKATVMKIPPPTTPRQVREFLGTAGFCRLWIPGFASLAAPLYPLTKPSIPFIWTEEHQKAFDRIKEALLSAPALALPDLTKPFTLYVDERAGVARGVLTQTLGPWRRPVAYLSKKLDPVASGWPTCLKAVAAVALLLKDADKLTLGQNVTVIASHSLESIVRQPPDRWMTNARMTHYQSLLLNERVSFAPPAVLNPATLLPVESEATPVHRCSEILAEETGTRRDLKDQPLPGVPAWYTDGSSFIAEGKRRAGAAIVDGKRTVWASSLPEGTSAQKAELVALTQALRLAEGKDINIYTDSRYAFATAHIHGAIYKQRGWLTSAGKDIKNKEEILALLEAIHLPKRVAIIHCPGHQKGNDPVATGNRRADEAAKQAALSTRVLAETTKPAGKRTADGSEFEKRTADGSEFESPKKKAKVE

SEQ ID NO: 6716 - protein, 2091 aa, synthetic construct
MPAAKRVKLDGGDKKYSIGLDIGTNSVGWAVITDEYKVPSKKFKVLGNTDRHSIKKNLIGALLFDSGETAEATRLKRTARRRYTRRKNRICYLQEIFSNEMAKVDDSFFHRLEESFLVEEDKKHERHPIFGNIVDEVAYHEKYPTIYHLRKKLVDSTDKADLRLIYLALAHMIKFRGHFLIEGDLNPDNSDVDKLFIQLVQTYNQLFEENPINASGVDAKAILSARLSKSRRLENLIAQLPGEKKNGLFGNLIALSLGLTPNFKSNFDLAEDAKLQLSKDTYDDDLDNLLAQIGDQYADLFLAAKNLSDAILLSDILRVNTEITKAPLSASMIKRYDEHHQDLTLLKALVRQQLPEKYKEIFFDQSKNGYAGYIDGGASQEEFYKFIKPILEKMDGTEELLVKLNREDLLRKQRTFDNGSIPHQIHLGELHAILRRQEDFYPFLKDNREKIEKILTFRIPYYVGPLARGNSRFAWMTRKSEETITPWNFEEVVDKGASAQSFIERMTNFDKNLPNEKVLPKHSLLYEYFTVYNELTKVKYVTEGMRKPAFLSGEQKKAIVDLLFKTNRKVTVKQLKEDYFKKIECFDSVEISGVEDRFNASLGTYHDLLKIIKDKDFLDNEENEDILEDIVLTLTLFEDREMIEERLKTYAHLFDDKVMKQLKRRRYTGWGRLSRKLINGIRDKQSGKTILDFLKSDGFANRNFMQLIHDDSLTFKEDIQKAQVSGQGDSLHEHIANLAGSPAIKKGILQTVKVVDELVKVMGRHKPENIVIEMARENQTTQKGQKNSRERMKRIEEGIKELGSQILKEHPVENTQLQNEKLYLYYLQNGRDMYVDQELDINRLSDYDVDHIVPQSFLKDDSIDNKVLTRSDKARGKSDNVPSEEVVKKMKNYWRQLLNAKLITQRKFDNLTKAERGGLSELDKAGFIKRQLVETRQITKHVAQILDSRMNTKYDENDKLIREVKVITLKSKLVSDFRKDFQFYKVREINNYHHAHDAYLNAVVGTALIKKYPKLESEFVYGDYKVYDVRKMIAKSEQEIGKATAKYFFYSNIMNFFKTEITLANGEIRKRPLIETNGETGEIVWDKGRDFATVRKVLSMPQVNIVKKTEVQTGGFSKESILPKRNSDKLIARKKDWDPKKYGGFDSPTVAYSVLVVAKVEKGKSKKLKSVKELLGITIMERSSFEKNPIDFLEAKGYKEVKKDLIIKLPKYSLFELENGRKRMLASAGELQKGNELALPSKYVNFLYLASHYEKLKGSPEDNEQKQLFVEQHKHYLDEIIEQISEFSKRVILADANLDKVLSAYNKHRDKPIREQAENIIHLFTLTNLGAPAAFKYFDTTIDRKRYTSTKEVLDATLIHQSITGLYETRIDLSQLGGDGGGGGPAPGGTLNIEDEYRLHETSKEPDVPLGSTWLSDFPQAWAETGGMGLAVRQAPLIIPLKATSTPVSIKQYPMSQEARLGIKPHIQRLLDQGILVPCQSPWNTPLLPVKKPGTNDYRPVQDLREVNKRVEDIHPTVPNPYNLLSGLPPSHQWYTVLDLKDAFFCLRLHPTSQPLFAFEWRDPEMGISGQLTWTRLPQGFKNSPTLFNEALHRDLADFRIQHPDLILLQYVDDLLLAATSEQDCQRGTRALLQTLGNLGYRASAKKAQICQKQVKYLGYLLKEGQRWLTEARKETVMGQPTPKTPRQLREFLGTAGFCRLWIPGFAEMAAPLYPLTKPGTLFNWGPDQQKAYQEIKQALLTAPALGLPDLTKPFELFVDEKQGYAKGVLTQKLGPWRRPVAYLSKKLDPVAAGWPPCLRMVAAIAVLTKDAGKLTMGQPLVILAPHAVEALVKQPPDRWLSNARMTHYQAMLLDTDRVQFGPVVALNPATLLPLPEKEAPHDCLEILAETHGTRPDLTDQPIPDADYTWYTDGSSFLQEGQRRAGAAVTTETEVIWARALPAGTSAQRAELIALTQALKMAEGKKLNVYTDSRYAFATAHVHGEIYRRRGWLTSEGREIKNKNEILALLKALFLPKRLSIIHCPGHQKGNSAEARGNRMADQAAREAAMKAVLETSTLLAGKRTADGSEFEKRTADGSEFESPKKKAKVE

SEQ ID NO: 6717 - protein, 2091 aa, synthetic construct
MPAAKRVKLDGGDKKYSIGLDIGTNSVGWAVITDEYKVPSKKFKVLGNTDRHSIKKNLIGALLFDSGETAEATRLKRTARRRYTRRKNRICYLQEIFSNEMAKVDDSFFHRLEESFLVEEDKKHERHPIFGNIVDEVAYHEKYPTIYHLRKKLVDSTDKADLRLIYLALAHMIKFRGHFLIEGDLNPDNSDVDKLFIQLVQTYNQLFEENPINASGVDAKAILSARLSKSRRLENLIAQLPGEKKNGLFGNLIALSLGLTPNFKSNFDLAEDAKLQLSKDTYDDDLDNLLAQIGDQYADLFLAAKNLSDAILLSDILRVNTEITKAPLSASMIKRYDEHHQDLTLLKALVRQQLPEKYKEIFFDQSKNGYAGYIDGGASQEEFYKFIKPILEKMDGTEELLVKLNREDLLRKQRTFDNGSIPHQIHLGELHAILRRQEDFYPFLKDNREKIEKILTFRIPYYVGPLARGNSRFAWMTRKSEETITPWNFEEVVDKGASAQSFIERMTNFDKNLPNEKVLPKHSLLYEYFTVYNELTKVKYVTEGMRKPAFLSGEQKKAIVDLLFKTNRKVTVKQLKEDYFKKIECFDSVEISGVEDRFNASLGTYHDLLKIIKDKDFLDNEENEDILEDIVLTLTLFEDREMIEERLKTYAHLFDDKVMKQLKRRRYTGWGRLSRKLINGIRDKQSGKTILDFLKSDGFANRNFMQLIHDDSLTFKEDIQKAQVSGQGDSLHEHIANLAGSPAIKKGILQTVKVVDELVKVMGRHKPENIVIEMARENQTTQKGQKNSRERMKRIEEGIKELGSQILKEHPVENTQLQNEKLYLYYLQNGRDMYVDQELDINRLSDYDVDHIVPQSFLKDDSIDNKVLTRSDKARGKSDNVPSEEVVKKMKNYWRQLLNAKLITQRKFDNLTKAERGGLSELDKAGFIKRQLVETRQITKHVAQILDSRMNTKYDENDKLIREVKVITLKSKLVSDFRKDFQFYKVREINNYHHAHDAYLNAVVGTALIKKYPKLESEFVYGDYKVYDVRKMIAKSEQEIGKATAKYFFYSNIMNFFKTEITLANGEIRKRPLIETNGETGEIVWDKGRDFATVRKVLSMPQVNIVKKTEVQTGGFSKESILPKRNSDKLIARKKDWDPKKYGGFDSPTVAYSVLVVAKVEKGKSKKLKSVKELLGITIMERSSFEKNPIDFLEAKGYKEVKKDLIIKLPKYSLFELENGRKRMLASAGELQKGNELALPSKYVNFLYLASHYEKLKGSPEDNEQKQLFVEQHKHYLDEIIEQISEFSKRVILADANLDKVLSAYNKHRDKPIREQAENIIHLFTLTNLGAPAAFKYFDTTIDRKRYTSTKEVLDATLIHQSITGLYETRIDLSQLGGDGGGGGPAPGGTLNIEDEYRLHETSKEPDVPLGSTWLSDFPQAWAETGGMGLAVRQAPLIIPLKATSTPVSIKQYPMSQEARLGIKPHIQRLLDQGILVPCQSPWNTPLLPVKKPGTNDYRPVQDLREVNKRVEDIHPTVPNPYNLLSGLPPSHQWYTVLDLKDAFFCLRLHPTSQPLFAFEWRDPEMGISGQLTWTRLPQGFKNSPTLFNEALHRDLADFRIQHPDLILLQYVDDLLLAATSEQDCQRGTRALLQTLGNLGYRASAKKAQICQKQVKYLGYLLKEGQRWLTEARKETVMGQPTPKTPRQLREFLGKAGFCRLFIPGFAEMAAPLYPLTKPGTLFNWGPDQQKAYQEIKQALLTAPALGLPDLTKPFELFVDEKQGYAKGVLTQKLGPWRRPVAYLSKKLDPVAAGWPPCLRMVAAIAVLTKDAGKLTMGQPLVILAPHAVEALVKQPPDRWLSNARMTHYQAMLLDTDRVQFGPVVALNPATLLPLPEKEAPHDCLEILAETHGTRPDLTDQPIPDADYTWYTDGSSFLQEGQRRAGAAVTTETEVIWARALPAGTSAQRAELIALTQALKMAEGKKLNVYTDSRYAFATAHVHGEIYRRRGWLTSEGREIKNKNEILALLKALFLPKRLSIIHCPGHQKGNSAEARGNRMADQAAREAAMKAVLETSTLLAGKRTADGSEFEKRTADGSEFESPKKKAKVE

SEQ ID NO: 6718 - protein, 2122 aa, synthetic construct
MPAAKRVKLDGGDKKYSIGLDIGTNSVGWAVITDEYKVPSKKFKVLGNTDRHSIKKNLIGALLFDSGETAEATRLKRTARRRYTRRKNRICYLQEIFSNEMAKVDDSFFHRLEESFLVEEDKKHERHPIFGNIVDEVAYHEKYPTIYHLRKKLVDSTDKADLRLIYLALAHMIKFRGHFLIEGDLNPDNSDVDKLFIQLVQTYNQLFEENPINASGVDAKAILSARLSKSRRLENLIAQLPGEKKNGLFGNLIALSLGLTPNFKSNFDLAEDAKLQLSKDTYDDDLDNLLAQIGDQYADLFLAAKNLSDAILLSDILRVNTEITKAPLSASMIKRYDEHHQDLTLLKALVRQQLPEKYKEIFFDQSKNGYAGYIDGGASQEEFYKFIKPILEKMDGTEELLVKLNREDLLRKQRTFDNGSIPHQIHLGELHAILRRQEDFYPFLKDNREKIEKILTFRIPYYVGPLARGNSRFAWMTRKSEETITPWNFEEVVDKGASAQSFIERMTNFDKNLPNEKVLPKHSLLYEYFTVYNELTKVKYVTEGMRKPAFLSGEQKKAIVDLLFKTNRKVTVKQLKEDYFKKIECFDSVEISGVEDRFNASLGTYHDLLKIIKDKDFLDNEENEDILEDIVLTLTLFEDREMIEERLKTYAHLFDDKVMKQLKRRRYTGWGRLSRKLINGIRDKQSGKTILDFLKSDGFANRNFMQLIHDDSLTFKEDIQKAQVSGQGDSLHEHIANLAGSPAIKKGILQTVKVVDELVKVMGRHKPENIVIEMARENQTTQKGQKNSRERMKRIEEGIKELGSQILKEHPVENTQLQNEKLYLYYLQNGRDMYVDQELDINRLSDYDVDHIVPQSFLKDDSIDNKVLTRSDKARGKSDNVPSEEVVKKMKNYWRQLLNAKLITQRKFDNLTKAERGGLSELDKAGFIKRQLVETRQITKHVAQILDSRMNTKYDENDKLIREVKVITLKSKLVSDFRKDFQFYKVREINNYHHAHDAYLNAVVGTALIKKYPKLESEFVYGDYKVYDVRKMIAKSEQEIGKATAKYFFYSNIMNFFKTEITLANGEIRKRPLIETNGETGEIVWDKGRDFATVRKVLSMPQVNIVKKTEVQTGGFSKESILPKRNSDKLIARKKDWDPKKYGGFDSPTVAYSVLVVAKVEKGKSKKLKSVKELLGITIMERSSFEKNPIDFLEAKGYKEVKKDLIIKLPKYSLFELENGRKRMLASAGELQKGNELALPSKYVNFLYLASHYEKLKGSPEDNEQKQLFVEQHKHYLDEIIEQISEFSKRVILADANLDKVLSAYNKHRDKPIREQAENIIHLFTLTNLGAPAAFKYFDTTIDRKRYTSTKEVLDATLIHQSITGLYETRIDLSQLGGDGGPAPGGGGGLLGRDLLTKLKAQIQFSTEGPQVTWEDRPAMCLVLNLEEEYRLHEKPVPPSIDPSWLQLFPMVWAEKAGMGLANQVPPVVVELKSDASPVAVRQYPMSKEAREGIRPHIQRFLDLGILVPCQSPWNTPLLPVKKPGTNDYRPVQDLREVNKRVQDIHPTVPNPYNLLSSLPPSHTWYSVLDLKDAFFCLKLHPNSQPLFAFEWRDPEKGNTGQLTWTRLPQGFKNSPTLFNEALHRDLASFRALNPQVVMLQYVDDLLVAAPTYRDCKEGTRRLLQELSKLGYRVSAKKAQLCREEVTYLGYLLKGGKRWLTPARKATVMKIPTPTTPRQVREFLGTAGFCRLWIPGFASLAAPLYPLTRPKVPFTWTEAHQEAFGRIKEALLSAPALALPDLTKPFALYVDEKEGVARGVLTQTLGPWRRPVAYLSKKLDPVASGWPTCLKAIAAVALLLKDADKLTLGQNVLVIAPHNLESIVRQPPDRWMTNARMTHYQSLLLNERVSFAPPAILNPATLLPVESDDTPIHICSEILAEETGTRPDLRDQPLPGVPAWYTDGSSFIMDGRRQAGAAIVDNKRTVWASNLPEGTSAQKAELIALTQALRLAEGKSINIYTDSRYAFATAHVHGAIYKQRGWLTSAGKDIKNKEEILALLEAIHLPKRVAIIHCPGHQRGTDPVATGNRKADEAAKQAAQSTRILTETTKNAGKRTADGSEFEKRTADGSEFESPKKKAKVE

SEQ ID NO: 6719 - protein, 2122 aa, synthetic construct
MPAAKRVKLDGGDKKYSIGLDIGTNSVGWAVITDEYKVPSKKFKVLGNTDRHSIKKNLIGALLFDSGETAEATRLKRTARRRYTRRKNRICYLQEIFSNEMAKVDDSFFHRLEESFLVEEDKKHERHPIFGNIVDEVAYHEKYPTIYHLRKKLVDSTDKADLRLIYLALAHMIKFRGHFLIEGDLNPDNSDVDKLFIQLVQTYNQLFEENPINASGVDAKAILSARLSKSRRLENLIAQLPGEKKNGLFGNLIALSLGLTPNFKSNFDLAEDAKLQLSKDTYDDDLDNLLAQIGDQYADLFLAAKNLSDAILLSDILRVNTEITKAPLSASMIKRYDEHHQDLTLLKALVRQQLPEKYKEIFFDQSKNGYAGYIDGGASQEEFYKFIKPILEKMDGTEELLVKLNREDLLRKQRTFDNGSIPHQIHLGELHAILRRQEDFYPFLKDNREKIEKILTFRIPYYVGPLARGNSRFAWMTRKSEETITPWNFEEVVDKGASAQSFIERMTNFDKNLPNEKVLPKHSLLYEYFTVYNELTKVKYVTEGMRKPAFLSGEQKKAIVDLLFKTNRKVTVKQLKEDYFKKIECFDSVEISGVEDRFNASLGTYHDLLKIIKDKDFLDNEENEDILEDIVLTLTLFEDREMIEERLKTYAHLFDDKVMKQLKRRRYTGWGRLSRKLINGIRDKQSGKTILDFLKSDGFANRNFMQLIHDDSLTFKEDIQKAQVSGQGDSLHEHIANLAGSPAIKKGILQTVKVVDELVKVMGRHKPENIVIEMARENQTTQKGQKNSRERMKRIEEGIKELGSQILKEHPVENTQLQNEKLYLYYLQNGRDMYVDQELDINRLSDYDVDHIVPQSFLKDDSIDNKVLTRSDKARGKSDNVPSEEVVKKMKNYWRQLLNAKLITQRKFDNLTKAERGGLSELDKAGFIKRQLVETRQITKHVAQILDSRMNTKYDENDKLIREVKVITLKSKLVSDFRKDFQFYKVREINNYHHAHDAYLNAVVGTALIKKYPKLESEFVYGDYKVYDVRKMIAKSEQEIGKATAKYFFYSNIMNFFKTEITLANGEIRKRPLIETNGETGEIVWDKGRDFATVRKVLSMPQVNIVKKTEVQTGGFSKESILPKRNSDKLIARKKDWDPKKYGGFDSPTVAYSVLVVAKVEKGKSKKLKSVKELLGITIMERSSFEKNPIDFLEAKGYKEVKKDLIIKLPKYSLFELENGRKRMLASAGELQKGNELALPSKYVNFLYLASHYEKLKGSPEDNEQKQLFVEQHKHYLDEIIEQISEFSKRVILADANLDKVLSAYNKHRDKPIREQAENIIHLFTLTNLGAPAAFKYFDTTIDRKRYTSTKEVLDATLIHQSITGLYETRIDLSQLGGDGGPAPGGGGGLLGRDLLTKLKAQIQFSTEGPQVTWEDRPAMCLVLNLEEEYRLHEKPVPPSIDPSWLQLFPMVWAEKAGMGLANQVPPVVVELKSDASPVAVRQYPMSKEAREGIRPHIQRFLDLGILVPCQSPWNTPLLPVKKPGTNDYRPVQDLREVNKRVQDIHPTVPNPYNLLSSLPPSHTWYSVLDLKDAFFCLKLHPNSQPLFAFEWRDPEKGNTGQLTWTRLPQGFKNSPTLFNEALHRDLASFRALNPQVVMLQYVDDLLVAAPTYRDCKEGTRRLLQELSKLGYRVSAKKAQLCREEVTYLGYLLKGGKRWLTPARKATVMKIPTPTTPRQVREFLGKAGFCRLFIPGFASLAAPLYPLTRPKVPFTWTEAHQEAFGRIKEALLSAPALALPDLTKPFALYVDEKEGVARGVLTQTLGPWRRPVAYLSKKLDPVASGWPTCLKAIAAVALLLKDADKLTLGQNVLVIAPHNLESIVRQPPDRWMTNARMTHYQSLLLNERVSFAPPAILNPATLLPVESDDTPIHICSEILAEETGTRPDLRDQPLPGVPAWYTDGSSFIMDGRRQAGAAIVDNKRTVWASNLPEGTSAQKAELIALTQALRLAEGKSINIYTDSRYAFATAHVHGAIYKQRGWLTSAGKDIKNKEEILALLEAIHLPKRVAIIHCPGHQRGTDPVATGNRKADEAAKQAAQSTRILTETTKNAGKRTADGSEFEKRTADGSEFESPKKKAKVE

SEQ ID NO: 6720 - protein, 2213 aa, synthetic construct
MPAAKRVKLDGGDKKYSIGLDIGTNSVGWAVITDEYKVPSKKFKVLGNTDRHSIKKNLIGALLFDSGETAEATRLKRTARRRYTRRKNRICYLQEIFSNEMAKVDDSFFHRLEESFLVEEDKKHERHPIFGNIVDEVAYHEKYPTIYHLRKKLVDSTDKADLRLIYLALAHMIKFRGHFLIEGDLNPDNSDVDKLFIQLVQTYNQLFEENPINASGVDAKAILSARLSKSRRLENLIAQLPGEKKNGLFGNLIALSLGLTPNFKSNFDLAEDAKLQLSKDTYDDDLDNLLAQIGDQYADLFLAAKNLSDAILLSDILRVNTEITKAPLSASMIKRYDEHHQDLTLLKALVRQQLPEKYKEIFFDQSKNGYAGYIDGGASQEEFYKFIKPILEKMDGTEELLVKLNREDLLRKQRTFDNGSIPHQIHLGELHAILRRQEDFYPFLKDNREKIEKILTFRIPYYVGPLARGNSRFAWMTRKSEETITPWNFEEVVDKGASAQSFIERMTNFDKNLPNEKVLPKHSLLYEYFTVYNELTKVKYVTEGMRKPAFLSGEQKKAIVDLLFKTNRKVTVKQLKEDYFKKIECFDSVEISGVEDRFNASLGTYHDLLKIIKDKDFLDNEENEDILEDIVLTLTLFEDREMIEERLKTYAHLFDDKVMKQLKRRRYTGWGRLSRKLINGIRDKQSGKTILDFLKSDGFANRNFMQLIHDDSLTFKEDIQKAQVSGQGDSLHEHIANLAGSPAIKKGILQTVKVVDELVKVMGRHKPENIVIEMARENQTTQKGQKNSRERMKRIEEGIKELGSQILKEHPVENTQLQNEKLYLYYLQNGRDMYVDQELDINRLSDYDVDHIVPQSFLKDDSIDNKVLTRSDKARGKSDNVPSEEVVKKMKNYWRQLLNAKLITQRKFDNLTKAERGGLSELDKAGFIKRQLVETRQITKHVAQILDSRMNTKYDENDKLIREVKVITLKSKLVSDFRKDFQFYKVREINNYHHAHDAYLNAVVGTALIKKYPKLESEFVYGDYKVYDVRKMIAKSEQEIGKATAKYFFYSNIMNFFKTEITLANGEIRKRPLIETNGETGEIVWDKGRDFATVRKVLSMPQVNIVKKTEVQTGGFSKESILPKRNSDKLIARKKDWDPKKYGGFDSPTVAYSVLVVAKVEKGKSKKLKSVKELLGITIMERSSFEKNPIDFLEAKGYKEVKKDLIIKLPKYSLFELENGRKRMLASAGELQKGNELALPSKYVNFLYLASHYEKLKGSPEDNEQKQLFVEQHKHYLDEIIEQISEFSKRVILADANLDKVLSAYNKHRDKPIREQAENIIHLFTLTNLGAPAAFKYFDTTIDRKRYTSTKEVLDATLIHQSITGLYETRIDLSQLGGDGGPAPGGGGGTLGDQGSRGSDPLPEPRVTLTVEGIPTEFLVNTGAEHSVLTKPMGKMGSKRTVVAGATGSKVYPWTTKRLLKIGQKQVTHSFLVIPECPAPLLGRDLLTKLKAQIQFSTEGPQVTWEDRPAMCLVLNLEEEYRLHEKPVPPSIDPSWLQLFPMVWAEKAGMGLANQVPPVVVELKSDASPVAVRQYPMSKEAREGIRPHIQRFLDLGILVPCQSPWNTPLLPVKKPGTNDYRPVQDLREVNKRVQDIHPTVPNPYNLLSSLPPSHTWYSVLDLKDAFFCLKLHPNSQPLFAFEWRDPEKGNTGQLTWTRLPQGFKNSPTLFNEALHRDLASFRALNPQVVMLQYVDDLLVAAPTYRDCKEGTRRLLQELSKLGYRVSAKKAQLCREEVTYLGYLLKGGKRWLTPARKATVMKIPTPTTPRQVREFLGTAGFCRLWIPGFASLAAPLYPLTRPKVPFTWTEAHQEAFGRIKEALLSAPALALPDLTKPFALYVDEKEGVARGVLTQTLGPWRRPVAYLSKKLDPVASGWPTCLKAIAAVALLLKDADKLTLGQNVLVIAPHNLESIVRQPPDRWMTNARMTHYQSLLLNERVSFAPPAILNPATLLPVESDDTPIHICSEILAEETGTRPDLRDQPLPGVPAWYTDGSSFIMDGRRQAGAAIVDNKRTVWASNLPEGTSAQKAELIALTQALRLAEGKSINIYTDSRYAFATAHVHGAIYKQRGWLTSAGKDIKNKEEILALLEAIHLPKRVAIIHCPGHQRGTDPVATGNRKADEAAKQAAQSTRILTETTKNAGKRTADGSEFEKRTADGSEFESPKKKAKVE

SEQ ID NO: 6721 - protein, 2091 aa, synthetic construct
MPAAKRVKLDGGDKKYSIGLDIGTNSVGWAVITDEYKVPSKKFKVLGNTDRHSIKKNLIGALLFDSGETAEATRLKRTARRRYTRRKNRICYLQEIFSNEMAKVDDSFFHRLEESFLVEEDKKHERHPIFGNIVDEVAYHEKYPTIYHLRKKLVDSTDKADLRLIYLALAHMIKFRGHFLIEGDLNPDNSDVDKLFIQLVQTYNQLFEENPINASGVDAKAILSARLSKSRRLENLIAQLPGEKKNGLFGNLIALSLGLTPNFKSNFDLAEDAKLQLSKDTYDDDLDNLLAQIGDQYADLFLAAKNLSDAILLSDILRVNTEITKAPLSASMIKRYDEHHQDLTLLKALVRQQLPEKYKEIFFDQSKNGYAGYIDGGASQEEFYKFIKPILEKMDGTEELLVKLNREDLLRKQRTFDNGSIPHQIHLGELHAILRRQEDFYPFLKDNREKIEKILTFRIPYYVGPLARGNSRFAWMTRKSEETITPWNFEEVVDKGASAQSFIERMTNFDKNLPNEKVLPKHSLLYEYFTVYNELTKVKYVTEGMRKPAFLSGEQKKAIVDLLFKTNRKVTVKQLKEDYFKKIECFDSVEISGVEDRFNASLGTYHDLLKIIKDKDFLDNEENEDILEDIVLTLTLFEDREMIEERLKTYAHLFDDKVMKQLKRRRYTGWGRLSRKLINGIRDKQSGKTILDFLKSDGFANRNFMQLIHDDSLTFKEDIQKAQVSGQGDSLHEHIANLAGSPAIKKGILQTVKVVDELVKVMGRHKPENIVIEMARENQTTQKGQKNSRERMKRIEEGIKELGSQILKEHPVENTQLQNEKLYLYYLQNGRDMYVDQELDINRLSDYDVDHIVPQSFLKDDSIDNKVLTRSDKARGKSDNVPSEEVVKKMKNYWRQLLNAKLITQRKFDNLTKAERGGLSELDKAGFIKRQLVETRQITKHVAQILDSRMNTKYDENDKLIREVKVITLKSKLVSDFRKDFQFYKVREINNYHHAHDAYLNAVVGTALIKKYPKLESEFVYGDYKVYDVRKMIAKSEQEIGKATAKYFFYSNIMNFFKTEITLANGEIRKRPLIETNGETGEIVWDKGRDFATVRKVLSMPQVNIVKKTEVQTGGFSKESILPKRNSDKLIARKKDWDPKKYGGFDSPTVAYSVLVVAKVEKGKSKKLKSVKELLGITIMERSSFEKNPIDFLEAKGYKEVKKDLIIKLPKYSLFELENGRKRMLASAGELQKGNELALPSKYVNFLYLASHYEKLKGSPEDNEQKQLFVEQHKHYLDEIIEQISEFSKRVILADANLDKVLSAYNKHRDKPIREQAENIIHLFTLTNLGAPAAFKYFDTTIDRKRYTSTKEVLDATLIHQSITGLYETRIDLSQLGGDGGPAPGGGGGTLGIEDEYRLHETSTEPDVSLGSTWLSDFPQAWAETGGMGLAVRQAPLIIPLKATSTPVSIQQYPMSHEARLGIKPHIQRLLDQGILVPCQSPWNTPLLPVKKPGTNDYRPVQDLREVNKRVEDIHPTVPNPYNLLSGLPPSHQWYTVLDLKDAFFCLRLHPTSQPLFAFEWRDPGMGISGQLTWTRLPQGFKNSPTLFNEALHRDLADFRIQHPDLILLQYVDDILLAATSELDCQQGTRALLQTLGDLGYRASAKKAQICQKQVKYLGYLLREGQRWLTEARKETVMGQPVPKTPRQLREFLGTAGFCRLWIPGFAEMAAPLYPLTKPGTLFSWGPDQQKAYQEIKQALLTAPALGLPDLTKPFELFVDEKQGYAKGVLTQKLGPWRRPVAYLSKKLDPVAAGWPPCLRMVAAIAVLTKDAGKLTMGQPLVILAPHAVEALVKQPPDRWLSNARMTHYQAMLLDTDRVQFGPVVALNPATLLPLPEEGAPHDCLEILAETHGTRPDLTDQPIPDADHTWYTDGSSFLQEGQRKAGAAVTTETEVIWAGALPAGTSAQRAELIALTQALKMAEGKRLNVYTDSRYAFATAHIHGEIYRRRGWLTSEGREIKNKSEILALLKALFLPKRLSIIHCLGHQKGDSAEARGNRLADQAAREAAIKTPPDTSTLLAGKRTADGSEFEKRTADGSEFESPKKKAKVE

SEQ ID NO: 6722 - protein, 2085 aa, synthetic construct
MPAAKRVKLDGGDKKYSIGLDIGTNSVGWAVITDEYKVPSKKFKVLGNTDRHSIKKNLIGALLFDSGETAEATRLKRTARRRYTRRKNRICYLQEIFSNEMAKVDDSFFHRLEESFLVEEDKKHERHPIFGNIVDEVAYHEKYPTIYHLRKKLVDSTDKADLRLIYLALAHMIKFRGHFLIEGDLNPDNSDVDKLFIQLVQTYNQLFEENPINASGVDAKAILSARLSKSRRLENLIAQLPGEKKNGLFGNLIALSLGLTPNFKSNFDLAEDAKLQLSKDTYDDDLDNLLAQIGDQYADLFLAAKNLSDAILLSDILRVNTEITKAPLSASMIKRYDEHHQDLTLLKALVRQQLPEKYKEIFFDQSKNGYAGYIDGGASQEEFYKFIKPILEKMDGTEELLVKLNREDLLRKQRTFDNGSIPHQIHLGELHAILRRQEDFYPFLKDNREKIEKILTFRIPYYVGPLARGNSRFAWMTRKSEETITPWNFEEVVDKGASAQSFIERMTNFDKNLPNEKVLPKHSLLYEYFTVYNELTKVKYVTEGMRKPAFLSGEQKKAIVDLLFKTNRKVTVKQLKEDYFKKIECFDSVEISGVEDRFNASLGTYHDLLKIIKDKDFLDNEENEDILEDIVLTLTLFEDREMIEERLKTYAHLFDDKVMKQLKRRRYTGWGRLSRKLINGIRDKQSGKTILDFLKSDGFANRNFMQLIHDDSLTFKEDIQKAQVSGQGDSLHEHIANLAGSPAIKKGILQTVKVVDELVKVMGRHKPENIVIEMARENQTTQKGQKNSRERMKRIEEGIKELGSQILKEHPVENTQLQNEKLYLYYLQNGRDMYVDQELDINRLSDYDVDHIVPQSFLKDDSIDNKVLTRSDKARGKSDNVPSEEVVKKMKNYWRQLLNAKLITQRKFDNLTKAERGGLSELDKAGFIKRQLVETRQITKHVAQILDSRMNTKYDENDKLIREVKVITLKSKLVSDFRKDFQFYKVREINNYHHAHDAYLNAVVGTALIKKYPKLESEFVYGDYKVYDVRKMIAKSEQEIGKATAKYFFYSNIMNFFKTEITLANGEIRKRPLIETNGETGEIVWDKGRDFATVRKVLSMPQVNIVKKTEVQTGGFSKESILPKRNSDKLIARKKDWDPKKYGGFDSPTVAYSVLVVAKVEKGKSKKLKSVKELLGITIMERSSFEKNPIDFLEAKGYKEVKKDLIIKLPKYSLFELENGRKRMLASAGELQKGNELALPSKYVNFLYLASHYEKLKGSPEDNEQKQLFVEQHKHYLDEIIEQISEFSKRVILADANLDKVLSAYNKHRDKPIREQAENIIHLFTLTNLGAPAAFKYFDTTIDRKRYTSTKEVLDATLIHQSITGLYETRIDLSQLGGDGGPAPGGGGGTLQLDDEYRLYSPLVKPDQNIQFWLEQFPQAWAETAGMGLAKQVPPQVIQLKASATPVSVRQYPLSKEAQEGIRPHVQRLIQQGILVPVQSPWNTPLLPVRKPGTNDYRPVQDLREVNKRVQDIHPTVPNPYNLLCALPPQRSWYTVLDLKDAFFCLRLHPTSQPLFAFEWRDPGTGRTGQLTWTRLPQGFKNSPTIFDEALHRDLANFRIQHPQVTLLQYVDDLLLAGATKQDCLEGTKALLLELSDLGYRASAKKAQICRREVTYLGYSLRDGQRWLTEARKKTVVQIPAPTTAKQVREFLGTAGFCRLWIPGFATLAAPLYPLTKEKGEFSWAPEHQKAFDAIKKALLSAPALALPDVTKPFTLYVDERKGVARGVLTQTLGPWRRPVAYLSKKLDPVASGWPVCLKAIAAVAILVKDADKLTLGQNITVIAPHALENIVRQPPDRWMTNARMTHYQSLLLTERVTFAPPAALNPATLLPEETDEPVTHDCHQLLIEETGVRKDLTDIPLTGEVLTWFTDGSSYVVEGKRMAGAAVVDGTRTIWASSLPEGTSAQKAELMALTQALRLAEGKSINIYTDSRYAFATAHVHGAIYKQRGLLTSAGREIKNKEEILSLLEALHLPKRLAIIHCPGHQKAKDPISRGNQMADRVAKQAAQGVNLLAGKRTADGSEFEKRTADGSEFESPKKKAKVE

SEQ ID NO: 6723 - protein, 2082 aa, synthetic construct
MPAAKRVKLDGGDKKYSIGLDIGTNSVGWAVITDEYKVPSKKFKVLGNTDRHSIKKNLIGALLFDSGETAEATRLKRTARRRYTRRKNRICYLQEIFSNEMAKVDDSFFHRLEESFLVEEDKKHERHPIFGNIVDEVAYHEKYPTIYHLRKKLVDSTDKADLRLIYLALAHMIKFRGHFLIEGDLNPDNSDVDKLFIQLVQTYNQLFEENPINASGVDAKAILSARLSKSRRLENLIAQLPGEKKNGLFGNLIALSLGLTPNFKSNFDLAEDAKLQLSKDTYDDDLDNLLAQIGDQYADLFLAAKNLSDAILLSDILRVNTEITKAPLSASMIKRYDEHHQDLTLLKALVRQQLPEKYKEIFFDQSKNGYAGYIDGGASQEEFYKFIKPILEKMDGTEELLVKLNREDLLRKQRTFDNGSIPHQIHLGELHAILRRQEDFYPFLKDNREKIEKILTFRIPYYVGPLARGNSRFAWMTRKSEETITPWNFEEVVDKGASAQSFIERMTNFDKNLPNEKVLPKHSLLYEYFTVYNELTKVKYVTEGMRKPAFLSGEQKKAIVDLLFKTNRKVTVKQLKEDYFKKIECFDSVEISGVEDRFNASLGTYHDLLKIIKDKDFLDNEENEDILEDIVLTLTLFEDREMIEERLKTYAHLFDDKVMKQLKRRRYTGWGRLSRKLINGIRDKQSGKTILDFLKSDGFANRNFMQLIHDDSLTFKEDIQKAQVSGQGDSLHEHIANLAGSPAIKKGILQTVKVVDELVKVMGRHKPENIVIEMARENQTTQKGQKNSRERMKRIEEGIKELGSQILKEHPVENTQLQNEKLYLYYLQNGRDMYVDQELDINRLSDYDVDHIVPQSFLKDDSIDNKVLTRSDKARGKSDNVPSEEVVKKMKNYWRQLLNAKLITQRKFDNLTKAERGGLSELDKAGFIKRQLVETRQITKHVAQILDSRMNTKYDENDKLIREVKVITLKSKLVSDFRKDFQFYKVREINNYHHAHDAYLNAVVGTALIKKYPKLESEFVYGDYKVYDVRKMIAKSEQEIGKATAKYFFYSNIMNFFKTEITLANGEIRKRPLIETNGETGEIVWDKGRDFATVRKVLSMPQVNIVKKTEVQTGGFSKESILPKRNSDKLIARKKDWDPKKYGGFDSPTVAYSVLVVAKVEKGKSKKLKSVKELLGITIMERSSFEKNPIDFLEAKGYKEVKKDLIIKLPKYSLFELENGRKRMLASAGELQKGNELALPSKYVNFLYLASHYEKLKGSPEDNEQKQLFVEQHKHYLDEIIEQISEFSKRVILADANLDKVLSAYNKHRDKPIREQAENIIHLFTLTNLGAPAAFKYFDTTIDRKRYTSTKEVLDATLIHQSITGLYETRIDLSQLGGDGGPAPGGGGGIPWLMKKPLQLTTLVPLQEYEERLLKQTMLTGSYKEKLQSLFLKYDALWQHWENQVGHRRIKPHHIATGTVNPRPQKQYPINPKAKASIQTVINDLLKQGVLIQQNSIMNTPVYPVPKPDGKWRMVLDYREVNKTIPLIAAQNQHSAGILSSIFRGKYKTTLDLSNGFWAHSITPESYWLTAFTWLGQQYCWTRLPQGFLNSPALFNADVVDLLKEVPNVQVYVDDIYISHDDPREHLEQLEKVFSLLLNAGYVVSLKKSEIAQHEVEFLGFNITKEGRGLTETFKQKLLNITPPRDLKQLQSILGLLNFARNFIPNFSELVKPLYNIIATAPGKYITWTTDNSQQLQNIISMLNSAENLEERNPEVRLIMKVNTSPSAGYIRFYNEFAKRPIMYLNYVYTKAEVKFTNTEKLLTTIHKGLIKALDLGMGQEILVYSPIVSMTKIQKTPLPERKALPIRWITWMSYLEDPRIQFHYDKTLPELQQVPTVTDDIIAKIKHPSEFSMVFYTDGSAIKHPNVNKSHNAGMGIAQVQFKPEFTVINTWSIPLGDHTAQLAEVAAVEFACKKALKIDGPVLIVTDSFYVAESVNKELPYWQSNGFFNNKKKPLKHVSKWKSIADCIQLKPDIIIIHEKGHQPTASTFHTEGNNLADKLATQGSYVVNAGKRTADGSEFEKRTADGSEFESPKKKAKVE

SEQ ID NO: 6724 - protein, 2082 aa, synthetic construct
MPAAKRVKLDGGDKKYSIGLDIGTNSVGWAVITDEYKVPSKKFKVLGNTDRHSIKKNLIGALLFDSGETAEATRLKRTARRRYTRRKNRICYLQEIFSNEMAKVDDSFFHRLEESFLVEEDKKHERHPIFGNIVDEVAYHEKYPTIYHLRKKLVDSTDKADLRLIYLALAHMIKFRGHFLIEGDLNPDNSDVDKLFIQLVQTYNQLFEENPINASGVDAKAILSARLSKSRRLENLIAQLPGEKKNGLFGNLIALSLGLTPNFKSNFDLAEDAKLQLSKDTYDDDLDNLLAQIGDQYADLFLAAKNLSDAILLSDILRVNTEITKAPLSASMIKRYDEHHQDLTLLKALVRQQLPEKYKEIFFDQSKNGYAGYIDGGASQEEFYKFIKPILEKMDGTEELLVKLNREDLLRKQRTFDNGSIPHQIHLGELHAILRRQEDFYPFLKDNREKIEKILTFRIPYYVGPLARGNSRFAWMTRKSEETITPWNFEEVVDKGASAQSFIERMTNFDKNLPNEKVLPKHSLLYEYFTVYNELTKVKYVTEGMRKPAFLSGEQKKAIVDLLFKTNRKVTVKQLKEDYFKKIECFDSVEISGVEDRFNASLGTYHDLLKIIKDKDFLDNEENEDILEDIVLTLTLFEDREMIEERLKTYAHLFDDKVMKQLKRRRYTGWGRLSRKLINGIRDKQSGKTILDFLKSDGFANRNFMQLIHDDSLTFKEDIQKAQVSGQGDSLHEHIANLAGSPAIKKGILQTVKVVDELVKVMGRHKPENIVIEMARENQTTQKGQKNSRERMKRIEEGIKELGSQILKEHPVENTQLQNEKLYLYYLQNGRDMYVDQELDINRLSDYDVDHIVPQSFLKDDSIDNKVLTRSDKARGKSDNVPSEEVVKKMKNYWRQLLNAKLITQRKFDNLTKAERGGLSELDKAGFIKRQLVETRQITKHVAQILDSRMNTKYDENDKLIREVKVITLKSKLVSDFRKDFQFYKVREINNYHHAHDAYLNAVVGTALIKKYPKLESEFVYGDYKVYDVRKMIAKSEQEIGKATAKYFFYSNIMNFFKTEITLANGEIRKRPLIETNGETGEIVWDKGRDFATVRKVLSMPQVNIVKKTEVQTGGFSKESILPKRNSDKLIARKKDWDPKKYGGFDSPTVAYSVLVVAKVEKGKSKKLKSVKELLGITIMERSSFEKNPIDFLEAKGYKEVKKDLIIKLPKYSLFELENGRKRMLASAGELQKGNELALPSKYVNFLYLASHYEKLKGSPEDNEQKQLFVEQHKHYLDEIIEQISEFSKRVILADANLDKVLSAYNKHRDKPIREQAENIIHLFTLTNLGAPAAFKYFDTTIDRKRYTSTKEVLDATLIHQSITGLYETRIDLSQLGGDGGPAPGGGGGIPWLMKKPLQLTTLVPLQEYEERLLKQTMLTGSYKEKLQSLFLKYDALWQHWENQVGHRRIKPHHIATGTVNPRPQKQYPINPKAKASIQTVINDLLKQGVLIQQNSIMNTPVYPVPKPDGKWRMVLDYREVNKTIPLIAAQNQHSAGILSSIFRGKYKTTLDLSNGFWAHSITPESYWLTAFTWLGQQYCWTRLPQGFLNSPALFNADVVDLLKEVPNVQVYVDDIYISHDDPREHLEQLEKVFSLLLNAGYVVSLKKSEIAQHEVEFLGFNITKEGRGLTETFKQKLLNITPPRDLKQLQSILGKLNFARNFIPNFSELVKPLYNIIATAPGKYITWTTDNSQQLQNIISMLNSAENLEERNPEVRLIMKVNTSPSAGYIRFYNEFAKRPIMYLNYVYTKAEVKFTNTEKLLTTIHKGLIKALDLGMGQEILVYSPIVSMTKIQKTPLPERKALPIRWITWMSYLEDPRIQFHYDKTLPELQQVPTVTDDIIAKIKHPSEFSMVFYTDGSAIKHPNVNKSHNAGMGIAQVQFKPEFTVINTWSIPLGDHTAQLAEVAAVEFACKKALKIDGPVLIVTDSFYVAESVNKELPYWQSNGFFNNKKKPLKHVSKWKSIADCIQLKPDIIIIHEKGHQPTASTFHTEGNNLADKLATQGSYVVNAGKRTADGSEFEKRTADGSEFESPKKKAKVE

SEQ ID NO: 6725 - protein, 2091 aa, synthetic construct
MPAAKRVKLDGGDKKYSIGLDIGTNSVGWAVITDEYKVPSKKFKVLGNTDRHSIKKNLIGALLFDSGETAEATRLKRTARRRYTRRKNRICYLQEIFSNEMAKVDDSFFHRLEESFLVEEDKKHERHPIFGNIVDEVAYHEKYPTIYHLRKKLVDSTDKADLRLIYLALAHMIKFRGHFLIEGDLNPDNSDVDKLFIQLVQTYNQLFEENPINASGVDAKAILSARLSKSRRLENLIAQLPGEKKNGLFGNLIALSLGLTPNFKSNFDLAEDAKLQLSKDTYDDDLDNLLAQIGDQYADLFLAAKNLSDAILLSDILRVNTEITKAPLSASMIKRYDEHHQDLTLLKALVRQQLPEKYKEIFFDQSKNGYAGYIDGGASQEEFYKFIKPILEKMDGTEELLVKLNREDLLRKQRTFDNGSIPHQIHLGELHAILRRQEDFYPFLKDNREKIEKILTFRIPYYVGPLARGNSRFAWMTRKSEETITPWNFEEVVDKGASAQSFIERMTNFDKNLPNEKVLPKHSLLYEYFTVYNELTKVKYVTEGMRKPAFLSGEQKKAIVDLLFKTNRKVTVKQLKEDYFKKIECFDSVEISGVEDRFNASLGTYHDLLKIIKDKDFLDNEENEDILEDIVLTLTLFEDREMIEERLKTYAHLFDDKVMKQLKRRRYTGWGRLSRKLINGIRDKQSGKTILDFLKSDGFANRNFMQLIHDDSLTFKEDIQKAQVSGQGDSLHEHIANLAGSPAIKKGILQTVKVVDELVKVMGRHKPENIVIEMARENQTTQKGQKNSRERMKRIEEGIKELGSQILKEHPVENTQLQNEKLYLYYLQNGRDMYVDQELDINRLSDYDVDHIVPQSFLKDDSIDNKVLTRSDKARGKSDNVPSEEVVKKMKNYWRQLLNAKLITQRKFDNLTKAERGGLSELDKAGFIKRQLVETRQITKHVAQILDSRMNTKYDENDKLIREVKVITLKSKLVSDFRKDFQFYKVREINNYHHAHDAYLNAVVGTALIKKYPKLESEFVYGDYKVYDVRKMIAKSEQEIGKATAKYFFYSNIMNFFKTEITLANGEIRKRPLIETNGETGEIVWDKGRDFATVRKVLSMPQVNIVKKTEVQTGGFSKESILPKRNSDKLIARKKDWDPKKYGGFDSPTVAYSVLVVAKVEKGKSKKLKSVKELLGITIMERSSFEKNPIDFLEAKGYKEVKKDLIIKLPKYSLFELENGRKRMLASAGELQKGNELALPSKYVNFLYLASHYEKLKGSPEDNEQKQLFVEQHKHYLDEIIEQISEFSKRVILADANLDKVLSAYNKHRDKPIREQAENIIHLFTLTNLGAPAAFKYFDTTIDRKRYTSTKEVLDATLIHQSITGLYETRIDLSQLGGDGGPAPGGGGGTLNIEDEYRLHETSKEPDVPLGSTWLSDFPQAWAETGGMGLAVRQAPLIIPLKATSTPVSIKQYPMSQEARLGIKPHIQRLLDQGILVPCQSPWNTPLLPVKKPGTNDYRPVQDLREVNKRVEDIHPTVPNPYNLLSGLPPSHQWYTVLDLKDAFFCLRLHPTSQPLFAFEWRDPEMGISGQLTWTRLPQGFKNSPTLFNEALHRDLADFRIQHPDLILLQYVDDLLLAATSEQDCQRGTRALLQTLGNLGYRASAKKAQICQKQVKYLGYLLKEGQRWLTEARKETVMGQPTPKTPRQLREFLGTAGFCRLWIPGFAEMAAPLYPLTKPGTLFNWGPDQQKAYQEIKQALLTAPALGLPDLTKPFELFVDEKQGYAKGVLTQKLGPWRRPVAYLSKKLDPVAAGWPPCLRMVAAIAVLTKDAGKLTMGQPLVILAPHAVEALVKQPPDRWLSNARMTHYQAMLLDTDRVQFGPVVALNPATLLPLPEKEAPHDCLEILAETHGTRPDLTDQPIPDADYTWYTDGSSFLQEGQRRAGAAVTTETEVIWARALPAGTSAQRAELIALTQALKMAEGKKLNVYTDSRYAFATAHVHGEIYRRRGWLTSEGREIKNKNEILALLKALFLPKRLSIIHCPGHQKGNSAEARGNRMADQAAREAAMKAVLETSTLLAGKRTADGSEFEKRTADGSEFESPKKKAKVE

SEQ ID NO: 6726 - protein, 2091 aa, synthetic construct
MPAAKRVKLDGGDKKYSIGLDIGTNSVGWAVITDEYKVPSKKFKVLGNTDRHSIKKNLIGALLFDSGETAEATRLKRTARRRYTRRKNRICYLQEIFSNEMAKVDDSFFHRLEESFLVEEDKKHERHPIFGNIVDEVAYHEKYPTIYHLRKKLVDSTDKADLRLIYLALAHMIKFRGHFLIEGDLNPDNSDVDKLFIQLVQTYNQLFEENPINASGVDAKAILSARLSKSRRLENLIAQLPGEKKNGLFGNLIALSLGLTPNFKSNFDLAEDAKLQLSKDTYDDDLDNLLAQIGDQYADLFLAAKNLSDAILLSDILRVNTEITKAPLSASMIKRYDEHHQDLTLLKALVRQQLPEKYKEIFFDQSKNGYAGYIDGGASQEEFYKFIKPILEKMDGTEELLVKLNREDLLRKQRTFDNGSIPHQIHLGELHAILRRQEDFYPFLKDNREKIEKILTFRIPYYVGPLARGNSRFAWMTRKSEETITPWNFEEVVDKGASAQSFIERMTNFDKNLPNEKVLPKHSLLYEYFTVYNELTKVKYVTEGMRKPAFLSGEQKKAIVDLLFKTNRKVTVKQLKEDYFKKIECFDSVEISGVEDRFNASLGTYHDLLKIIKDKDFLDNEENEDILEDIVLTLTLFEDREMIEERLKTYAHLFDDKVMKQLKRRRYTGWGRLSRKLINGIRDKQSGKTILDFLKSDGFANRNFMQLIHDDSLTFKEDIQKAQVSGQGDSLHEHIANLAGSPAIKKGILQTVKVVDELVKVMGRHKPENIVIEMARENQTTQKGQKNSRERMKRIEEGIKELGSQILKEHPVENTQLQNEKLYLYYLQNGRDMYVDQELDINRLSDYDVDHIVPQSFLKDDSIDNKVLTRSDKARGKSDNVPSEEVVKKMKNYWRQLLNAKLITQRKFDNLTKAERGGLSELDKAGFIKRQLVETRQITKHVAQILDSRMNTKYDENDKLIREVKVITLKSKLVSDFRKDFQFYKVREINNYHHAHDAYLNAVVGTALIKKYPKLESEFVYGDYKVYDVRKMIAKSEQEIGKATAKYFFYSNIMNFFKTEITLANGEIRKRPLIETNGETGEIVWDKGRDFATVRKVLSMPQVNIVKKTEVQTGGFSKESILPKRNSDKLIARKKDWDPKKYGGFDSPTVAYSVLVVAKVEKGKSKKLKSVKELLGITIMERSSFEKNPIDFLEAKGYKEVKKDLIIKLPKYSLFELENGRKRMLASAGELQKGNELALPSKYVNFLYLASHYEKLKGSPEDNEQKQLFVEQHKHYLDEIIEQISEFSKRVILADANLDKVLSAYNKHRDKPIREQAENIIHLFTLTNLGAPAAFKYFDTTIDRKRYTSTKEVLDATLIHQSITGLYETRIDLSQLGGDGGPAPGGGGGTLNIEDEYRLHETSKEPDVPLGSTWLSDFPQAWAETGGMGLAVRQAPLIIPLKATSTPVSIKQYPMSQEARLGIKPHIQRLLDQGILVPCQSPWNTPLLPVKKPGTNDYRPVQDLREVNKRVEDIHPTVPNPYNLLSGLPPSHQWYTVLDLKDAFFCLRLHPTSQPLFAFEWRDPEMGISGQLTWTRLPQGFKNSPTLFNEALHRDLADFRIQHPDLILLQYVDDLLLAATSEQDCQRGTRALLQTLGNLGYRASAKKAQICQKQVKYLGYLLKEGQRWLTEARKETVMGQPTPKTPRQLREFLGKAGFCRLFIPGFAEMAAPLYPLTKPGTLFNWGPDQQKAYQEIKQALLTAPALGLPDLTKPFELFVDEKQGYAKGVLTQKLGPWRRPVAYLSKKLDPVAAGWPPCLRMVAAIAVLTKDAGKLTMGQPLVILAPHAVEALVKQPPDRWLSNARMTHYQAMLLDTDRVQFGPVVALNPATLLPLPEKEAPHDCLEILAETHGTRPDLTDQPIPDADYTWYTDGSSFLQEGQRRAGAAVTTETEVIWARALPAGTSAQRAELIALTQALKMAEGKKLNVYTDSRYAFATAHVHGEIYRRRGWLTSEGREIKNKNEILALLKALFLPKRLSIIHCPGHQKGNSAEARGNRMADQAAREAAMKAVLETSTLLAGKRTADGSEFEKRTADGSEFESPKKKAKVE

SEQ ID NO: 6727 - protein, 2095 aa, synthetic construct
MPAAKRVKLDGGDKKYSIGLDIGTNSVGWAVITDEYKVPSKKFKVLGNTDRHSIKKNLIGALLFDSGETAEATRLKRTARRRYTRRKNRICYLQEIFSNEMAKVDDSFFHRLEESFLVEEDKKHERHPIFGNIVDEVAYHEKYPTIYHLRKKLVDSTDKADLRLIYLALAHMIKFRGHFLIEGDLNPDNSDVDKLFIQLVQTYNQLFEENPINASGVDAKAILSARLSKSRRLENLIAQLPGEKKNGLFGNLIALSLGLTPNFKSNFDLAEDAKLQLSKDTYDDDLDNLLAQIGDQYADLFLAAKNLSDAILLSDILRVNTEITKAPLSASMIKRYDEHHQDLTLLKALVRQQLPEKYKEIFFDQSKNGYAGYIDGGASQEEFYKFIKPILEKMDGTEELLVKLNREDLLRKQRTFDNGSIPHQIHLGELHAILRRQEDFYPFLKDNREKIEKILTFRIPYYVGPLARGNSRFAWMTRKSEETITPWNFEEVVDKGASAQSFIERMTNFDKNLPNEKVLPKHSLLYEYFTVYNELTKVKYVTEGMRKPAFLSGEQKKAIVDLLFKTNRKVTVKQLKEDYFKKIECFDSVEISGVEDRFNASLGTYHDLLKIIKDKDFLDNEENEDILEDIVLTLTLFEDREMIEERLKTYAHLFDDKVMKQLKRRRYTGWGRLSRKLINGIRDKQSGKTILDFLKSDGFANRNFMQLIHDDSLTFKEDIQKAQVSGQGDSLHEHIANLAGSPAIKKGILQTVKVVDELVKVMGRHKPENIVIEMARENQTTQKGQKNSRERMKRIEEGIKELGSQILKEHPVENTQLQNEKLYLYYLQNGRDMYVDQELDINRLSDYDVDHIVPQSFLKDDSIDNKVLTRSDKARGKSDNVPSEEVVKKMKNYWRQLLNAKLITQRKFDNLTKAERGGLSELDKAGFIKRQLVETRQITKHVAQILDSRMNTKYDENDKLIREVKVITLKSKLVSDFRKDFQFYKVREINNYHHAHDAYLNAVVGTALIKKYPKLESEFVYGDYKVYDVRKMIAKSEQEIGKATAKYFFYSNIMNFFKTEITLANGEIRKRPLIETNGETGEIVWDKGRDFATVRKVLSMPQVNIVKKTEVQTGGFSKESILPKRNSDKLIARKKDWDPKKYGGFDSPTVAYSVLVVAKVEKGKSKKLKSVKELLGITIMERSSFEKNPIDFLEAKGYKEVKKDLIIKLPKYSLFELENGRKRMLASAGELQKGNELALPSKYVNFLYLASHYEKLKGSPEDNEQKQLFVEQHKHYLDEIIEQISEFSKRVILADANLDKVLSAYNKHRDKPIREQAENIIHLFTLTNLGAPAAFKYFDTTIDRKRYTSTKEVLDATLIHQSITGLYETRIDLSQLGGDGGGSSEAAAKGGTAPLEEEYRLFLEAPIQNVTLLEQWKREIPKVWAEINPPGLASTQAPIHVQLLSTALPVRVRQYPITLEAKRSLRETIRKFRAAGILRPVHSPWNTPLLPVRKSGTSEYRMVQDLREVNKRVETIHPTVPNPYTLLSLLPPDRIWYSVLDLKDAFFCIPLAPESQLIFAFEWADAEEGESGQLTWTRLPQGFKNSPTLFNEALNRDLQGFRLDHPSVSLLQYVDDLLIAADTQAACLSATRDLLMTLAELGYRVSGKKAQLCQEEVTYLGFKIHKGSRSLSNSRTQAILQIPVPKTKRQVREFLGTIGYCRLWIPGFAELAQPLYAATRPGNDPLVWGEKEEEAFQSLKLALTQPPALALPSLDKPFQLFVEETSGAAKGVLTQALGPWKRPVAYLSKRLDPVAAGWPRCLRAIAAAALLTREASKLTFGQDIEITSSHNLESLLRSPPDKWLTNARITQYQVLLLDPPRVRFKQTAALNPATLLPETDDTLPIHHCLDTLDSLTSTRPDLTDQPLAQAEATLFTDGSSYIRDGKRYAGAAVVTLDSVIWAEPLPIGTSAQKAELIALTKALEWSKDKSVNIYTDSRYAFATLHVHGMIYRERGWLTAGGKAIKNAPEILALLTAVWLPKRVAVMHCKGHQKDDAPTSTGNRRADEVAREVAIRPLSTQATISAGKRTADGSEFEKRTADGSEFESPKKKAKVE

SEQ ID NO: 6728 - protein, 2099 aa, synthetic construct
MPAAKRVKLDGGDKKYSIGLDIGTNSVGWAVITDEYKVPSKKFKVLGNTDRHSIKKNLIGALLFDSGETAEATRLKRTARRRYTRRKNRICYLQEIFSNEMAKVDDSFFHRLEESFLVEEDKKHERHPIFGNIVDEVAYHEKYPTIYHLRKKLVDSTDKADLRLIYLALAHMIKFRGHFLIEGDLNPDNSDVDKLFIQLVQTYNQLFEENPINASGVDAKAILSARLSKSRRLENLIAQLPGEKKNGLFGNLIALSLGLTPNFKSNFDLAEDAKLQLSKDTYDDDLDNLLAQIGDQYADLFLAAKNLSDAILLSDILRVNTEITKAPLSASMIKRYDEHHQDLTLLKALVRQQLPEKYKEIFFDQSKNGYAGYIDGGASQEEFYKFIKPILEKMDGTEELLVKLNREDLLRKQRTFDNGSIPHQIHLGELHAILRRQEDFYPFLKDNREKIEKILTFRIPYYVGPLARGNSRFAWMTRKSEETITPWNFEEVVDKGASAQSFIERMTNFDKNLPNEKVLPKHSLLYEYFTVYNELTKVKYVTEGMRKPAFLSGEQKKAIVDLLFKTNRKVTVKQLKEDYFKKIECFDSVEISGVEDRFNASLGTYHDLLKIIKDKDFLDNEENEDILEDIVLTLTLFEDREMIEERLKTYAHLFDDKVMKQLKRRRYTGWGRLSRKLINGIRDKQSGKTILDFLKSDGFANRNFMQLIHDDSLTFKEDIQKAQVSGQGDSLHEHIANLAGSPAIKKGILQTVKVVDELVKVMGRHKPENIVIEMARENQTTQKGQKNSRERMKRIEEGIKELGSQILKEHPVENTQLQNEKLYLYYLQNGRDMYVDQELDINRLSDYDVDHIVPQSFLKDDSIDNKVLTRSDKARGKSDNVPSEEVVKKMKNYWRQLLNAKLITQRKFDNLTKAERGGLSELDKAGFIKRQLVETRQITKHVAQILDSRMNTKYDENDKLIREVKVITLKSKLVSDFRKDFQFYKVREINNYHHAHDAYLNAVVGTALIKKYPKLESEFVYGDYKVYDVRKMIAKSEQEIGKATAKYFFYSNIMNFFKTEITLANGEIRKRPLIETNGETGEIVWDKGRDFATVRKVLSMPQVNIVKKTEVQTGGFSKESILPKRNSDKLIARKKDWDPKKYGGFDSPTVAYSVLVVAKVEKGKSKKLKSVKELLGITIMERSSFEKNPIDFLEAKGYKEVKKDLIIKLPKYSLFELENGRKRMLASAGELQKGNELALPSKYVNFLYLASHYEKLKGSPEDNEQKQLFVEQHKHYLDEIIEQISEFSKRVILADANLDKVLSAYNKHRDKPIREQAENIIHLFTLTNLGAPAAFKYFDTTIDRKRYTSTKEVLDATLIHQSITGLYETRIDLSQLGGDGGGSSEAAAKGGTVSLQDEHRLFDIPVTTSLPDVWLQDFPQAWAETGGLGRAKCQAPIIIDLKPTAVPVSIKQYPMSLEAHMGIRQHIIKFLELGVLRPCRSPWNTPLLPVKKPGTQDYRPVQDLREINKRTVDIHPTVPNPYNLLSTLKPDYSWYTVLDLKDAFFCLPLAPQSQELFAFEWKDPERGISGQLTWTRLPQGFKNSPTLFNEALHRDLTDFRTQHPEVTLLQYVDDLLLAAPTKKACTQGTRHLLQELGEKGYRASAKKAQICQTKVTYLGYILSEGKRWLTPGRIETVARIPPPRNPREVREFLGTAGFCRLWIPGFAELAAPLYALTKPSTPFTWQTEHQLAFEALKKALLSAPALGLPDTSKPFTLFLDERQGIAKGVLTQKLGPWKRPVAYLSKKLDPVAAGWPPCLRIMAATAMLVKDSAKLTLGQPLTVITPHTLEAIVRQPPDRWITNARLTHYQALLLDTDRVQFGPPVTLNPATLLPVPENQPSPHDCRQVLAETHGTREDLKDQELPDADHTWYTDGSSYLDSGTRRAGAAVVDGHNTIWAQSLPPGTSAQKAELIALTKALELSKGKKANIYTDSRYAFATAHTHGSIYERRGWLTSEGKEIKNKAEIIALLKALFLPQEVAIIHCPGHQKGQDPVAVGNRQADRVARQAAMAEVLTLATEPDNTSHITAGKRTADGSEFEKRTADGSEFESPKKKAKVE

SEQ ID NO: 6729 - protein, 2124 aa, synthetic construct
MPAAKRVKLDGGDKKYSIGLDIGTNSVGWAVITDEYKVPSKKFKVLGNTDRHSIKKNLIGALLFDSGETAEATRLKRTARRRYTRRKNRICYLQEIFSNEMAKVDDSFFHRLEESFLVEEDKKHERHPIFGNIVDEVAYHEKYPTIYHLRKKLVDSTDKADLRLIYLALAHMIKFRGHFLIEGDLNPDNSDVDKLFIQLVQTYNQLFEENPINASGVDAKAILSARLSKSRRLENLIAQLPGEKKNGLFGNLIALSLGLTPNFKSNFDLAEDAKLQLSKDTYDDDLDNLLAQIGDQYADLFLAAKNLSDAILLSDILRVNTEITKAPLSASMIKRYDEHHQDLTLLKALVRQQLPEKYKEIFFDQSKNGYAGYIDGGASQEEFYKFIKPILEKMDGTEELLVKLNREDLLRKQRTFDNGSIPHQIHLGELHAILRRQEDFYPFLKDNREKIEKILTFRIPYYVGPLARGNSRFAWMTRKSEETITPWNFEEVVDKGASAQSFIERMTNFDKNLPNEKVLPKHSLLYEYFTVYNELTKVKYVTEGMRKPAFLSGEQKKAIVDLLFKTNRKVTVKQLKEDYFKKIECFDSVEISGVEDRFNASLGTYHDLLKIIKDKDFLDNEENEDILEDIVLTLTLFEDREMIEERLKTYAHLFDDKVMKQLKRRRYTGWGRLSRKLINGIRDKQSGKTILDFLKSDGFANRNFMQLIHDDSLTFKEDIQKAQVSGQGDSLHEHIANLAGSPAIKKGILQTVKVVDELVKVMGRHKPENIVIEMARENQTTQKGQKNSRERMKRIEEGIKELGSQILKEHPVENTQLQNEKLYLYYLQNGRDMYVDQELDINRLSDYDVDHIVPQSFLKDDSIDNKVLTRSDKARGKSDNVPSEEVVKKMKNYWRQLLNAKLITQRKFDNLTKAERGGLSELDKAGFIKRQLVETRQITKHVAQILDSRMNTKYDENDKLIREVKVITLKSKLVSDFRKDFQFYKVREINNYHHAHDAYLNAVVGTALIKKYPKLESEFVYGDYKVYDVRKMIAKSEQEIGKATAKYFFYSNIMNFFKTEITLANGEIRKRPLIETNGETGEIVWDKGRDFATVRKVLSMPQVNIVKKTEVQTGGFSKESILPKRNSDKLIARKKDWDPKKYGGFDSPTVAYSVLVVAKVEKGKSKKLKSVKELLGITIMERSSFEKNPIDFLEAKGYKEVKKDLIIKLPKYSLFELENGRKRMLASAGELQKGNELALPSKYVNFLYLASHYEKLKGSPEDNEQKQLFVEQHKHYLDEIIEQISEFSKRVILADANLDKVLSAYNKHRDKPIREQAENIIHLFTLTNLGAPAAFKYFDTTIDRKRYTSTKEVLDATLIHQSITGLYETRIDLSQLGGDGGGSSEAAAKGGLLGRDLLTKLKAQIQFSTEGPQVTWEDRPAMCLVLNLEEEYRLHEKPVPPSIDPSWLQLFPMVWAEKAGMGLANQVPPVVVELKSDASPVAVRQYPMSKEAREGIRPHIQRFLDLGILVPCQSPWNTPLLPVKKPGTNDYRPVQDLREVNKRVQDIHPTVPNPYNLLSSLPPSHTWYSVLDLKDAFFCLKLHPNSQPLFAFEWRDPEKGNTGQLTWTRLPQGFKNSPTLFNEALHRDLASFRALNPQVVMLQYVDDLLVAAPTYRDCKEGTRRLLQELSKLGYRVSAKKAQLCREEVTYLGYLLKGGKRWLTPARKATVMKIPTPTTPRQVREFLGTAGFCRLWIPGFASLAAPLYPLTRPKVPFTWTEAHQEAFGRIKEALLSAPALALPDLTKPFALYVDEKEGVARGVLTQTLGPWRRPVAYLSKKLDPVASGWPTCLKAIAAVALLLKDADKLTLGQNVLVIAPHNLESIVRQPPDRWMTNARMTHYQSLLLNERVSFAPPAILNPATLLPVESDDTPIHICSEILAEETGTRPDLRDQPLPGVPAWYTDGSSFIMDGRRQAGAAIVDNKRTVWASNLPEGTSAQKAELIALTQALRLAEGKSINIYTDSRYAFATAHVHGAIYKQRGWLTSAGKDIKNKEEILALLEAIHLPKRVAIIHCPGHQRGTDPVATGNRKADEAAKQAAQSTRILTETTKNAGKRTADGSEFEKRTADGSEFESPKKKAKVE

SEQ ID NO: 6730 - protein, 2093 aa, synthetic construct
MPAAKRVKLDGGDKKYSIGLDIGTNSVGWAVITDEYKVPSKKFKVLGNTDRHSIKKNLIGALLFDSGETAEATRLKRTARRRYTRRKNRICYLQEIFSNEMAKVDDSFFHRLEESFLVEEDKKHERHPIFGNIVDEVAYHEKYPTIYHLRKKLVDSTDKADLRLIYLALAHMIKFRGHFLIEGDLNPDNSDVDKLFIQLVQTYNQLFEENPINASGVDAKAILSARLSKSRRLENLIAQLPGEKKNGLFGNLIALSLGLTPNFKSNFDLAEDAKLQLSKDTYDDDLDNLLAQIGDQYADLFLAAKNLSDAILLSDILRVNTEITKAPLSASMIKRYDEHHQDLTLLKALVRQQLPEKYKEIFFDQSKNGYAGYIDGGASQEEFYKFIKPILEKMDGTEELLVKLNREDLLRKQRTFDNGSIPHQIHLGELHAILRRQEDFYPFLKDNREKIEKILTFRIPYYVGPLARGNSRFAWMTRKSEETITPWNFEEVVDKGASAQSFIERMTNFDKNLPNEKVLPKHSLLYEYFTVYNELTKVKYVTEGMRKPAFLSGEQKKAIVDLLFKTNRKVTVKQLKEDYFKKIECFDSVEISGVEDRFNASLGTYHDLLKIIKDKDFLDNEENEDILEDIVLTLTLFEDREMIEERLKTYAHLFDDKVMKQLKRRRYTGWGRLSRKLINGIRDKQSGKTILDFLKSDGFANRNFMQLIHDDSLTFKEDIQKAQVSGQGDSLHEHIANLAGSPAIKKGILQTVKVVDELVKVMGRHKPENIVIEMARENQTTQKGQKNSRERMKRIEEGIKELGSQILKEHPVENTQLQNEKLYLYYLQNGRDMYVDQELDINRLSDYDVDHIVPQSFLKDDSIDNKVLTRSDKARGKSDNVPSEEVVKKMKNYWRQLLNAKLITQRKFDNLTKAERGGLSELDKAGFIKRQLVETRQITKHVAQILDSRMNTKYDENDKLIREVKVITLKSKLVSDFRKDFQFYKVREINNYHHAHDAYLNAVVGTALIKKYPKLESEFVYGDYKVYDVRKMIAKSEQEIGKATAKYFFYSNIMNFFKTEITLANGEIRKRPLIETNGETGEIVWDKGRDFATVRKVLSMPQVNIVKKTEVQTGGFSKESILPKRNSDKLIARKKDWDPKKYGGFDSPTVAYSVLVVAKVEKGKSKKLKSVKELLGITIMERSSFEKNPIDFLEAKGYKEVKKDLIIKLPKYSLFELENGRKRMLASAGELQKGNELALPSKYVNFLYLASHYEKLKGSPEDNEQKQLFVEQHKHYLDEIIEQISEFSKRVILADANLDKVLSAYNKHRDKPIREQAENIIHLFTLTNLGAPAAFKYFDTTIDRKRYTSTKEVLDATLIHQSITGLYETRIDLSQLGGDGGGSSEAAAKGGTLNLEDEYRLYETSAEPEVSPGSTWLSDFPQAWAETGGMGLAVRQAPLIIPLKATSTPVSIKQYPMSQEAKLGIKPHIQRLLDQGILVPCQSPWNTPLLPVKKPGTNDYRPVQDLREVNKRVEDIHPTVPNPYNLLSGLPPSHRWYTVLDLKDAFFCLRLHPTSQPLFAFEWRDPGMGISGQLTWTRLPQGFKNSPTLFNEALHRDLADFRIQHPDLILLQYVDDILLAATSELDCQQGTRALLLTLGNLGYRASAKKAQLCQKQVKYLGYLLKEGQRWLTEARKETVMGQPTPKTPRQLREFLGTAGFCRLWIPGFAEMAAPLYPLTKPGTLFNWGPDQQKAYQEIKQALLTAPALGLPDLTKPFELFVDEKQGYAKGVLTQKLGPWRRPVAYLSKKLDPVAAGWPPCLRMVAAIAVLRKDAGKLTMGQPLVILAPHAVEALVKQPPDRWLSNARMTHYQAMLLDTDRVQFGPVVALNPATLLPLPEEGAPHDCLEILAETHGTRPDLTDQPIPDADHTWYTDGSSFLQEGQRKAGAAVTTETEVIWARALPAGTSAQRAELIALTQALKMAEGKRLNVYTDSRYAFATAHIHGEIYRRRGWLTSEGREIKNKSEILALLKALFLPKRLSIIHCLGHQKGDSAEARGNRLADQAAREAAIKTPPDTSTLLAGKRTADGSEFEKRTADGSEFESPKKKAKVE

SEQ ID NO: 6731 - protein, 2093 aa, synthetic construct
MPAAKRVKLDGGDKKYSIGLDIGTNSVGWAVITDEYKVPSKKFKVLGNTDRHSIKKNLIGALLFDSGETAEATRLKRTARRRYTRRKNRICYLQEIFSNEMAKVDDSFFHRLEESFLVEEDKKHERHPIFGNIVDEVAYHEKYPTIYHLRKKLVDSTDKADLRLIYLALAHMIKFRGHFLIEGDLNPDNSDVDKLFIQLVQTYNQLFEENPINASGVDAKAILSARLSKSRRLENLIAQLPGEKKNGLFGNLIALSLGLTPNFKSNFDLAEDAKLQLSKDTYDDDLDNLLAQIGDQYADLFLAAKNLSDAILLSDILRVNTEITKAPLSASMIKRYDEHHQDLTLLKALVRQQLPEKYKEIFFDQSKNGYAGYIDGGASQEEFYKFIKPILEKMDGTEELLVKLNREDLLRKQRTFDNGSIPHQIHLGELHAILRRQEDFYPFLKDNREKIEKILTFRIPYYVGPLARGNSRFAWMTRKSEETITPWNFEEVVDKGASAQSFIERMTNFDKNLPNEKVLPKHSLLYEYFTVYNELTKVKYVTEGMRKPAFLSGEQKKAIVDLLFKTNRKVTVKQLKEDYFKKIECFDSVEISGVEDRFNASLGTYHDLLKIIKDKDFLDNEENEDILEDIVLTLTLFEDREMIEERLKTYAHLFDDKVMKQLKRRRYTGWGRLSRKLINGIRDKQSGKTILDFLKSDGFANRNFMQLIHDDSLTFKEDIQKAQVSGQGDSLHEHIANLAGSPAIKKGILQTVKVVDELVKVMGRHKPENIVIEMARENQTTQKGQKNSRERMKRIEEGIKELGSQILKEHPVENTQLQNEKLYLYYLQNGRDMYVDQELDINRLSDYDVDHIVPQSFLKDDSIDNKVLTRSDKARGKSDNVPSEEVVKKMKNYWRQLLNAKLITQRKFDNLTKAERGGLSELDKAGFIKRQLVETRQITKHVAQILDSRMNTKYDENDKLIREVKVITLKSKLVSDFRKDFQFYKVREINNYHHAHDAYLNAVVGTALIKKYPKLESEFVYGDYKVYDVRKMIAKSEQEIGKATAKYFFYSNIMNFFKTEITLANGEIRKRPLIETNGETGEIVWDKGRDFATVRKVLSMPQVNIVKKTEVQTGGFSKESILPKRNSDKLIARKKDWDPKKYGGFDSPTVAYSVLVVAKVEKGKSKKLKSVKELLGITIMERSSFEKNPIDFLEAKGYKEVKKDLIIKLPKYSLFELENGRKRMLASAGELQKGNELALPSKYVNFLYLASHYEKLKGSPEDNEQKQLFVEQHKHYLDEIIEQISEFSKRVILADANLDKVLSAYNKHRDKPIREQAENIIHLFTLTNLGAPAAFKYFDTTIDRKRYTSTKEVLDATLIHQSITGLYETRIDLSQLGGDGGGSSEAAAKGGTLNIEDEYRLHETSKEPDVPLGSTWLSDFPQAWAETGGMGLAVRQAPLIIPLKATSTPVSIKQYPMSQEARLGIKPHIQRLLDQGILVPCQSPWNTPLLPVKKPGTNDYRPVQDLREVNKRVEDIHPTVPNPYNLLSGLPPSHQWYTVLDLKDAFFCLRLHPTSQPLFAFEWRDPEMGISGQLTWTRLPQGFKNSPTLFNEALHRDLADFRIQHPDLILLQYVDDLLLAATSEQDCQRGTRALLQTLGNLGYRASAKKAQICQKQVKYLGYLLKEGQRWLTEARKETVMGQPTPKTPRQLREFLGKAGFCRLFIPGFAEMAAPLYPLTKPGTLFNWGPDQQKAYQEIKQALLTAPALGLPDLTKPFELFVDEKQGYAKGVLTQKLGPWRRPVAYLSKKLDPVAAGWPPCLRMVAAIAVLTKDAGKLTMGQPLVILAPHAVEALVKQPPDRWLSNARMTHYQAMLLDTDRVQFGPVVALNPATLLPLPEKEAPHDCLEILAETHGTRPDLTDQPIPDADYTWYTDGSSFLQEGQRRAGAAVTTETEVIWARALPAGTSAQRAELIALTQALKMAEGKKLNVYTDSRYAFATAHVHGEIYRRRGWLTSEGREIKNKNEILALLKALFLPKRLSIIHCPGHQKGNSAEARGNRMADQAAREAAMKAVLETSTLLAGKRTADGSEFEKRTADGSEFESPKKKAKVE

SEQ ID NO: 6732 - protein, 2095 aa, synthetic construct
MPAAKRVKLDGGDKKYSIGLDIGTNSVGWAVITDEYKVPSKKFKVLGNTDRHSIKKNLIGALLFDSGETAEATRLKRTARRRYTRRKNRICYLQEIFSNEMAKVDDSFFHRLEESFLVEEDKKHERHPIFGNIVDEVAYHEKYPTIYHLRKKLVDSTDKADLRLIYLALAHMIKFRGHFLIEGDLNPDNSDVDKLFIQLVQTYNQLFEENPINASGVDAKAILSARLSKSRRLENLIAQLPGEKKNGLFGNLIALSLGLTPNFKSNFDLAEDAKLQLSKDTYDDDLDNLLAQIGDQYADLFLAAKNLSDAILLSDILRVNTEITKAPLSASMIKRYDEHHQDLTLLKALVRQQLPEKYKEIFFDQSKNGYAGYIDGGASQEEFYKFIKPILEKMDGTEELLVKLNREDLLRKQRTFDNGSIPHQIHLGELHAILRRQEDFYPFLKDNREKIEKILTFRIPYYVGPLARGNSRFAWMTRKSEETITPWNFEEVVDKGASAQSFIERMTNFDKNLPNEKVLPKHSLLYEYFTVYNELTKVKYVTEGMRKPAFLSGEQKKAIVDLLFKTNRKVTVKQLKEDYFKKIECFDSVEISGVEDRFNASLGTYHDLLKIIKDKDFLDNEENEDILEDIVLTLTLFEDREMIEERLKTYAHLFDDKVMKQLKRRRYTGWGRLSRKLINGIRDKQSGKTILDFLKSDGFANRNFMQLIHDDSLTFKEDIQKAQVSGQGDSLHEHIANLAGSPAIKKGILQTVKVVDELVKVMGRHKPENIVIEMARENQTTQKGQKNSRERMKRIEEGIKELGSQILKEHPVENTQLQNEKLYLYYLQNGRDMYVDQELDINRLSDYDVDHIVPQSFLKDDSIDNKVLTRSDKARGKSDNVPSEEVVKKMKNYWRQLLNAKLITQRKFDNLTKAERGGLSELDKAGFIKRQLVETRQITKHVAQILDSRMNTKYDENDKLIREVKVITLKSKLVSDFRKDFQFYKVREINNYHHAHDAYLNAVVGTALIKKYPKLESEFVYGDYKVYDVRKMIAKSEQEIGKATAKYFFYSNIMNFFKTEITLANGEIRKRPLIETNGETGEIVWDKGRDFATVRKVLSMPQVNIVKKTEVQTGGFSKESILPKRNSDKLIARKKDWDPKKYGGFDSPTVAYSVLVVAKVEKGKSKKLKSVKELLGITIMERSSFEKNPIDFLEAKGYKEVKKDLIIKLPKYSLFELENGRKRMLASAGELQKGNELALPSKYVNFLYLASHYEKLKGSPEDNEQKQLFVEQHKHYLDEIIEQISEFSKRVILADANLDKVLSAYNKHRDKPIREQAENIIHLFTLTNLGAPAAFKYFDTTIDRKRYTSTKEVLDATLIHQSITGLYETRIDLSQLGGDGGEAAAKGSSGGTAPLEEEYRLFLEAPIQNVTLLEQWKREIPKVWAEINPPGLASTQAPIHVQLLSTALPVRVRQYPITLEAKRSLRETIRKFRAAGILRPVHSPWNTPLLPVRKSGTSEYRMVQDLREVNKRVETIHPTVPNPYTLLSLLPPDRIWYSVLDLKDAFFCIPLAPESQLIFAFEWADAEEGESGQLTWTRLPQGFKNSPTLFNEALNRDLQGFRLDHPSVSLLQYVDDLLIAADTQAACLSATRDLLMTLAELGYRVSGKKAQLCQEEVTYLGFKIHKGSRSLSNSRTQAILQIPVPKTKRQVREFLGTIGYCRLWIPGFAELAQPLYAATRPGNDPLVWGEKEEEAFQSLKLALTQPPALALPSLDKPFQLFVEETSGAAKGVLTQALGPWKRPVAYLSKRLDPVAAGWPRCLRAIAAAALLTREASKLTFGQDIEITSSHNLESLLRSPPDKWLTNARITQYQVLLLDPPRVRFKQTAALNPATLLPETDDTLPIHHCLDTLDSLTSTRPDLTDQPLAQAEATLFTDGSSYIRDGKRYAGAAVVTLDSVIWAEPLPIGTSAQKAELIALTKALEWSKDKSVNIYTDSRYAFATLHVHGMIYRERGWLTAGGKAIKNAPEILALLTAVWLPKRVAVMHCKGHQKDDAPTSTGNRRADEVAREVAIRPLSTQATISAGKRTADGSEFEKRTADGSEFESPKKKAKVE

SEQ ID NO: 6733 - protein, 2095 aa, synthetic construct
MPAAKRVKLDGGDKKYSIGLDIGTNSVGWAVITDEYKVPSKKFKVLGNTDRHSIKKNLIGALLFDSGETAEATRLKRTARRRYTRRKNRICYLQEIFSNEMAKVDDSFFHRLEESFLVEEDKKHERHPIFGNIVDEVAYHEKYPTIYHLRKKLVDSTDKADLRLIYLALAHMIKFRGHFLIEGDLNPDNSDVDKLFIQLVQTYNQLFEENPINASGVDAKAILSARLSKSRRLENLIAQLPGEKKNGLFGNLIALSLGLTPNFKSNFDLAEDAKLQLSKDTYDDDLDNLLAQIGDQYADLFLAAKNLSDAILLSDILRVNTEITKAPLSASMIKRYDEHHQDLTLLKALVRQQLPEKYKEIFFDQSKNGYAGYIDGGASQEEFYKFIKPILEKMDGTEELLVKLNREDLLRKQRTFDNGSIPHQIHLGELHAILRRQEDFYPFLKDNREKIEKILTFRIPYYVGPLARGNSRFAWMTRKSEETITPWNFEEVVDKGASAQSFIERMTNFDKNLPNEKVLPKHSLLYEYFTVYNELTKVKYVTEGMRKPAFLSGEQKKAIVDLLFKTNRKVTVKQLKEDYFKKIECFDSVEISGVEDRFNASLGTYHDLLKIIKDKDFLDNEENEDILEDIVLTLTLFEDREMIEERLKTYAHLFDDKVMKQLKRRRYTGWGRLSRKLINGIRDKQSGKTILDFLKSDGFANRNFMQLIHDDSLTFKEDIQKAQVSGQGDSLHEHIANLAGSPAIKKGILQTVKVVDELVKVMGRHKPENIVIEMARENQTTQKGQKNSRERMKRIEEGIKELGSQILKEHPVENTQLQNEKLYLYYLQNGRDMYVDQELDINRLSDYDVDHIVPQSFLKDDSIDNKVLTRSDKARGKSDNVPSEEVVKKMKNYWRQLLNAKLITQRKFDNLTKAERGGLSELDKAGFIKRQLVETRQITKHVAQILDSRMNTKYDENDKLIREVKVITLKSKLVSDFRKDFQFYKVREINNYHHAHDAYLNAVVGTALIKKYPKLESEFVYGDYKVYDVRKMIAKSEQEIGKATAKYFFYSNIMNFFKTEITLANGEIRKRPLIETNGETGEIVWDKGRDFATVRKVLSMPQVNIVKKTEVQTGGFSKESILPKRNSDKLIARKKDWDPKKYGGFDSPTVAYSVLVVAKVEKGKSKKLKSVKELLGITIMERSSFEKNPIDFLEAKGYKEVKKDLIIKLPKYSLFELENGRKRMLASAGELQKGNELALPSKYVNFLYLASHYEKLKGSPEDNEQKQLFVEQHKHYLDEIIEQISEFSKRVILADANLDKVLSAYNKHRDKPIREQAENIIHLFTLTNLGAPAAFKYFDTTIDRKRYTSTKEVLDATLIHQSITGLYETRIDLSQLGGDGGEAAAKGSSGGTAPLEEEYRLFLEAPIQNVTLLEQWKREIPKVWAEINPPGLASTQAPIHVQLLSTALPVRVRQYPITLEAKRSLRETIRKFRAAGILRPVHSPWNTPLLPVRKSGTSEYRMVQDLREVNKRVETIHPTVPNPYTLLSLLPPDRIWYSVLDLKDAFFCIPLAPESQLIFAFEWADAEEGESGQLTWTRLPQGFKNSPTLFNEALNRDLQGFRLDHPSVSLLQYVDDLLIAADTQAACLSATRDLLMTLAELGYRVSGKKAQLCQEEVTYLGFKIHKGSRSLSNSRTQAILQIPVPKTKRQVREFLGKIGYCRLFIPGFAELAQPLYAATRPGNDPLVWGEKEEEAFQSLKLALTQPPALALPSLDKPFQLFVEETSGAAKGVLTQALGPWKRPVAYLSKRLDPVAAGWPRCLRAIAAAALLTREASKLTFGQDIEITSSHNLESLLRSPPDKWLTNARITQYQVLLLDPPRVRFKQTAALNPATLLPETDDTLPIHHCLDTLDSLTSTRPDLTDQPLAQAEATLFTDGSSYIRDGKRYAGAAVVTLDSVIWAEPLPIGTSAQKAELIALTKALEWSKDKSVNIYTDSRYAFATLHVHGMIYRERGWLTAGGKAIKNAPEILALLTAVWLPKRVAVMHCKGHQKDDAPTSTGNRRADEVAREVAIRPLSTQATISAGKRTADGSEFEKRTADGSEFESPKKKAKVE

SEQ ID NO: 6734 - protein, 2092 aa, synthetic construct
MPAAKRVKLDGGDKKYSIGLDIGTNSVGWAVITDEYKVPSKKFKVLGNTDRHSIKKNLIGALLFDSGETAEATRLKRTARRRYTRRKNRICYLQEIFSNEMAKVDDSFFHRLEESFLVEEDKKHERHPIFGNIVDEVAYHEKYPTIYHLRKKLVDSTDKADLRLIYLALAHMIKFRGHFLIEGDLNPDNSDVDKLFIQLVQTYNQLFEENPINASGVDAKAILSARLSKSRRLENLIAQLPGEKKNGLFGNLIALSLGLTPNFKSNFDLAEDAKLQLSKDTYDDDLDNLLAQIGDQYADLFLAAKNLSDAILLSDILRVNTEITKAPLSASMIKRYDEHHQDLTLLKALVRQQLPEKYKEIFFDQSKNGYAGYIDGGASQEEFYKFIKPILEKMDGTEELLVKLNREDLLRKQRTFDNGSIPHQIHLGELHAILRRQEDFYPFLKDNREKIEKILTFRIPYYVGPLARGNSRFAWMTRKSEETITPWNFEEVVDKGASAQSFIERMTNFDKNLPNEKVLPKHSLLYEYFTVYNELTKVKYVTEGMRKPAFLSGEQKKAIVDLLFKTNRKVTVKQLKEDYFKKIECFDSVEISGVEDRFNASLGTYHDLLKIIKDKDFLDNEENEDILEDIVLTLTLFEDREMIEERLKTYAHLFDDKVMKQLKRRRYTGWGRLSRKLINGIRDKQSGKTILDFLKSDGFANRNFMQLIHDDSLTFKEDIQKAQVSGQGDSLHEHIANLAGSPAIKKGILQTVKVVDELVKVMGRHKPENIVIEMARENQTTQKGQKNSRERMKRIEEGIKELGSQILKEHPVENTQLQNEKLYLYYLQNGRDMYVDQELDINRLSDYDVDHIVPQSFLKDDSIDNKVLTRSDKARGKSDNVPSEEVVKKMKNYWRQLLNAKLITQRKFDNLTKAERGGLSELDKAGFIKRQLVETRQITKHVAQILDSRMNTKYDENDKLIREVKVITLKSKLVSDFRKDFQFYKVREINNYHHAHDAYLNAVVGTALIKKYPKLESEFVYGDYKVYDVRKMIAKSEQEIGKATAKYFFYSNIMNFFKTEITLANGEIRKRPLIETNGETGEIVWDKGRDFATVRKVLSMPQVNIVKKTEVQTGGFSKESILPKRNSDKLIARKKDWDPKKYGGFDSPTVAYSVLVVAKVEKGKSKKLKSVKELLGITIMERSSFEKNPIDFLEAKGYKEVKKDLIIKLPKYSLFELENGRKRMLASAGELQKGNELALPSKYVNFLYLASHYEKLKGSPEDNEQKQLFVEQHKHYLDEIIEQISEFSKRVILADANLDKVLSAYNKHRDKPIREQAENIIHLFTLTNLGAPAAFKYFDTTIDRKRYTSTKEVLDATLIHQSITGLYETRIDLSQLGGDGGEAAAKGSSGGTLQLEEEYRLFEPESTQKQEMDIWLKNFPQAWAETGGMGTAHCQAPVLIQLKATATPISIRQYPMPHEAYQGIKPHIRRMLDQGILKPCQSPWNTPLLPVKKPGTEDYRPVQDLREVNKRVEDIHPTVPNPYNLLSTLPPSHPWYTVLDLKDAFFCLRLHSESQLLFAFEWRDPEIGLSGQLTWTRLPQGFKNSPTLFNEALHSDLADFRVRYPALVLLQYVDDLLLAAATRTECLEGTKALLETLGNKGYRASAKKAQICLQEVTYLGYSLKDGQRWLTKARKEAILSIPVPKNSRQVREFLGKAGYCRLFIPGFAELAAPLYPLTRPGTLFQWGTEQQLAFEDIKKALLSSPALGLPDITKPFELFIDENSGFAKGVLVQKLGPWKRPVAYLSKKLDTVASGWPPCLRMVAAIAILVKDAGKLTLGQPLTILTSHPVEALVRQPPNKWLSNARMTHYQAMLLDAERVHFGPTVSLNPATLLPLPSGGNHHDCLQILAETHGTRPDLTDQPLPDADLTWYTDGSSFIRNGEREAGAAVTTESEVIWAAPLPPGTSAQRAELIALTQALKMAEGKKLTVYTDSRYAFATTHVHGEIYRRRGWLTSEGKEIKNKNEILALLEALFLPKRLSIIHCPGHQKGDSPQAKGNRLADDTAKKAATETHSSLTVLPAGKRTADGSEFEKRTADGSEFESPKKKAKVE

SEQ ID NO: 6735 - protein, 2091 aa, synthetic construct
MPAAKRVKLDGGDKKYSIGLDIGTNSVGWAVITDEYKVPSKKFKVLGNTDRHSIKKNLIGALLFDSGETAEATRLKRTARRRYTRRKNRICYLQEIFSNEMAKVDDSFFHRLEESFLVEEDKKHERHPIFGNIVDEVAYHEKYPTIYHLRKKLVDSTDKADLRLIYLALAHMIKFRGHFLIEGDLNPDNSDVDKLFIQLVQTYNQLFEENPINASGVDAKAILSARLSKSRRLENLIAQLPGEKKNGLFGNLIALSLGLTPNFKSNFDLAEDAKLQLSKDTYDDDLDNLLAQIGDQYADLFLAAKNLSDAILLSDILRVNTEITKAPLSASMIKRYDEHHQDLTLLKALVRQQLPEKYKEIFFDQSKNGYAGYIDGGASQEEFYKFIKPILEKMDGTEELLVKLNREDLLRKQRTFDNGSIPHQIHLGELHAILRRQEDFYPFLKDNREKIEKILTFRIPYYVGPLARGNSRFAWMTRKSEETITPWNFEEVVDKGASAQSFIERMTNFDKNLPNEKVLPKHSLLYEYFTVYNELTKVKYVTEGMRKPAFLSGEQKKAIVDLLFKTNRKVTVKQLKEDYFKKIECFDSVEISGVEDRFNASLGTYHDLLKIIKDKDFLDNEENEDILEDIVLTLTLFEDREMIEERLKTYAHLFDDKVMKQLKRRRYTGWGRLSRKLINGIRDKQSGKTILDFLKSDGFANRNFMQLIHDDSLTFKEDIQKAQVSGQGDSLHEHIANLAGSPAIKKGILQTVKVVDELVKVMGRHKPENIVIEMARENQTTQKGQKNSRERMKRIEEGIKELGSQILKEHPVENTQLQNEKLYLYYLQNGRDMYVDQELDINRLSDYDVDHIVPQSFLKDDSIDNKVLTRSDKARGKSDNVPSEEVVKKMKNYWRQLLNAKLITQRKFDNLTKAERGGLSELDKAGFIKRQLVETRQITKHVAQILDSRMNTKYDENDKLIREVKVITLKSKLVSDFRKDFQFYKVREINNYHHAHDAYLNAVVGTALIKKYPKLESEFVYGDYKVYDVRKMIAKSEQEIGKATAKYFFYSNIMNFFKTEITLANGEIRKRPLIETNGETGEIVWDKGRDFATVRKVLSMPQVNIVKKTEVQTGGFSKESILPKRNSDKLIARKKDWDPKKYGGFDSPTVAYSVLVVAKVEKGKSKKLKSVKELLGITIMERSSFEKNPIDFLEAKGYKEVKKDLIIKLPKYSLFELENGRKRMLASAGELQKGNELALPSKYVNFLYLASHYEKLKGSPEDNEQKQLFVEQHKHYLDEIIEQISEFSKRVILADANLDKVLSAYNKHRDKPIREQAENIIHLFTLTNLGAPAAFKYFDTTIDRKRYTSTKEVLDATLIHQSITGLYETRIDLSQLGGDGGEAAAKGSSGGVLNLEEEYRLHEKPVPSSIDPSWLQLFPTVWAERAGMGLANQVPPVVVELRSGASPVAVRQYPMSKEAREGIRPHIQKFLDLGVLVPCRSPWNTPLLPVKKPGTNDYRPVQDLREINKRVQDIHPTVPNPYNLLSSLPPSYTWYSVLDLKDAFFCLRLHPNSQPLFAFEWKDPEKGNTGQLTWTRLPQGFKNSPTLFNEALHRDLAPFRALNPQVVLLQYVDDLLVAAPTYEDCKKGTQKLLQELSKLGYRVSAKKAQLCQREVTYLGYLLKEGKRWLTPARKATVMKIPVPTTPRQVREFLGKAGFCRLFIPGFASLAAPLYPLTKPSIPFIWTEEHQQAFDHIKKALLSAPALALPDLTKPFTLYIDERAGVARGVLTQTLGPWRRPVAYLSKKLDPVASGWPTCLKAVAAVALLLKDADKLTLGQNVTVIASHSLESIVRQPPDRWMTNARMTHYQSLLLNERVSFAPPAVLNPATLLPVESEATPVHRCSEILAEETGTRRDLEDQPLPGVPTWYTDGSSFITEGKRRAGAPIVDGKRTVWASSLPEGTSAQKAELVALTQALRLAEGKNINIYTDSRYAFATAHIHGAIYKQRGWLTSAGKDIKNKEEILALLEAIHLPRRVAIIHCPGHQRGSNPVATGNRRADEAAKQAALSTRVLAGTTKPAGKRTADGSEFEKRTADGSEFESPKKKAKVE

SEQ ID NO: 6736 - protein, 2215 aa, synthetic construct
MPAAKRVKLDGGDKKYSIGLDIGTNSVGWAVITDEYKVPSKKFKVLGNTDRHSIKKNLIGALLFDSGETAEATRLKRTARRRYTRRKNRICYLQEIFSNEMAKVDDSFFHRLEESFLVEEDKKHERHPIFGNIVDEVAYHEKYPTIYHLRKKLVDSTDKADLRLIYLALAHMIKFRGHFLIEGDLNPDNSDVDKLFIQLVQTYNQLFEENPINASGVDAKAILSARLSKSRRLENLIAQLPGEKKNGLFGNLIALSLGLTPNFKSNFDLAEDAKLQLSKDTYDDDLDNLLAQIGDQYADLFLAAKNLSDAILLSDILRVNTEITKAPLSASMIKRYDEHHQDLTLLKALVRQQLPEKYKEIFFDQSKNGYAGYIDGGASQEEFYKFIKPILEKMDGTEELLVKLNREDLLRKQRTFDNGSIPHQIHLGELHAILRRQEDFYPFLKDNREKIEKILTFRIPYYVGPLARGNSRFAWMTRKSEETITPWNFEEVVDKGASAQSFIERMTNFDKNLPNEKVLPKHSLLYEYFTVYNELTKVKYVTEGMRKPAFLSGEQKKAIVDLLFKTNRKVTVKQLKEDYFKKIECFDSVEISGVEDRFNASLGTYHDLLKIIKDKDFLDNEENEDILEDIVLTLTLFEDREMIEERLKTYAHLFDDKVMKQLKRRRYTGWGRLSRKLINGIRDKQSGKTILDFLKSDGFANRNFMQLIHDDSLTFKEDIQKAQVSGQGDSLHEHIANLAGSPAIKKGILQTVKVVDELVKVMGRHKPENIVIEMARENQTTQKGQKNSRERMKRIEEGIKELGSQILKEHPVENTQLQNEKLYLYYLQNGRDMYVDQELDINRLSDYDVDHIVPQSFLKDDSIDNKVLTRSDKARGKSDNVPSEEVVKKMKNYWRQLLNAKLITQRKFDNLTKAERGGLSELDKAGFIKRQLVETRQITKHVAQILDSRMNTKYDENDKLIREVKVITLKSKLVSDFRKDFQFYKVREINNYHHAHDAYLNAVVGTALIKKYPKLESEFVYGDYKVYDVRKMIAKSEQEIGKATAKYFFYSNIMNFFKTEITLANGEIRKRPLIETNGETGEIVWDKGRDFATVRKVLSMPQVNIVKKTEVQTGGFSKESILPKRNSDKLIARKKDWDPKKYGGFDSPTVAYSVLVVAKVEKGKSKKLKSVKELLGITIMERSSFEKNPIDFLEAKGYKEVKKDLIIKLPKYSLFELENGRKRMLASAGELQKGNELALPSKYVNFLYLASHYEKLKGSPEDNEQKQLFVEQHKHYLDEIIEQISEFSKRVILADANLDKVLSAYNKHRDKPIREQAENIIHLFTLTNLGAPAAFKYFDTTIDRKRYTSTKEVLDATLIHQSITGLYETRIDLSQLGGDGGEAAAKGSSGGTLGDQGSRGSDPLPEPRVTLTVEGIPTEFLVNTGAEHSVLTKPMGKMGSKRTVVAGATGSKVYPWTTKRLLKIGQKQVTHSFLVIPECPAPLLGRDLLTKLKAQIQFSTEGPQVTWEDRPAMCLVLNLEEEYRLHEKPVPPSIDPSWLQLFPMVWAEKAGMGLANQVPPVVVELKSDASPVAVRQYPMSKEAREGIRPHIQRFLDLGILVPCQSPWNTPLLPVKKPGTNDYRPVQDLREVNKRVQDIHPTVPNPYNLLSSLPPSHTWYSVLDLKDAFFCLKLHPNSQPLFAFEWRDPEKGNTGQLTWTRLPQGFKNSPTLFNEALHRDLASFRALNPQVVMLQYVDDLLVAAPTYRDCKEGTRRLLQELSKLGYRVSAKKAQLCREEVTYLGYLLKGGKRWLTPARKATVMKIPTPTTPRQVREFLGKAGFCRLFIPGFASLAAPLYPLTRPKVPFTWTEAHQEAFGRIKEALLSAPALALPDLTKPFALYVDEKEGVARGVLTQTLGPWRRPVAYLSKKLDPVASGWPTCLKAIAAVALLLKDADKLTLGQNVLVIAPHNLESIVRQPPDRWMTNARMTHYQSLLLNERVSFAPPAILNPATLLPVESDDTPIHICSEILAEETGTRPDLRDQPLPGVPAWYTDGSSFIMDGRRQAGAAIVDNKRTVWASNLPEGTSAQKAELIALTQALRLAEGKSINIYTDSRYAFATAHVHGAIYKQRGWLTSAGKDIKNKEEILALLEAIHLPKRVAIIHCPGHQRGTDPVATGNRKADEAAKQAAQSTRILTETTKNAGKRTADGSEFEKRTADGSEFESPKKKAKVE

SEQ ID NO: 6737 - protein, 2093 aa, synthetic construct
MPAAKRVKLDGGDKKYSIGLDIGTNSVGWAVITDEYKVPSKKFKVLGNTDRHSIKKNLIGALLFDSGETAEATRLKRTARRRYTRRKNRICYLQEIFSNEMAKVDDSFFHRLEESFLVEEDKKHERHPIFGNIVDEVAYHEKYPTIYHLRKKLVDSTDKADLRLIYLALAHMIKFRGHFLIEGDLNPDNSDVDKLFIQLVQTYNQLFEENPINASGVDAKAILSARLSKSRRLENLIAQLPGEKKNGLFGNLIALSLGLTPNFKSNFDLAEDAKLQLSKDTYDDDLDNLLAQIGDQYADLFLAAKNLSDAILLSDILRVNTEITKAPLSASMIKRYDEHHQDLTLLKALVRQQLPEKYKEIFFDQSKNGYAGYIDGGASQEEFYKFIKPILEKMDGTEELLVKLNREDLLRKQRTFDNGSIPHQIHLGELHAILRRQEDFYPFLKDNREKIEKILTFRIPYYVGPLARGNSRFAWMTRKSEETITPWNFEEVVDKGASAQSFIERMTNFDKNLPNEKVLPKHSLLYEYFTVYNELTKVKYVTEGMRKPAFLSGEQKKAIVDLLFKTNRKVTVKQLKEDYFKKIECFDSVEISGVEDRFNASLGTYHDLLKIIKDKDFLDNEENEDILEDIVLTLTLFEDREMIEERLKTYAHLFDDKVMKQLKRRRYTGWGRLSRKLINGIRDKQSGKTILDFLKSDGFANRNFMQLIHDDSLTFKEDIQKAQVSGQGDSLHEHIANLAGSPAIKKGILQTVKVVDELVKVMGRHKPENIVIEMARENQTTQKGQKNSRERMKRIEEGIKELGSQILKEHPVENTQLQNEKLYLYYLQNGRDMYVDQELDINRLSDYDVDHIVPQSFLKDDSIDNKVLTRSDKARGKSDNVPSEEVVKKMKNYWRQLLNAKLITQRKFDNLTKAERGGLSELDKAGFIKRQLVETRQITKHVAQILDSRMNTKYDENDKLIREVKVITLKSKLVSDFRKDFQFYKVREINNYHHAHDAYLNAVVGTALIKKYPKLESEFVYGDYKVYDVRKMIAKSEQEIGKATAKYFFYSNIMNFFKTEITLANGEIRKRPLIETNGETGEIVWDKGRDFATVRKVLSMPQVNIVKKTEVQTGGFSKESILPKRNSDKLIARKKDWDPKKYGGFDSPTVAYSVLVVAKVEKGKSKKLKSVKELLGITIMERSSFEKNPIDFLEAKGYKEVKKDLIIKLPKYSLFELENGRKRMLASAGELQKGNELALPSKYVNFLYLASHYEKLKGSPEDNEQKQLFVEQHKHYLDEIIEQISEFSKRVILADANLDKVLSAYNKHRDKPIREQAENIIHLFTLTNLGAPAAFKYFDTTIDRKRYTSTKEVLDATLIHQSITGLYETRIDLSQLGGDGGEAAAKGSSGGTLNLEDEYRLYETSAEPEVSPGSTWLSDFPQAWAETGGMGLAVRQAPLIIPLKATSTPVSIKQYPMSQEAKLGIKPHIQRLLDQGILVPCQSPWNTPLLPVKKPGTNDYRPVQDLREVNKRVEDIHPTVPNPYNLLSGLPPSHRWYTVLDLKDAFFCLRLHPTSQPLFAFEWRDPGMGISGQLTWTRLPQGFKNSPTLFNEALHRDLADFRIQHPDLILLQYVDDILLAATSELDCQQGTRALLLTLGNLGYRASAKKAQLCQKQVKYLGYLLKEGQRWLTEARKETVMGQPTPKTPRQLREFLGTAGFCRLWIPGFAEMAAPLYPLTKPGTLFNWGPDQQKAYQEIKQALLTAPALGLPDLTKPFELFVDEKQGYAKGVLTQKLGPWRRPVAYLSKKLDPVAAGWPPCLRMVAAIAVLRKDAGKLTMGQPLVILAPHAVEALVKQPPDRWLSNARMTHYQAMLLDTDRVQFGPVVALNPATLLPLPEEGAPHDCLEILAETHGTRPDLTDQPIPDADHTWYTDGSSFLQEGQRKAGAAVTTETEVIWARALPAGTSAQRAELIALTQALKMAEGKRLNVYTDSRYAFATAHIHGEIYRRRGWLTSEGREIKNKSEILALLKALFLPKRLSIIHCLGHQKGDSAEARGNRLADQAAREAAIKTPPDTSTLLAGKRTADGSEFEKRTADGSEFESPKKKAKVE

SEQ ID NO: 6738 - protein, 2093 aa, synthetic construct; identical to SEQ ID NO: 4512

SEQ ID NO: 6739 - protein, 2093 aa, synthetic construct
MPAAKRVKLDGGDKKYSIGLDIGTNSVGWAVITDEYKVPSKKFKVLGNTDRHSIKKNLIGALLFDSGETAEATRLKRTARRRYTRRKNRICYLQEIFSNEMAKVDDSFFHRLEESFLVEEDKKHERHPIFGNIVDEVAYHEKYPTIYHLRKKLVDSTDKADLRLIYLALAHMIKFRGHFLIEGDLNPDNSDVDKLFIQLVQTYNQLFEENPINASGVDAKAILSARLSKSRRLENLIAQLPGEKKNGLFGNLIALSLGLTPNFKSNFDLAEDAKLQLSKDTYDDDLDNLLAQIGDQYADLFLAAKNLSDAILLSDILRVNTEITKAPLSASMIKRYDEHHQDLTLLKALVRQQLPEKYKEIFFDQSKNGYAGYIDGGASQEEFYKFIKPILEKMDGTEELLVKLNREDLLRKQRTFDNGSIPHQIHLGELHAILRRQEDFYPFLKDNREKIEKILTFRIPYYVGPLARGNSRFAWMTRKSEETITPWNFEEVVDKGASAQSFIERMTNFDKNLPNEKVLPKHSLLYEYFTVYNELTKVKYVTEGMRKPAFLSGEQKKAIVDLLFKTNRKVTVKQLKEDYFKKIECFDSVEISGVEDRFNASLGTYHDLLKIIKDKDFLDNEENEDILEDIVLTLTLFEDREMIEERLKTYAHLFDDKVMKQLKRRRYTGWGRLSRKLINGIRDKQSGKTILDFLKSDGFANRNFMQLIHDDSLTFKEDIQKAQVSGQGDSLHEHIANLAGSPAIKKGILQTVKVVDELVKVMGRHKPENIVIEMARENQTTQKGQKNSRERMKRIEEGIKELGSQILKEHPVENTQLQNEKLYLYYLQNGRDMYVDQELDINRLSDYDVDHIVPQSFLKDDSIDNKVLTRSDKARGKSDNVPSEEVVKKMKNYWRQLLNAKLITQRKFDNLTKAERGGLSELDKAGFIKRQLVETRQITKHVAQILDSRMNTKYDENDKLIREVKVITLKSKLVSDFRKDFQFYKVREINNYHHAHDAYLNAVVGTALIKKYPKLESEFVYGDYKVYDVRKMIAKSEQEIGKATAKYFFYSNIMNFFKTEITLANGEIRKRPLIETNGETGEIVWDKGRDFATVRKVLSMPQVNIVKKTEVQTGGFSKESILPKRNSDKLIARKKDWDPKKYGGFDSPTVAYSVLVVAKVEKGKSKKLKSVKELLGITIMERSSFEKNPIDFLEAKGYKEVKKDLIIKLPKYSLFELENGRKRMLASAGELQKGNELALPSKYVNFLYLASHYEKLKGSPEDNEQKQLFVEQHKHYLDEIIEQISEFSKRVILADANLDKVLSAYNKHRDKPIREQAENIIHLFTLTNLGAPAAFKYFDTTIDRKRYTSTKEVLDATLIHQSITGLYETRIDLSQLGGDGGEAAAKGSSGGTLGIEDEYRLHETSTEPDVSLGSTWLSDFPQAWAETGGMGLAVRQAPLIIPLKATSTPVSIQQYPMSHEARLGIKPHIQRLLDQGILVPCQSPWNTPLLPVKKPGTNDYRPVQDLREVNKRVEDIHPTVPNPYNLLSGLPPSHQWYTVLDLKDAFFCLRLHPTSQPLFAFEWRDPGMGISGQLTWTRLPQGFKNSPTLFDEALHRDLADFRIQHPDLILLQYVDDILLAATSELDCQQGTRALLQTLGDLGYRASAKKAQICQKQVKYLGYLLREGQRWLTEARKETVMGQPVPKTPRQLREFLGTAGFCRLWIPGFAEMAAPLYPLTKTGTLFSWGPDQQKAYQEIKQALLTAPALGLPDLTKPFELFVDEKQGYAKGVLTQKLGPWRRPVAYLSKKLDPVAAGWPPCLRMVAAIAVLTKDAGKLTMGQPLVILAPHAVEALVKQPPDRWLSNARMTHYQAMLLDTDRVQFGPVVALNPATLLPLPEEGAPHDCLEILAETHGTRPDLTDQPIPDADHTWYTDGSSFLQEGQRKAGAAVTTETEVIWAGALPAGTSAQRAELIALTQALKMAEGKRLNVYTDSRYAFATAHIHGEIYRRRGLLTSEGREIKNKSEILALLKALFLPKRLSIIHCLGHQKGDSAEARGNRLADQAAREAAIKTPPDTSTLLAGKRTADGSEFEKRTADGSEFESPKKKAKVE

SEQ ID NO: 6740 - protein, 2093 aa, synthetic construct
MPAAKRVKLDGGDKKYSIGLDIGTNSVGWAVITDEYKVPSKKFKVLGNTDRHSIKKNLIGALLFDSGETAEATRLKRTARRRYTRRKNRICYLQEIFSNEMAKVDDSFFHRLEESFLVEEDKKHERHPIFGNIVDEVAYHEKYPTIYHLRKKLVDSTDKADLRLIYLALAHMIKFRGHFLIEGDLNPDNSDVDKLFIQLVQTYNQLFEENPINASGVDAKAILSARLSKSRRLENLIAQLPGEKKNGLFGNLIALSLGLTPNFKSNFDLAEDAKLQLSKDTYDDDLDNLLAQIGDQYADLFLAAKNLSDAILLSDILRVNTEITKAPLSASMIKRYDEHHQDLTLLKALVRQQLPEKYKEIFFDQSKNGYAGYIDGGASQEEFYKFIKPILEKMDGTEELLVKLNREDLLRKQRTFDNGSIPHQIHLGELHAILRRQEDFYPFLKDNREKIEKILTFRIPYYVGPLARGNSRFAWMTRKSEETITPWNFEEVVDKGASAQSFIERMTNFDKNLPNEKVLPKHSLLYEYFTVYNELTKVKYVTEGMRKPAFLSGEQKKAIVDLLFKTNRKVTVKQLKEDYFKKIECFDSVEISGVEDRFNASLGTYHDLLKIIKDKDFLDNEENEDILEDIVLTLTLFEDREMIEERLKTYAHLFDDKVMKQLKRRRYTGWGRLSRKLINGIRDKQSGKTILDFLKSDGFANRNFMQLIHDDSLTFKEDIQKAQVSGQGDSLHEHIANLAGSPAIKKGILQTVKVVDELVKVMGRHKPENIVIEMARENQTTQKGQKNSRERMKRIEEGIKELGSQILKEHPVENTQLQNEKLYLYYLQNGRDMYVDQELDINRLSDYDVDHIVPQSFLKDDSIDNKVLTRSDKARGKSDNVPSEEVVKKMKNYWRQLLNAKLITQRKFDNLTKAERGGLSELDKAGFIKRQLVETRQITKHVAQILDSRMNTKYDENDKLIREVKVITLKSKLVSDFRKDFQFYKVREINNYHHAHDAYLNAVVGTALIKKYPKLESEFVYGDYKVYDVRKMIAKSEQEIGKATAKYFFYSNIMNFFKTEITLANGEIRKRPLIETNGETGEIVWDKGRDFATVRKVLSMPQVNIVKKTEVQTGGFSKESILPKRNSDKLIARKKDWDPKKYGGFDSPTVAYSVLVVAKVEKGKSKKLKSVKELLGITIMERSSFEKNPIDFLEAKGYKEVKKDLIIKLPKYSLFELENGRKRMLASAGELQKGNELALPSKYVNFLYLASHYEKLKGSPEDNEQKQLFVEQHKHYLDEIIEQISEFSKRVILADANLDKVLSAYNKHRDKPIREQAENIIHLFTLTNLGAPAAFKYFDTTIDRKRYTSTKEVLDATLIHQSITGLYETRIDLSQLGGDGGEAAAKGSSGGTLNIEDEYRLHEISTEPDVSPGSTWLSDFPQAWAETGGMGLAVRQAPLIIPLKATSTPVSIKQYPMSQEAKLGIKPHIQRLLDQGILVPCQSPWNTPLLPVKKPGTNDYRPVQGLREVNKRVEDIHPTVPNPYNLLSGLPTSHRWYTVLDLKDAFFCLRLHPTSQPLFASEWRDPGMGISGQLTWTRLPQGFKNSPTLFNEALHRGLADFRIQHPDLILLQYVDDLLLAATSELDCQQGTRALLKTLGNLGYRASAKKAQICQKQVKYLGYLLREGQRWLTEARKETVMGQPTPKTPRQLREFLGTAGFCRLWIPRFAEMAAPLYPLTKPGTLFNWGPDQQKAYHEIKQALLTAPALGLPDLTKPFELFVDEKQGYAKGVLTQKLGPWRRPVAYLSKKLDPVAAGWPPCLRMVAAIAVLTKDAGKLTMGQPLVILAPHAVEALVKQPPDRWLSNARMTHYQAMLLDTDRVQFGPVVALNPATLLPLPEEGAPHDCLEILAETHGTEPDLTDQPIPDADHTWYTDGSSFLQEGQRKAGAAVTTETEVIWARALPAGTSAQRAELIALTQALKMAEGKRLNVYTDSRYAFATAHIHGEIYKRRGWLTSEGREIKNKSEILALLKALFLPKRLSIIHCLGHQKGDSAEARGNRLADQAAREAAIKTPPDTSTLLAGKRTADGSEFEKRTADGSEFESPKKKAKVE

SEQ ID NO: 6741 - protein, 2087 aa, synthetic construct
MPAAKRVKLDGGDKKYSIGLDIGTNSVGWAVITDEYKVPSKKFKVLGNTDRHSIKKNLIGALLFDSGETAEATRLKRTARRRYTRRKNRICYLQEIFSNEMAKVDDSFFHRLEESFLVEEDKKHERHPIFGNIVDEVAYHEKYPTIYHLRKKLVDSTDKADLRLIYLALAHMIKFRGHFLIEGDLNPDNSDVDKLFIQLVQTYNQLFEENPINASGVDAKAILSARLSKSRRLENLIAQLPGEKKNGLFGNLIALSLGLTPNFKSNFDLAEDAKLQLSKDTYDDDLDNLLAQIGDQYADLFLAAKNLSDAILLSDILRVNTEITKAPLSASMIKRYDEHHQDLTLLKALVRQQLPEKYKEIFFDQSKNGYAGYIDGGASQEEFYKFIKPILEKMDGTEELLVKLNREDLLRKQRTFDNGSIPHQIHLGELHAILRRQEDFYPFLKDNREKIEKILTFRIPYYVGPLARGNSRFAWMTRKSEETITPWNFEEVVDKGASAQSFIERMTNFDKNLPNEKVLPKHSLLYEYFTVYNELTKVKYVTEGMRKPAFLSGEQKKAIVDLLFKTNRKVTVKQLKEDYFKKIECFDSVEISGVEDRFNASLGTYHDLLKIIKDKDFLDNEENEDILEDIVLTLTLFEDREMIEERLKTYAHLFDDKVMKQLKRRRYTGWGRLSRKLINGIRDKQSGKTILDFLKSDGFANRNFMQLIHDDSLTFKEDIQKAQVSGQGDSLHEHIANLAGSPAIKKGILQTVKVVDELVKVMGRHKPENIVIEMARENQTTQKGQKNSRERMKRIEEGIKELGSQILKEHPVENTQLQNEKLYLYYLQNGRDMYVDQELDINRLSDYDVDHIVPQSFLKDDSIDNKVLTRSDKARGKSDNVPSEEVVKKMKNYWRQLLNAKLITQRKFDNLTKAERGGLSELDKAGFIKRQLVETRQITKHVAQILDSRMNTKYDENDKLIREVKVITLKSKLVSDFRKDFQFYKVREINNYHHAHDAYLNAVVGTALIKKYPKLESEFVYGDYKVYDVRKMIAKSEQEIGKATAKYFFYSNIMNFFKTEITLANGEIRKRPLIETNGETGEIVWDKGRDFATVRKVLSMPQVNIVKKTEVQTGGFSKESILPKRNSDKLIARKKDWDPKKYGGFDSPTVAYSVLVVAKVEKGKSKKLKSVKELLGITIMERSSFEKNPIDFLEAKGYKEVKKDLIIKLPKYSLFELENGRKRMLASAGELQKGNELALPSKYVNFLYLASHYEKLKGSPEDNEQKQLFVEQHKHYLDEIIEQISEFSKRVILADANLDKVLSAYNKHRDKPIREQAENIIHLFTLTNLGAPAAFKYFDTTIDRKRYTSTKEVLDATLIHQSITGLYETRIDLSQLGGDGGEAAAKGSSGGTLQLDDEYRLYSPLVKPDQNIQFWLEQFPQAWAETAGMGLAKQVPPQVIQLKASATPVSVRQYPLSKEAQEGIRPHVQRLIQQGILVPVQSPWNTPLLPVRKPGTNDYRPVQDLREVNKRVQDIHPTVPNPYNLLCALPPQRSWYTVLDLKDAFFCLRLHPTSQPLFAFEWRDPGTGRTGQLTWTRLPQGFKNSPTIFDEALHRDLANFRIQHPQVTLLQYVDDLLLAGATKQDCLEGTKALLLELSDLGYRASAKKAQICRREVTYLGYSLRDGQRWLTEARKKTVVQIPAPTTAKQVREFLGTAGFCRLWIPGFATLAAPLYPLTKEKGEFSWAPEHQKAFDAIKKALLSAPALALPDVTKPFTLYVDERKGVARGVLTQTLGPWRRPVAYLSKKLDPVASGWPVCLKAIAAVAILVKDADKLTLGQNITVIAPHALENIVRQPPDRWMTNARMTHYQSLLLTERVTFAPPAALNPATLLPEETDEPVTHDCHQLLIEETGVRKDLTDIPLTGEVLTWFTDGSSYVVEGKRMAGAAVVDGTRTIWASSLPEGTSAQKAELMALTQALRLAEGKSINIYTDSRYAFATAHVHGAIYKQRGLLTSAGREIKNKEEILSLLEALHLPKRLAIIHCPGHQKAKDPISRGNQMADRVAKQAAQGVNLLAGKRTADGSEFEKRTADGSEFESPKKKAKVE

SEQ ID NO: 6742 - protein, 2014 aa, synthetic construct
MPAAKRVKLDGGDKKYSIGLDIGTNSVGWAVITDEYKVPSKKFKVLGNTDRHSIKKNLIGALLFDSGETAEATRLKRTARRRYTRRKNRICYLQEIFSNEMAKVDDSFFHRLEESFLVEEDKKHERHPIFGNIVDEVAYHEKYPTIYHLRKKLVDSTDKADLRLIYLALAHMIKFRGHFLIEGDLNPDNSDVDKLFIQLVQTYNQLFEENPINASGVDAKAILSARLSKSRRLENLIAQLPGEKKNGLFGNLIALSLGLTPNFKSNFDLAEDAKLQLSKDTYDDDLDNLLAQIGDQYADLFLAAKNLSDAILLSDILRVNTEITKAPLSASMIKRYDEHHQDLTLLKALVRQQLPEKYKEIFFDQSKNGYAGYIDGGASQEEFYKFIKPILEKMDGTEELLVKLNREDLLRKQRTFDNGSIPHQIHLGELHAILRRQEDFYPFLKDNREKIEKILTFRIPYYVGPLARGNSRFAWMTRKSEETITPWNFEEVVDKGASAQSFIERMTNFDKNLPNEKVLPKHSLLYEYFTVYNELTKVKYVTEGMRKPAFLSGEQKKAIVDLLFKTNRKVTVKQLKEDYFKKIECFDSVEISGVEDRFNASLGTYHDLLKIIKDKDFLDNEENEDILEDIVLTLTLFEDREMIEERLKTYAHLFDDKVMKQLKRRRYTGWGRLSRKLINGIRDKQSGKTILDFLKSDGFANRNFMQLIHDDSLTFKEDIQKAQVSGQGDSLHEHIANLAGSPAIKKGILQTVKVVDELVKVMGRHKPENIVIEMARENQTTQKGQKNSRERMKRIEEGIKELGSQILKEHPVENTQLQNEKLYLYYLQNGRDMYVDQELDINRLSDYDVDHIVPQSFLKDDSIDNKVLTRSDKARGKSDNVPSEEVVKKMKNYWRQLLNAKLITQRKFDNLTKAERGGLSELDKAGFIKRQLVETRQITKHVAQILDSRMNTKYDENDKLIREVKVITLKSKLVSDFRKDFQFYKVREINNYHHAHDAYLNAVVGTALIKKYPKLESEFVYGDYKVYDVRKMIAKSEQEIGKATAKYFFYSNIMNFFKTEITLANGEIRKRPLIETNGETGEIVWDKGRDFATVRKVLSMPQVNIVKKTEVQTGGFSKESILPKRNSDKLIARKKDWDPKKYGGFDSPTVAYSVLVVAKVEKGKSKKLKSVKELLGITIMERSSFEKNPIDFLEAKGYKEVKKDLIIKLPKYSLFELENGRKRMLASAGELQKGNELALPSKYVNFLYLASHYEKLKGSPEDNEQKQLFVEQHKHYLDEIIEQISEFSKRVILADANLDKVLSAYNKHRDKPIREQAENIIHLFTLTNLGAPAAFKYFDTTIDRKRYTSTKEVLDATLIHQSITGLYETRIDLSQLGGDGGEAAAKGSSGGPRSRAIDIPVPHADKISWKITDPVWVDQWPLTYEKTLAAIALVQEQLAAGHIEPTNSPWNTPIFIIKKKSGSWRLLQDLRAVNKVMVPMGALQPGLPSPVAPPLNYHKIVIDLKDCFFTIPLHPEDRPYFAFSVPQINFQSPMPRYQWKVLPQGMANSPTLCQKFVAAAIAPVRSQWPEAYILHYMDDILLACDSAEAAKACYAHIISCLTSYGLKIAPDKVQVSEPFSYLGFELHHQQVFTPRVCLKTDHLKTLNDFQKLLGDIQWLRPYLKLPTSALVPLNNILKPDPNPLSVRALTPEAKQSLALINKAIQNQSVQQISYNLPLVLLLLPTPHTPTAVFWQPNGTDPTKNGSPLLWLHLPASPSKVLLTYPSLLAMLIIKGRYTGRQLFGRDPHSIIIPYTQDQLTWLLQTSDEWAIALSSFTGDIDNHYPSDPVIQFAKLHQFIFPKITKCAPIPQATLVFTDGSSNGIAAYVIDNQPISIKSPYLSAQLVELYAILQVFTVLAHQPFNLYTDSAYIAQSVPLLETVPFIKSSTNATPLFSKLQQLILNRQHPFFIGHLRAHLNLPGPLAEGNALADAATQIFPIISDAGKRTADGSEFEKRTADGSEFESPKKKAKVE

SEQ ID NO: 6743 - protein, 2072 aa, synthetic construct
MPAAKRVKLDGGDKKYSIGLDIGTNSVGWAVITDEYKVPSKKFKVLGNTDRHSIKKNLIGALLFDSGETAEATRLKRTARRRYTRRKNRICYLQEIFSNEMAKVDDSFFHRLEESFLVEEDKKHERHPIFGNIVDEVAYHEKYPTIYHLRKKLVDSTDKADLRLIYLALAHMIKFRGHFLIEGDLNPDNSDVDKLFIQLVQTYNQLFEENPINASGVDAKAILSARLSKSRRLENLIAQLPGEKKNGLFGNLIALSLGLTPNFKSNFDLAEDAKLQLSKDTYDDDLDNLLAQIGDQYADLFLAAKNLSDAILLSDILRVNTEITKAPLSASMIKRYDEHHQDLTLLKALVRQQLPEKYKEIFFDQSKNGYAGYIDGGASQEEFYKFIKPILEKMDGTEELLVKLNREDLLRKQRTFDNGSIPHQIHLGELHAILRRQEDFYPFLKDNREKIEKILTFRIPYYVGPLARGNSRFAWMTRKSEETITPWNFEEVVDKGASAQSFIERMTNFDKNLPNEKVLPKHSLLYEYFTVYNELTKVKYVTEGMRKPAFLSGEQKKAIVDLLFKTNRKVTVKQLKEDYFKKIECFDSVEISGVEDRFNASLGTYHDLLKIIKDKDFLDNEENEDILEDIVLTLTLFEDREMIEERLKTYAHLFDDKVMKQLKRRRYTGWGRLSRKLINGIRDKQSGKTILDFLKSDGFANRNFMQLIHDDSLTFKEDIQKAQVSGQGDSLHEHIANLAGSPAIKKGILQTVKVVDELVKVMGRHKPENIVIEMARENQTTQKGQKNSRERMKRIEEGIKELGSQILKEHPVENTQLQNEKLYLYYLQNGRDMYVDQELDINRLSDYDVDHIVPQSFLKDDSIDNKVLTRSDKARGKSDNVPSEEVVKKMKNYWRQLLNAKLITQRKFDNLTKAERGGLSELDKAGFIKRQLVETRQITKHVAQILDSRMNTKYDENDKLIREVKVITLKSKLVSDFRKDFQFYKVREINNYHHAHDAYLNAVVGTALIKKYPKLESEFVYGDYKVYDVRKMIAKSEQEIGKATAKYFFYSNIMNFFKTEITLANGEIRKRPLIETNGETGEIVWDKGRDFATVRKVLSMPQVNIVKKTEVQTGGFSKESILPKRNSDKLIARKKDWDPKKYGGFDSPTVAYSVLVVAKVEKGKSKKLKSVKELLGITIMERSSFEKNPIDFLEAKGYKEVKKDLIIKLPKYSLFELENGRKRMLASAGELQKGNELALPSKYVNFLYLASHYEKLKGSPEDNEQKQLFVEQHKHYLDEIIEQISEFSKRVILADANLDKVLSAYNKHRDKPIREQAENIIHLFTLTNLGAPAAFKYFDTTIDRKRYTSTKEVLDATLIHQSITGLYETRIDLSQLGGDGGEAAAKGSSGGSCQTKNTLNIDEYLLQFPDQLWASLPTDIGRMLVPPITIKIKDNASLPSIRQYPLPKDKTEGLRPLISSLENQGILIKCHSPCNTPIFPIKKAGRDEYRMIHDLRAINNIVAPLTAVVASPTTVLSNLAPSLHWFTVIDLSNAFFSVPIHKDSQYLFAFTFEGHQYTWTVLPQGFIHSPTLFSQALYQSLHKIKFKISSEICIYMDDVLIASKDRDTNLKDTAVMLQHLASEGHKVSKKKLQLCQQEVVYLGQLLTPEGRKILPDRKVTVSQFQQPTTIRQIRAFLGLVGYCRHWIPEFSIHSKFLEKQLKKDTAEPFQLDDQQVEAFNKLKHAITTAPVLVVPDPAKPFQLYTSHSEHASIAVLTQKHAGRTRPIAFLSSKFDAIESGLPPCLKACASIHRSLTQADSFILGAPLIIYTTHAICTLLQRDRSQLVTASRFSKWEADLLRPELTFVACSAVSPAHLYMQSCENNIPPHDCVLLTHTISRPRPDLSDLPIPDPDMTLFSDGSYTTGRGGAAVVMHRPVTDDFIIIHQQPGGASAQTAELLALAAACHLATDKTVNIYTDSRYAYGVVHDFGHLWMHRGFVTSAGTPIKNHKEIEYLLKQIMKPKQVSVIKIEAHTKGVSMEVRGNAAADEAAKNAVFLVQRAGKRTADGSEFEKRTADGSEFESPKKKAKVE

SEQ ID NO: 6744 - protein, 2093 aa, synthetic construct
MPAAKRVKLDGGDKKYSIGLDIGTNSVGWAVITDEYKVPSKKFKVLGNTDRHSIKKNLIGALLFDSGETAEATRLKRTARRRYTRRKNRICYLQEIFSNEMAKVDDSFFHRLEESFLVEEDKKHERHPIFGNIVDEVAYHEKYPTIYHLRKKLVDSTDKADLRLIYLALAHMIKFRGHFLIEGDLNPDNSDVDKLFIQLVQTYNQLFEENPINASGVDAKAILSARLSKSRRLENLIAQLPGEKKNGLFGNLIALSLGLTPNFKSNFDLAEDAKLQLSKDTYDDDLDNLLAQIGDQYADLFLAAKNLSDAILLSDILRVNTEITKAPLSASMIKRYDEHHQDLTLLKALVRQQLPEKYKEIFFDQSKNGYAGYIDGGASQEEFYKFIKPILEKMDGTEELLVKLNREDLLRKQRTFDNGSIPHQIHLGELHAILRRQEDFYPFLKDNREKIEKILTFRIPYYVGPLARGNSRFAWMTRKSEETITPWNFEEVVDKGASAQSFIERMTNFDKNLPNEKVLPKHSLLYEYFTVYNELTKVKYVTEGMRKPAFLSGEQKKAIVDLLFKTNRKVTVKQLKEDYFKKIECFDSVEISGVEDRFNASLGTYHDLLKIIKDKDFLDNEENEDILEDIVLTLTLFEDREMIEERLKTYAHLFDDKVMKQLKRRRYTGWGRLSRKLINGIRDKQSGKTILDFLKSDGFANRNFMQLIHDDSLTFKEDIQKAQVSGQGDSLHEHIANLAGSPAIKKGILQTVKVVDELVKVMGRHKPENIVIEMARENQTTQKGQKNSRERMKRIEEGIKELGSQILKEHPVENTQLQNEKLYLYYLQNGRDMYVDQELDINRLSDYDVDHIVPQSFLKDDSIDNKVLTRSDKARGKSDNVPSEEVVKKMKNYWRQLLNAKLITQRKFDNLTKAERGGLSELDKAGFIKRQLVETRQITKHVAQILDSRMNTKYDENDKLIREVKVITLKSKLVSDFRKDFQFYKVREINNYHHAHDAYLNAVVGTALIKKYPKLESEFVYGDYKVYDVRKMIAKSEQEIGKATAKYFFYSNIMNFFKTEITLANGEIRKRPLIETNGETGEIVWDKGRDFATVRKVLSMPQVNIVKKTEVQTGGFSKESILPKRNSDKLIARKKDWDPKKYGGFDSPTVAYSVLVVAKVEKGKSKKLKSVKELLGITIMERSSFEKNPIDFLEAKGYKEVKKDLIIKLPKYSLFELENGRKRMLASAGELQKGNELALPSKYVNFLYLASHYEKLKGSPEDNEQKQLFVEQHKHYLDEIIEQISEFSKRVILADANLDKVLSAYNKHRDKPIREQAENIIHLFTLTNLGAPAAFKYFDTTIDRKRYTSTKEVLDATLIHQSITGLYETRIDLSQLGGDGGEAAAKGSSGGTLNIEDEYRLHETSKEPDVPLGSTWLSDFPQAWAETGGMGLAVRQAPLIIPLKATSTPVSIKQYPMSQEARLGIKPHIQRLLDQGILVPCQSPWNTPLLPVKKPGTNDYRPVQDLREVNKRVEDIHPTVPNPYNLLSGLPPSHQWYTVLDLKDAFFCLRLHPTSQPLFAFEWRDPEMGISGQLTWTRLPQGFKNSPTLFNEALHRDLADFRIQHPDLILLQYVDDLLLAATSEQDCQRGTRALLQTLGNLGYRASAKKAQICQKQVKYLGYLLKEGQRWLTEARKETVMGQPTPKTPRQLREFLGTAGFCRLWIPGFAEMAAPLYPLTKPGTLFNWGPDQQKAYQEIKQALLTAPALGLPDLTKPFELFVDEKQGYAKGVLTQKLGPWRRPVAYLSKKLDPVAAGWPPCLRMVAAIAVLTKDAGKLTMGQPLVILAPHAVEALVKQPPDRWLSNARMTHYQAMLLDTDRVQFGPVVALNPATLLPLPEKEAPHDCLEILAETHGTRPDLTDQPIPDADYTWYTDGSSFLQEGQRRAGAAVTTETEVIWARALPAGTSAQRAELIALTQALKMAEGKKLNVYTDSRYAFATAHVHGEIYRRRGWLTSEGREIKNKNEILALLKALFLPKRLSIIHCPGHQKGNSAEARGNRMADQAAREAAMKAVLETSTLLAGKRTADGSEFEKRTADGSEFESPKKKAKVE

SEQ ID NO: 6745 - protein, 2093 aa, synthetic construct
MPAAKRVKLDGGDKKYSIGLDIGTNSVGWAVITDEYKVPSKKFKVLGNTDRHSIKKNLIGALLFDSGETAEATRLKRTARRRYTRRKNRICYLQEIFSNEMAKVDDSFFHRLEESFLVEEDKKHERHPIFGNIVDEVAYHEKYPTIYHLRKKLVDSTDKADLRLIYLALAHMIKFRGHFLIEGDLNPDNSDVDKLFIQLVQTYNQLFEENPINASGVDAKAILSARLSKSRRLENLIAQLPGEKKNGLFGNLIALSLGLTPNFKSNFDLAEDAKLQLSKDTYDDDLDNLLAQIGDQYADLFLAAKNLSDAILLSDILRVNTEITKAPLSASMIKRYDEHHQDLTLLKALVRQQLPEKYKEIFFDQSKNGYAGYIDGGASQEEFYKFIKPILEKMDGTEELLVKLNREDLLRKQRTFDNGSIPHQIHLGELHAILRRQEDFYPFLKDNREKIEKILTFRIPYYVGPLARGNSRFAWMTRKSEETITPWNFEEVVDKGASAQSFIERMTNFDKNLPNEKVLPKHSLLYEYFTVYNELTKVKYVTEGMRKPAFLSGEQKKAIVDLLFKTNRKVTVKQLKEDYFKKIECFDSVEISGVEDRFNASLGTYHDLLKIIKDKDFLDNEENEDILEDIVLTLTLFEDREMIEERLKTYAHLFDDKVMKQLKRRRYTGWGRLSRKLINGIRDKQSGKTILDFLKSDGFANRNFMQLIHDDSLTFKEDIQKAQVSGQGDSLHEHIANLAGSPAIKKGILQTVKVVDELVKVMGRHKPENIVIEMARENQTTQKGQKNSRERMKRIEEGIKELGSQILKEHPVENTQLQNEKLYLYYLQNGRDMYVDQELDINRLSDYDVDHIVPQSFLKDDSIDNKVLTRSDKARGKSDNVPSEEVVKKMKNYWRQLLNAKLITQRKFDNLTKAERGGLSELDKAGFIKRQLVETRQITKHVAQILDSRMNTKYDENDKLIREVKVITLKSKLVSDFRKDFQFYKVREINNYHHAHDAYLNAVVGTALIKKYPKLESEFVYGDYKVYDVRKMIAKSEQEIGKATAKYFFYSNIMNFFKTEITLANGEIRKRPLIETNGETGEIVWDKGRDFATVRKVLSMPQVNIVKKTEVQTGGFSKESILPKRNSDKLIARKKDWDPKKYGGFDSPTVAYSVLVVAKVEKGKSKKLKSVKELLGITIMERSSFEKNPIDFLEAKGYKEVKKDLIIKLPKYSLFELENGRKRMLASAGELQKGNELALPSKYVNFLYLASHYEKLKGSPEDNEQKQLFVEQHKHYLDEIIEQISEFSKRVILADANLDKVLSAYNKHRDKPIREQAENIIHLFTLTNLGAPAAFKYFDTTIDRKRYTSTKEVLDATLIHQSITGLYETRIDLSQLGGDGGGSSPAPGGTAPLEEEYRLFLEAPIQNVTLLEQWKREIPKVWAEINPPGLASTQAPIHVQLLSTALPVRVRQYPITLEAKRSLRETIRKFRAAGILRPVHSPWNTPLLPVRKSGTSEYRMVQDLREVNKRVETIHPTVPNPYTLLSLLPPDRIWYSVLDLKDAFFCIPLAPESQLIFAFEWADAEEGESGQLTWTRLPQGFKNSPTLFNEALNRDLQGFRLDHPSVSLLQYVDDLLIAADTQAACLSATRDLLMTLAELGYRVSGKKAQLCQEEVTYLGFKIHKGSRSLSNSRTQAILQIPVPKTKRQVREFLGTIGYCRLWIPGFAELAQPLYAATRPGNDPLVWGEKEEEAFQSLKLALTQPPALALPSLDKPFQLFVEETSGAAKGVLTQALGPWKRPVAYLSKRLDPVAAGWPRCLRAIAAAALLTREASKLTFGQDIEITSSHNLESLLRSPPDKWLTNARITQYQVLLLDPPRVRFKQTAALNPATLLPETDDTLPIHHCLDTLDSLTSTRPDLTDQPLAQAEATLFTDGSSYIRDGKRYAGAAVVTLDSVIWAEPLPIGTSAQKAELIALTKALEWSKDKSVNIYTDSRYAFATLHVHGMIYRERGWLTAGGKAIKNAPEILALLTAVWLPKRVAVMHCKGHQKDDAPTSTGNRRADEVAREVAIRPLSTQATISAGKRTADGSEFEKRTADGSEFESPKKKAKVE

SEQ ID NO: 6746 - protein, 2097 aa, synthetic construct
MPAAKRVKLDGGDKKYSIGLDIGTNSVGWAVITDEYKVPSKKFKVLGNTDRHSIKKNLIGALLFDSGETAEATRLKRTARRRYTRRKNRICYLQEIFSNEMAKVDDSFFHRLEESFLVEEDKKHERHPIFGNIVDEVAYHEKYPTIYHLRKKLVDSTDKADLRLIYLALAHMIKFRGHFLIEGDLNPDNSDVDKLFIQLVQTYNQLFEENPINASGVDAKAILSARLSKSRRLENLIAQLPGEKKNGLFGNLIALSLGLTPNFKSNFDLAEDAKLQLSKDTYDDDLDNLLAQIGDQYADLFLAAKNLSDAILLSDILRVNTEITKAPLSASMIKRYDEHHQDLTLLKALVRQQLPEKYKEIFFDQSKNGYAGYIDGGASQEEFYKFIKPILEKMDGTEELLVKLNREDLLRKQRTFDNGSIPHQIHLGELHAILRRQEDFYPFLKDNREKIEKILTFRIPYYVGPLARGNSRFAWMTRKSEETITPWNFEEVVDKGASAQSFIERMTNFDKNLPNEKVLPKHSLLYEYFTVYNELTKVKYVTEGMRKPAFLSGEQKKAIVDLLFKTNRKVTVKQLKEDYFKKIECFDSVEISGVEDRFNASLGTYHDLLKIIKDKDFLDNEENEDILEDIVLTLTLFEDREMIEERLKTYAHLFDDKVMKQLKRRRYTGWGRLSRKLINGIRDKQSGKTILDFLKSDGFANRNFMQLIHDDSLTFKEDIQKAQVSGQGDSLHEHIANLAGSPAIKKGILQTVKVVDELVKVMGRHKPENIVIEMARENQTTQKGQKNSRERMKRIEEGIKELGSQILKEHPVENTQLQNEKLYLYYLQNGRDMYVDQELDINRLSDYDVDHIVPQSFLKDDSIDNKVLTRSDKARGKSDNVPSEEVVKKMKNYWRQLLNAKLITQRKFDNLTKAERGGLSELDKAGFIKRQLVETRQITKHVAQILDSRMNTKYDENDKLIREVKVITLKSKLVSDFRKDFQFYKVREINNYHHAHDAYLNAVVGTALIKKYPKLESEFVYGDYKVYDVRKMIAKSEQEIGKATAKYFFYSNIMNFFKTEITLANGEIRKRPLIETNGETGEIVWDKGRDFATVRKVLSMPQVNIVKKTEVQTGGFSKESILPKRNSDKLIARKKDWDPKKYGGFDSPTVAYSVLVVAKVEKGKSKKLKSVKELLGITIMERSSFEKNPIDFLEAKGYKEVKKDLIIKLPKYSLFELENGRKRMLASAGELQKGNELALPSKYVNFLYLASHYEKLKGSPEDNEQKQLFVEQHKHYLDEIIEQISEFSKRVILADANLDKVLSAYNKHRDKPIREQAENIIHLFTLTNLGAPAAFKYFDTTIDRKRYTSTKEVLDATLIHQSITGLYETRIDLSQLGGDGGGSSPAPGGTVSLQDEHRLFDIPVTTSLPDVWLQDFPQAWAETGGLGRAKCQAPIIIDLKPTAVPVSIKQYPMSLEAHMGIRQHIIKFLELGVLRPCRSPWNTPLLPVKKPGTQDYRPVQDLREINKRTVDIHPTVPNPYNLLSTLKPDYSWYTVLDLKDAFFCLPLAPQSQELFAFEWKDPERGISGQLTWTRLPQGFKNSPTLFNEALHRDLTDFRTQHPEVTLLQYVDDLLLAAPTKKACTQGTRHLLQELGEKGYRASAKKAQICQTKVTYLGYILSEGKRWLTPGRIETVARIPPPRNPREVREFLGKAGFCRLFIPGFAELAAPLYALTKPSTPFTWQTEHQLAFEALKKALLSAPALGLPDTSKPFTLFLDERQGIAKGVLTQKLGPWKRPVAYLSKKLDPVAAGWPPCLRIMAATAMLVKDSAKLTLGQPLTVITPHTLEAIVRQPPDRWITNARLTHYQALLLDTDRVQFGPPVTLNPATLLPVPENQPSPHDCRQVLAETHGTREDLKDQELPDADHTWYTDGSSYLDSGTRRAGAAVVDGHNTIWAQSLPPGTSAQKAELIALTKALELSKGKKANIYTDSRYAFATAHTHGSIYERRGWLTSEGKEIKNKAEIIALLKALFLPQEVAIIHCPGHQKGQDPVAVGNRQADRVARQAAMAEVLTLATEPDNTSHITAGKRTADGSEFEKRTADGSEFESPKKKAKVE

SEQ ID NO: 6747 - protein, 2082 aa, synthetic construct
MPAAKRVKLDGGDKKYSIGLDIGTNSVGWAVITDEYKVPSKKFKVLGNTDRHSIKKNLIGALLFDSGETAEATRLKRTARRRYTRRKNRICYLQEIFSNEMAKVDDSFFHRLEESFLVEEDKKHERHPIFGNIVDEVAYHEKYPTIYHLRKKLVDSTDKADLRLIYLALAHMIKFRGHFLIEGDLNPDNSDVDKLFIQLVQTYNQLFEENPINASGVDAKAILSARLSKSRRLENLIAQLPGEKKNGLFGNLIALSLGLTPNFKSNFDLAEDAKLQLSKDTYDDDLDNLLAQIGDQYADLFLAAKNLSDAILLSDILRVNTEITKAPLSASMIKRYDEHHQDLTLLKALVRQQLPEKYKEIFFDQSKNGYAGYIDGGASQEEFYKFIKPILEKMDGTEELLVKLNREDLLRKQRTFDNGSIPHQIHLGELHAILRRQEDFYPFLKDNREKIEKILTFRIPYYVGPLARGNSRFAWMTRKSEETITPWNFEEVVDKGASAQSFIERMTNFDKNLPNEKVLPKHSLLYEYFTVYNELTKVKYVTEGMRKPAFLSGEQKKAIVDLLFKTNRKVTVKQLKEDYFKKIECFDSVEISGVEDRFNASLGTYHDLLKIIKDKDFLDNEENEDILEDIVLTLTLFEDREMIEERLKTYAHLFDDKVMKQLKRRRYTGWGRLSRKLINGIRDKQSGKTILDFLKSDGFANRNFMQLIHDDSLTFKEDIQKAQVSGQGDSLHEHIANLAGSPAIKKGILQTVKVVDELVKVMGRHKPENIVIEMARENQTTQKGQKNSRERMKRIEEGIKELGSQILKEHPVENTQLQNEKLYLYYLQNGRDMYVDQELDINRLSDYDVDHIVPQSFLKDDSIDNKVLTRSDKARGKSDNVPSEEVVKKMKNYWRQLLNAKLITQRKFDNLTKAERGGLSELDKAGFIKRQLVETRQITKHVAQILDSRMNTKYDENDKLIREVKVITLKSKLVSDFRKDFQFYKVREINNYHHAHDAYLNAVVGTALIKKYPKLESEFVYGDYKVYDVRKMIAKSEQEIGKATAKYFFYSNIMNFFKTEITLANGEIRKRPLIETNGETGEIVWDKGRDFATVRKVLSMPQVNIVKKTEVQTGGFSKESILPKRNSDKLIARKKDWDPKKYGGFDSPTVAYSVLVVAKVEKGKSKKLKSVKELLGITIMERSSFEKNPIDFLEAKGYKEVKKDLIIKLPKYSLFELENGRKRMLASAGELQKGNELALPSKYVNFLYLASHYEKLKGSPEDNEQKQLFVEQHKHYLDEIIEQISEFSKRVILADANLDKVLSAYNKHRDKPIREQAENIIHLFTLTNLGAPAAFKYFDTTIDRKRYTSTKEVLDATLIHQSITGLYETRIDLSQLGGDGGGSSPAPGGVPWILKKPLELTIKLDLEEQQGTLLNNSILSKKGKEELKQLFEKYSALWQSWENQVGHRRIRPHKIATGTVKPTPQKQYHINPKAKPDIQIVINDLLKQGVLIQKESTMNTPVYPVPKPNGRWRMVLDYRAVNKVTPLIAVQNQHSYGILGSLFKGRYKTTIDLSNGFWAHPIVPEDYWITAFTWQGKQYCWTVLPQGFLNSPGLFTGDVVDLLQGIPNVEVYVDDVYISHDSEKEHLEYLDILFNRLKEAGYIISLKKSNIANSIVDFLGFQITNEGRGLTDTFKEKLENITAPTTLKQLQSILGLLNFARNFIPDFTELIAPLYALIPKSTKNYVPWQIEHSTTLETLITKLNGAEYLQGRKGDKTLIMKVNASYTTGYIRYYNEGEKKPISYVSIVFSKTELKFTELEKLLTTVHKGLLKALDLSMGQNIHVYSPIVSMQNIQKTPQTAKKALASRWLSWLSYLEDPRIRFFYDPQMPALKDLPAVDTGKDNKKHPSNFQHIFYTDGSAITSPTKEGHLNAGMGIVYFINKDGNLQKQQEWSISLGNHTAQFAEIAAFEFALKKCLPLGGNILVVTDSNYVAKAYNEELDVWASNGFVNNRKKPLKHISKWKSVADLKRLRPDVVVTHEPGHQKLDSSPHAYGNNLADQLATQASFKVHAGKRTADGSEFEKRTADGSEFESPKKKAKVE

SEQ ID NO: 6748 - protein, 2090 aa, synthetic construct
MPAAKRVKLDGGDKKYSIGLDIGTNSVGWAVITDEYKVPSKKFKVLGNTDRHSIKKNLIGALLFDSGETAEATRLKRTARRRYTRRKNRICYLQEIFSNEMAKVDDSFFHRLEESFLVEEDKKHERHPIFGNIVDEVAYHEKYPTIYHLRKKLVDSTDKADLRLIYLALAHMIKFRGHFLIEGDLNPDNSDVDKLFIQLVQTYNQLFEENPINASGVDAKAILSARLSKSRRLENLIAQLPGEKKNGLFGNLIALSLGLTPNFKSNFDLAEDAKLQLSKDTYDDDLDNLLAQIGDQYADLFLAAKNLSDAILLSDILRVNTEITKAPLSASMIKRYDEHHQDLTLLKALVRQQLPEKYKEIFFDQSKNGYAGYIDGGASQEEFYKFIKPILEKMDGTEELLVKLNREDLLRKQRTFDNGSIPHQIHLGELHAILRRQEDFYPFLKDNREKIEKILTFRIPYYVGPLARGNSRFAWMTRKSEETITPWNFEEVVDKGASAQSFIERMTNFDKNLPNEKVLPKHSLLYEYFTVYNELTKVKYVTEGMRKPAFLSGEQKKAIVDLLFKTNRKVTVKQLKEDYFKKIECFDSVEISGVEDRFNASLGTYHDLLKIIKDKDFLDNEENEDILEDIVLTLTLFEDREMIEERLKTYAHLFDDKVMKQLKRRRYTGWGRLSRKLINGIRDKQSGKTILDFLKSDGFANRNFMQLIHDDSLTFKEDIQKAQVSGQGDSLHEHIANLAGSPAIKKGILQTVKVVDELVKVMGRHKPENIVIEMARENQTTQKGQKNSRERMKRIEEGIKELGSQILKEHPVENTQLQNEKLYLYYLQNGRDMYVDQELDINRLSDYDVDHIVPQSFLKDDSIDNKVLTRSDKARGKSDNVPSEEVVKKMKNYWRQLLNAKLITQRKFDNLTKAERGGLSELDKAGFIKRQLVETRQITKHVAQILDSRMNTKYDENDKLIREVKVITLKSKLVSDFRKDFQFYKVREINNYHHAHDAYLNAVVGTALIKKYPKLESEFVYGDYKVYDVRKMIAKSEQEIGKATAKYFFYSNIMNFFKTEITLANGEIRKRPLIETNGETGEIVWDKGRDFATVRKVLSMPQVNIVKKTEVQTGGFSKESILPKRNSDKLIARKKDWDPKKYGGFDSPTVAYSVLVVAKVEKGKSKKLKSVKELLGITIMERSSFEKNPIDFLEAKGYKEVKKDLIIKLPKYSLFELENGRKRMLASAGELQKGNELALPSKYVNFLYLASHYEKLKGSPEDNEQKQLFVEQHKHYLDEIIEQISEFSKRVILADANLDKVLSAYNKHRDKPIREQAENIIHLFTLTNLGAPAAFKYFDTTIDRKRYTSTKEVLDATLIHQSITGLYETRIDLSQLGGDGGGSSPAPGGTLQLEEEYRLFEPESTQKQEMDIWLKNFPQAWAETGGMGTAHCQAPVLIQLKATATPISIRQYPMPHEAYQGIKPHIRRMLDQGILKPCQSPWNTPLLPVKKPGTEDYRPVQDLREVNKRVEDIHPTVPNPYNLLSTLPPSHPWYTVLDLKDAFFCLRLHSESQLLFAFEWRDPEIGLSGQLTWTRLPQGFKNSPTLFNEALHSDLADFRVRYPALVLLQYVDDLLLAAATRTECLEGTKALLETLGNKGYRASAKKAQICLQEVTYLGYSLKDGQRWLTKARKEAILSIPVPKNSRQVREFLGTAGYCRLWIPGFAELAAPLYPLTRPGTLFQWGTEQQLAFEDIKKALLSSPALGLPDITKPFELFIDENSGFAKGVLVQKLGPWKRPVAYLSKKLDTVASGWPPCLRMVAAIAILVKDAGKLTLGQPLTILTSHPVEALVRQPPNKWLSNARMTHYQAMLLDAERVHFGPTVSLNPATLLPLPSGGNHHDCLQILAETHGTRPDLTDQPLPDADLTWYTDGSSFIRNGEREAGAAVTTESEVIWAAPLPPGTSAQRAELIALTQALKMAEGKKLTVYTDSRYAFATTHVHGEIYRRRGWLTSEGKEIKNKNEILALLEALFLPKRLSIIHCPGHQKGDSPQAKGNRLADDTAKKAATETHSSLTVLPAGKRTADGSEFEKRTADGSEFESPKKKAKVE

SEQ ID NO: 6749 - protein, 2213 aa, synthetic construct
MPAAKRVKLDGGDKKYSIGLDIGTNSVGWAVITDEYKVPSKKFKVLGNTDRHSIKKNLIGALLFDSGETAEATRLKRTARRRYTRRKNRICYLQEIFSNEMAKVDDSFFHRLEESFLVEEDKKHERHPIFGNIVDEVAYHEKYPTIYHLRKKLVDSTDKADLRLIYLALAHMIKFRGHFLIEGDLNPDNSDVDKLFIQLVQTYNQLFEENPINASGVDAKAILSARLSKSRRLENLIAQLPGEKKNGLFGNLIALSLGLTPNFKSNFDLAEDAKLQLSKDTYDDDLDNLLAQIGDQYADLFLAAKNLSDAILLSDILRVNTEITKAPLSASMIKRYDEHHQDLTLLKALVRQQLPEKYKEIFFDQSKNGYAGYIDGGASQEEFYKFIKPILEKMDGTEELLVKLNREDLLRKQRTFDNGSIPHQIHLGELHAILRRQEDFYPFLKDNREKIEKILTFRIPYYVGPLARGNSRFAWMTRKSEETITPWNFEEVVDKGASAQSFIERMTNFDKNLPNEKVLPKHSLLYEYFTVYNELTKVKYVTEGMRKPAFLSGEQKKAIVDLLFKTNRKVTVKQLKEDYFKKIECFDSVEISGVEDRFNASLGTYHDLLKIIKDKDFLDNEENEDILEDIVLTLTLFEDREMIEERLKTYAHLFDDKVMKQLKRRRYTGWGRLSRKLINGIRDKQSGKTILDFLKSDGFANRNFMQLIHDDSLTFKEDIQKAQVSGQGDSLHEHIANLAGSPAIKKGILQTVKVVDELVKVMGRHKPENIVIEMARENQTTQKGQKNSRERMKRIEEGIKELGSQILKEHPVENTQLQNEKLYLYYLQNGRDMYVDQELDINRLSDYDVDHIVPQSFLKDDSIDNKVLTRSDKARGKSDNVPSEEVVKKMKNYWRQLLNAKLITQRKFDNLTKAERGGLSELDKAGFIKRQLVETRQITKHVAQILDSRMNTKYDENDKLIREVKVITLKSKLVSDFRKDFQFYKVREINNYHHAHDAYLNAVVGTALIKKYPKLESEFVYGDYKVYDVRKMIAKSEQEIGKATAKYFFYSNIMNFFKTEITLANGEIRKRPLIETNGETGEIVWDKGRDFATVRKVLSMPQVNIVKKTEVQTGGFSKESILPKRNSDKLIARKKDWDPKKYGGFDSPTVAYSVLVVAKVEKGKSKKLKSVKELLGITIMERSSFEKNPIDFLEAKGYKEVKKDLIIKLPKYSLFELENGRKRMLASAGELQKGNELALPSKYVNFLYLASHYEKLKGSPEDNEQKQLFVEQHKHYLDEIIEQISEFSKRVILADANLDKVLSAYNKHRDKPIREQAENIIHLFTLTNLGAPAAFKYFDTTIDRKRYTSTKEVLDATLIHQSITGLYETRIDLSQLGGDGGGSSPAPGGTLGDQGSRGSDPLPEPRVTLTVEGIPTEFLVNTGAEHSVLTKPMGKMGSKRTVVAGATGSKVYPWTTKRLLKIGQKQVTHSFLVIPECPAPLLGRDLLTKLKAQIQFSTEGPQVTWEDRPAMCLVLNLEEEYRLHEKPVPPSIDPSWLQLFPMVWAEKAGMGLANQVPPVVVELKSDASPVAVRQYPMSKEAREGIRPHIQRFLDLGILVPCQSPWNTPLLPVKKPGTNDYRPVQDLREVNKRVQDIHPTVPNPYNLLSSLPPSHTWYSVLDLKDAFFCLKLHPNSQPLFAFEWRDPEKGNTGQLTWTRLPQGFKNSPTLFNEALHRDLASFRALNPQVVMLQYVDDLLVAAPTYRDCKEGTRRLLQELSKLGYRVSAKKAQLCREEVTYLGYLLKGGKRWLTPARKATVMKIPTPTTPRQVREFLGTAGFCRLWIPGFASLAAPLYPLTRPKVPFTWTEAHQEAFGRIKEALLSAPALALPDLTKPFALYVDEKEGVARGVLTQTLGPWRRPVAYLSKKLDPVASGWPTCLKAIAAVALLLKDADKLTLGQNVLVIAPHNLESIVRQPPDRWMTNARMTHYQSLLLNERVSFAPPAILNPATLLPVESDDTPIHICSEILAEETGTRPDLRDQPLPGVPAWYTDGSSFIMDGRRQAGAAIVDNKRTVWASNLPEGTSAQKAELIALTQALRLAEGKSINIYTDSRYAFATAHVHGAIYKQRGWLTSAGKDIKNKEEILALLEAIHLPKRVAIIHCPGHQRGTDPVATGNRKADEAAKQAAQSTRILTETTKNAGKRTADGSEFEKRTADGSEFESPKKKAKVE

SEQ ID NO: 6750 - protein, 2091 aa, synthetic construct
MPAAKRVKLDGGDKKYSIGLDIGTNSVGWAVITDEYKVPSKKFKVLGNTDRHSIKKNLIGALLFDSGETAEATRLKRTARRRYTRRKNRICYLQEIFSNEMAKVDDSFFHRLEESFLVEEDKKHERHPIFGNIVDEVAYHEKYPTIYHLRKKLVDSTDKADLRLIYLALAHMIKFRGHFLIEGDLNPDNSDVDKLFIQLVQTYNQLFEENPINASGVDAKAILSARLSKSRRLENLIAQLPGEKKNGLFGNLIALSLGLTPNFKSNFDLAEDAKLQLSKDTYDDDLDNLLAQIGDQYADLFLAAKNLSDAILLSDILRVNTEITKAPLSASMIKRYDEHHQDLTLLKALVRQQLPEKYKEIFFDQSKNGYAGYIDGGASQEEFYKFIKPILEKMDGTEELLVKLNREDLLRKQRTFDNGSIPHQIHLGELHAILRRQEDFYPFLKDNREKIEKILTFRIPYYVGPLARGNSRFAWMTRKSEETITPWNFEEVVDKGASAQSFIERMTNFDKNLPNEKVLPKHSLLYEYFTVYNELTKVKYVTEGMRKPAFLSGEQKKAIVDLLFKTNRKVTVKQLKEDYFKKIECFDSVEISGVEDRFNASLGTYHDLLKIIKDKDFLDNEENEDILEDIVLTLTLFEDREMIEERLKTYAHLFDDKVMKQLKRRRYTGWGRLSRKLINGIRDKQSGKTILDFLKSDGFANRNFMQLIHDDSLTFKEDIQKAQVSGQGDSLHEHIANLAGSPAIKKGILQTVKVVDELVKVMGRHKPENIVIEMARENQTTQKGQKNSRERMKRIEEGIKELGSQILKEHPVENTQLQNEKLYLYYLQNGRDMYVDQELDINRLSDYDVDHIVPQSFLKDDSIDNKVLTRSDKARGKSDNVPSEEVVKKMKNYWRQLLNAKLITQRKFDNLTKAERGGLSELDKAGFIKRQLVETRQITKHVAQILDSRMNTKYDENDKLIREVKVITLKSKLVSDFRKDFQFYKVREINNYHHAHDAYLNAVVGTALIKKYPKLESEFVYGDYKVYDVRKMIAKSEQEIGKATAKYFFYSNIMNFFKTEITLANGEIRKRPLIETNGETGEIVWDKGRDFATVRKVLSMPQVNIVKKTEVQTGGFSKESILPKRNSDKLIARKKDWDPKKYGGFDSPTVAYSVLVVAKVEKGKSKKLKSVKELLGITIMERSSFEKNPIDFLEAKGYKEVKKDLIIKLPKYSLFELENGRKRMLASAGELQKGNELALPSKYVNFLYLASHYEKLKGSPEDNEQKQLFVEQHKHYLDEIIEQISEFSKRVILADANLDKVLSAYNKHRDKPIREQAENIIHLFTLTNLGAPAAFKYFDTTIDRKRYTSTKEVLDATLIHQSITGLYETRIDLSQLGGDGGGSSPAPGGTLGIEDEYRLHETSTEPDVSLGSTWLSDFPQAWAETGGMGLAVRQAPLIIPLKATSTPVSIQQYPMSHEARLGIKPHIQRLLDQGILVPCQSPWNTPLLPVKKPGTNDYRPVQDLREVNKRVEDIHPTVPNPYNLLSGLPPSHQWYTVLDLKDAFFCLRLHPTSQPLFAFEWRDPGMGISGQLTWTRLPQGFKNSPTLFNEALHRDLADFRIQHPDLILLQYVDDILLAATSELDCQQGTRALLQTLGDLGYRASAKKAQICQKQVKYLGYLLREGQRWLTEARKETVMGQPVPKTPRQLREFLGTAGFCRLWIPGFAEMAAPLYPLTKPGTLFSWGPDQQKAYQEIKQALLTAPALGLPDLTKPFELFVDEKQGYAKGVLTQKLGPWRRPVAYLSKKLDPVAAGWPPCLRMVAAIAVLTKDAGKLTMGQPLVILAPHAVEALVKQPPDRWLSNARMTHYQAMLLDTDRVQFGPVVALNPATLLPLPEEGAPHDCLEILAETHGTRPDLTDQPIPDADHTWYTDGSSFLQEGQRKAGAAVTTETEVIWAGALPAGTSAQRAELIALTQALKMAEGKRLNVYTDSRYAFATAHIHGEIYRRRGWLTSEGREIKNKSEILALLKALFLPKRLSIIHCLGHQKGDSAEARGNRLADQAAREAAIKTPPDTSTLLAGKRTADGSEFEKRTADGSEFESPKKKAKVE

SEQ ID NO: 6751 - protein, 2111 aa, synthetic construct
MPAAKRVKLDGGDKKYSIGLDIGTNSVGWAVITDEYKVPSKKFKVLGNTDRHSIKKNLIGALLFDSGETAEATRLKRTARRRYTRRKNRICYLQEIFSNEMAKVDDSFFHRLEESFLVEEDKKHERHPIFGNIVDEVAYHEKYPTIYHLRKKLVDSTDKADLRLIYLALAHMIKFRGHFLIEGDLNPDNSDVDKLFIQLVQTYNQLFEENPINASGVDAKAILSARLSKSRRLENLIAQLPGEKKNGLFGNLIALSLGLTPNFKSNFDLAEDAKLQLSKDTYDDDLDNLLAQIGDQYADLFLAAKNLSDAILLSDILRVNTEITKAPLSASMIKRYDEHHQDLTLLKALVRQQLPEKYKEIFFDQSKNGYAGYIDGGASQEEFYKFIKPILEKMDGTEELLVKLNREDLLRKQRTFDNGSIPHQIHLGELHAILRRQEDFYPFLKDNREKIEKILTFRIPYYVGPLARGNSRFAWMTRKSEETITPWNFEEVVDKGASAQSFIERMTNFDKNLPNEKVLPKHSLLYEYFTVYNELTKVKYVTEGMRKPAFLSGEQKKAIVDLLFKTNRKVTVKQLKEDYFKKIECFDSVEISGVEDRFNASLGTYHDLLKIIKDKDFLDNEENEDILEDIVLTLTLFEDREMIEERLKTYAHLFDDKVMKQLKRRRYTGWGRLSRKLINGIRDKQSGKTILDFLKSDGFANRNFMQLIHDDSLTFKEDIQKAQVSGQGDSLHEHIANLAGSPAIKKGILQTVKVVDELVKVMGRHKPENIVIEMARENQTTQKGQKNSRERMKRIEEGIKELGSQILKEHPVENTQLQNEKLYLYYLQNGRDMYVDQELDINRLSDYDVDHIVPQSFLKDDSIDNKVLTRSDKARGKSDNVPSEEVVKKMKNYWRQLLNAKLITQRKFDNLTKAERGGLSELDKAGFIKRQLVETRQITKHVAQILDSRMNTKYDENDKLIREVKVITLKSKLVSDFRKDFQFYKVREINNYHHAHDAYLNAVVGTALIKKYPKLESEFVYGDYKVYDVRKMIAKSEQEIGKATAKYFFYSNIMNFFKTEITLANGEIRKRPLIETNGETGEIVWDKGRDFATVRKVLSMPQVNIVKKTEVQTGGFSKESILPKRNSDKLIARKKDWDPKKYGGFDSPTVAYSVLVVAKVEKGKSKKLKSVKELLGITIMERSSFEKNPIDFLEAKGYKEVKKDLIIKLPKYSLFELENGRKRMLASAGELQKGNELALPSKYVNFLYLASHYEKLKGSPEDNEQKQLFVEQHKHYLDEIIEQISEFSKRVILADANLDKVLSAYNKHRDKPIREQAENIIHLFTLTNLGAPAAFKYFDTTIDRKRYTSTKEVLDATLIHQSITGLYETRIDLSQLGGDGGGSSPAPGGTLNIEDEYRLHETSKEPDVSLGSTWLSDFPQAWAETGGMGLAVRQAPLIIPLKATSTPVSIKQYPMSQEARLGIKPHIQRLLDQGILVPCQSPWNTPLLPVKKPGTNDYRPVQDLREVNKRVEDIHPTVPNPYNLLSGLPPSHQWYTVLDLKDAFFCLRLHPTSQPLFAFEWRDPEMGISGQLTWTRLPQGFKNSPTLFNEALHRDLADFRIQHPDLILLQYVDDLLLAATSELDCQQGTRALLQTLGNLGYRASAKKAQICQKQVKYLGYLLKEGQRWLTEARKETVMGQPTPKTPRQLREFLGKAGFCRLFIPGFAEMAAPLYPLTKPGTLFNWGPDQQKAYQEIKQALLTAPALGLPDLTKPFELFVDEKQGYAKGVLTQKLGPWRRPVAYLSKKLDPVAAGWPPCLRMVAAIAVLTKDAGKLTMGQPLVILAPHAVEALVKQPPDRWLSNARMTHYQALLLDTDRVQFGPVVALNPATLLPLPEEGLQHNCLDILAEAHGTRPDLTDQPLPDADHTWYTDGSSLLQEGQRKAGAAVTTETEVIWAKALPAGTSAQRAELIALTQALKMAEGKKLNVYTDSRYAFATAHIHGEIYRRRGWLTSEGKEIKNKDEILALLKALFLPKRLSIIHCPGHQKGHSAEARGNRMADQAARKAAITETPDTSTLLIENSSPSGGSKRTADGSEFEAGKRTADGSEFEKRTADGSEFESPKKKAKVE

SEQ ID NO: 6752 - protein, 2111 aa, synthetic construct; identical to SEQ ID NO: 6751

SEQ ID NO: 6753 - protein, 2082 aa, synthetic construct
MPAAKRVKLDGGDKKYSIGLDIGTNSVGWAVITDEYKVPSKKFKVLGNTDRHSIKKNLIGALLFDSGETAEATRLKRTARRRYTRRKNRICYLQEIFSNEMAKVDDSFFHRLEESFLVEEDKKHERHPIFGNIVDEVAYHEKYPTIYHLRKKLVDSTDKADLRLIYLALAHMIKFRGHFLIEGDLNPDNSDVDKLFIQLVQTYNQLFEENPINASGVDAKAILSARLSKSRRLENLIAQLPGEKKNGLFGNLIALSLGLTPNFKSNFDLAEDAKLQLSKDTYDDDLDNLLAQIGDQYADLFLAAKNLSDAILLSDILRVNTEITKAPLSASMIKRYDEHHQDLTLLKALVRQQLPEKYKEIFFDQSKNGYAGYIDGGASQEEFYKFIKPILEKMDGTEELLVKLNREDLLRKQRTFDNGSIPHQIHLGELHAILRRQEDFYPFLKDNREKIEKILTFRIPYYVGPLARGNSRFAWMTRKSEETITPWNFEEVVDKGASAQSFIERMTNFDKNLPNEKVLPKHSLLYEYFTVYNELTKVKYVTEGMRKPAFLSGEQKKAIVDLLFKTNRKVTVKQLKEDYFKKIECFDSVEISGVEDRFNASLGTYHDLLKIIKDKDFLDNEENEDILEDIVLTLTLFEDREMIEERLKTYAHLFDDKVMKQLKRRRYTGWGRLSRKLINGIRDKQSGKTILDFLKSDGFANRNFMQLIHDDSLTFKEDIQKAQVSGQGDSLHEHIANLAGSPAIKKGILQTVKVVDELVKVMGRHKPENIVIEMARENQTTQKGQKNSRERMKRIEEGIKELGSQILKEHPVENTQLQNEKLYLYYLQNGRDMYVDQELDINRLSDYDVDHIVPQSFLKDDSIDNKVLTRSDKARGKSDNVPSEEVVKKMKNYWRQLLNAKLITQRKFDNLTKAERGGLSELDKAGFIKRQLVETRQITKHVAQILDSRMNTKYDENDKLIREVKVITLKSKLVSDFRKDFQFYKVREINNYHHAHDAYLNAVVGTALIKKYPKLESEFVYGDYKVYDVRKMIAKSEQEIGKATAKYFFYSNIMNFFKTEITLANGEIRKRPLIETNGETGEIVWDKGRDFATVRKVLSMPQVNIVKKTEVQTGGFSKESILPKRNSDKLIARKKDWDPKKYGGFDSPTVAYSVLVVAKVEKGKSKKLKSVKELLGITIMERSSFEKNPIDFLEAKGYKEVKKDLIIKLPKYSLFELENGRKRMLASAGELQKGNELALPSKYVNFLYLASHYEKLKGSPEDNEQKQLFVEQHKHYLDEIIEQISEFSKRVILADANLDKVLSAYNKHRDKPIREQAENIIHLFTLTNLGAPAAFKYFDTTIDRKRYTSTKEVLDATLIHQSITGLYETRIDLSQLGGDGGGSSPAPGGIPWLMKKPLQLTTLVPLQEYEERLLKQTMLTGSYKEKLQSLFLKYDALWQHWENQVGHRRIKPHHIATGTVNPRPQKQYPINPKAKASIQTVINDLLKQGVLIQQNSIMNTPVYPVPKPDGKWRMVLDYREVNKTIPLIAAQNQHSAGILSSIFRGKYKTTLDLSNGFWAHSITPESYWLTAFTWLGQQYCWTRLPQGFLNSPALFNADVVDLLKEVPNVQVYVDDIYISHDDPREHLEQLEKVFSLLLNAGYVVSLKKSEIAQHEVEFLGFNITKEGRGLTETFKQKLLNITPPRDLKQLQSILGLLNFARNFIPNFSELVKPLYNIIATAPGKYITWTTDNSQQLQNIISMLNSAENLEERNPEVRLIMKVNTSPSAGYIRFYNEFAKRPIMYLNYVYTKAEVKFTNTEKLLTTIHKGLIKALDLGMGQEILVYSPIVSMTKIQKTPLPERKALPIRWITWMSYLEDPRIQFHYDKTLPELQQVPTVTDDIIAKIKHPSEFSMVFYTDGSAIKHPNVNKSHNAGMGIAQVQFKPEFTVINTWSIPLGDHTAQLAEVAAVEFACKKALKIDGPVLIVTDSFYVAESVNKELPYWQSNGFFNNKKKPLKHVSKWKSIADCIQLKPDIIIIHEKGHQPTASTFHTEGNNLADKLATQGSYVVNAGKRTADGSEFEKRTADGSEFESPKKKAKVE

SEQ ID NO: 6754 - protein, 2091 aa, synthetic construct
MPAAKRVKLDGGDKKYSIGLDIGTNSVGWAVITDEYKVPSKKFKVLGNTDRHSIKKNLIGALLFDSGETAEATRLKRTARRRYTRRKNRICYLQEIFSNEMAKVDDSFFHRLEESFLVEEDKKHERHPIFGNIVDEVAYHEKYPTIYHLRKKLVDSTDKADLRLIYLALAHMIKFRGHFLIEGDLNPDNSDVDKLFIQLVQTYNQLFEENPINASGVDAKAILSARLSKSRRLENLIAQLPGEKKNGLFGNLIALSLGLTPNFKSNFDLAEDAKLQLSKDTYDDDLDNLLAQIGDQYADLFLAAKNLSDAILLSDILRVNTEITKAPLSASMIKRYDEHHQDLTLLKALVRQQLPEKYKEIFFDQSKNGYAGYIDGGASQEEFYKFIKPILEKMDGTEELLVKLNREDLLRKQRTFDNGSIPHQIHLGELHAILRRQEDFYPFLKDNREKIEKILTFRIPYYVGPLARGNSRFAWMTRKSEETITPWNFEEVVDKGASAQSFIERMTNFDKNLPNEKVLPKHSLLYEYFTVYNELTKVKYVTEGMRKPAFLSGEQKKAIVDLLFKTNRKVTVKQLKEDYFKKIECFDSVEISGVEDRFNASLGTYHDLLKIIKDKDFLDNEENEDILEDIVLTLTLFEDREMIEERLKTYAHLFDDKVMKQLKRRRYTGWGRLSRKLINGIRDKQSGKTILDFLKSDGFANRNFMQLIHDDSLTFKEDIQKAQVSGQGDSLHEHIANLAGSPAIKKGILQTVKVVDELVKVMGRHKPENIVIEMARENQTTQKGQKNSRERMKRIEEGIKELGSQILKEHPVENTQLQNEKLYLYYLQNGRDMYVDQELDINRLSDYDVDHIVPQSFLKDDSIDNKVLTRSDKARGKSDNVPSEEVVKKMKNYWRQLLNAKLITQRKFDNLTKAERGGLSELDKAGFIKRQLVETRQITKHVAQILDSRMNTKYDENDKLIREVKVITLKSKLVSDFRKDFQFYKVREINNYHHAHDAYLNAVVGTALIKKYPKLESEFVYGDYKVYDVRKMIAKSEQEIGKATAKYFFYSNIMNFFKTEITLANGEIRKRPLIETNGETGEIVWDKGRDFATVRKVLSMPQVNIVKKTEVQTGGFSKESILPKRNSDKLIARKKDWDPKKYGGFDSPTVAYSVLVVAKVEKGKSKKLKSVKELLGITIMERSSFEKNPIDFLEAKGYKEVKKDLIIKLPKYSLFELENGRKRMLASAGELQKGNELALPSKYVNFLYLASHYEKLKGSPEDNEQKQLFVEQHKHYLDEIIEQISEFSKRVILADANLDKVLSAYNKHRDKPIREQAENIIHLFTLTNLGAPAAFKYFDTTIDRKRYTSTKEVLDATLIHQSITGLYETRIDLSQLGGDGGGSSPAPGGTLNIEDEYRLHETSKEPDVPLGSTWLSDFPQAWAETGGMGLAVRQAPLIIPLKATSTPVSIKQYPMSQEARLGIKPHIQRLLDQGILVPCQSPWNTPLLPVKKPGTNDYRPVQDLREVNKRVEDIHPTVPNPYNLLSGLPPSHQWYTVLDLKDAFFCLRLHPTSQPLFAFEWRDPEMGISGQLTWTRLPQGFKNSPTLFNEALHRDLADFRIQHPDLILLQYVDDLLLAATSEQDCQRGTRALLQTLGNLGYRASAKKAQICQKQVKYLGYLLKEGQRWLTEARKETVMGQPTPKTPRQLREFLGTAGFCRLWIPGFAEMAAPLYPLTKPGTLFNWGPDQQKAYQEIKQALLTAPALGLPDLTKPFELFVDEKQGYAKGVLTQKLGPWRRPVAYLSKKLDPVAAGWPPCLRMVAAIAVLTKDAGKLTMGQPLVILAPHAVEALVKQPPDRWLSNARMTHYQAMLLDTDRVQFGPVVALNPATLLPLPEKEAPHDCLEILAETHGTRPDLTDQPIPDADYTWYTDGSSFLQEGQRRAGAAVTTETEVIWARALPAGTSAQRAELIALTQALKMAEGKKLNVYTDSRYAFATAHVHGEIYRRRGWLTSEGREIKNKNEILALLKALFLPKRLSIIHCPGHQKGNSAEARGNRMADQAAREAAMKAVLETSTLLAGKRTADGSEFEKRTADGSEFESPKKKAKVE

SEQ ID NO: 6755 - protein, 2093 aa, synthetic construct
MPAAKRVKLDGGDKKYSIGLDIGTNSVGWAVITDEYKVPSKKFKVLGNTDRHSIKKNLIGALLFDSGETAEATRLKRTARRRYTRRKNRICYLQEIFSNEMAKVDDSFFHRLEESFLVEEDKKHERHPIFGNIVDEVAYHEKYPTIYHLRKKLVDSTDKADLRLIYLALAHMIKFRGHFLIEGDLNPDNSDVDKLFIQLVQTYNQLFEENPINASGVDAKAILSARLSKSRRLENLIAQLPGEKKNGLFGNLIALSLGLTPNFKSNFDLAEDAKLQLSKDTYDDDLDNLLAQIGDQYADLFLAAKNLSDAILLSDILRVNTEITKAPLSASMIKRYDEHHQDLTLLKALVRQQLPEKYKEIFFDQSKNGYAGYIDGGASQEEFYKFIKPILEKMDGTEELLVKLNREDLLRKQRTFDNGSIPHQIHLGELHAILRRQEDFYPFLKDNREKIEKILTFRIPYYVGPLARGNSRFAWMTRKSEETITPWNFEEVVDKGASAQSFIERMTNFDKNLPNEKVLPKHSLLYEYFTVYNELTKVKYVTEGMRKPAFLSGEQKKAIVDLLFKTNRKVTVKQLKEDYFKKIECFDSVEISGVEDRFNASLGTYHDLLKIIKDKDFLDNEENEDILEDIVLTLTLFEDREMIEERLKTYAHLFDDKVMKQLKRRRYTGWGRLSRKLINGIRDKQSGKTILDFLKSDGFANRNFMQLIHDDSLTFKEDIQKAQVSGQGDSLHEHIANLAGSPAIKKGILQTVKVVDELVKVMGRHKPENIVIEMARENQTTQKGQKNSRERMKRIEEGIKELGSQILKEHPVENTQLQNEKLYLYYLQNGRDMYVDQELDINRLSDYDVDHIVPQSFLKDDSIDNKVLTRSDKARGKSDNVPSEEVVKKMKNYWRQLLNAKLITQRKFDNLTKAERGGLSELDKAGFIKRQLVETRQITKHVAQILDSRMNTKYDENDKLIREVKVITLKSKLVSDFRKDFQFYKVREINNYHHAHDAYLNAVVGTALIKKYPKLESEFVYGDYKVYDVRKMIAKSEQEIGKATAKYFFYSNIMNFFKTEITLANGEIRKRPLIETNGETGEIVWDKGRDFATVRKVLSMPQVNIVKKTEVQTGGFSKESILPKRNSDKLIARKKDWDPKKYGGFDSPTVAYSVLVVAKVEKGKSKKLKSVKELLGITIMERSSFEKNPIDFLEAKGYKEVKKDLIIKLPKYSLFELENGRKRMLASAGELQKGNELALPSKYVNFLYLASHYEKLKGSPEDNEQKQLFVEQHKHYLDEIIEQISEFSKRVILADANLDKVLSAYNKHRDKPIREQAENIIHLFTLTNLGAPAAFKYFDTTIDRKRYTSTKEVLDATLIHQSITGLYETRIDLSQLGGDGGPAPGSSGGTAPLEEEYRLFLEAPIQNVTLLEQWKREIPKVWAEINPPGLASTQAPIHVQLLSTALPVRVRQYPITLEAKRSLRETIRKFRAAGILRPVHSPWNTPLLPVRKSGTSEYRMVQDLREVNKRVETIHPTVPNPYTLLSLLPPDRIWYSVLDLKDAFFCIPLAPESQLIFAFEWADAEEGESGQLTWTRLPQGFKNSPTLFNEALNRDLQGFRLDHPSVSLLQYVDDLLIAADTQAACLSATRDLLMTLAELGYRVSGKKAQLCQEEVTYLGFKIHKGSRSLSNSRTQAILQIPVPKTKRQVREFLGTIGYCRLWIPGFAELAQPLYAATRPGNDPLVWGEKEEEAFQSLKLALTQPPALALPSLDKPFQLFVEETSGAAKGVLTQALGPWKRPVAYLSKRLDPVAAGWPRCLRAIAAAALLTREASKLTFGQDIEITSSHNLESLLRSPPDKWLTNARITQYQVLLLDPPRVRFKQTAALNPATLLPETDDTLPIHHCLDTLDSLTSTRPDLTDQPLAQAEATLFTDGSSYIRDGKRYAGAAVVTLDSVIWAEPLPIGTSAQKAELIALTKALEWSKDKSVNIYTDSRYAFATLHVHGMIYRERGWLTAGGKAIKNAPEILALLTAVWLPKRVAVMHCKGHQKDDAPTSTGNRRADEVAREVAIRPLSTQATISAGKRTADGSEFEKRTADGSEFESPKKKAKVE

SEQ ID NO: 6756 - protein, 2093 aa, synthetic construct
MPAAKRVKLDGGDKKYSIGLDIGTNSVGWAVITDEYKVPSKKFKVLGNTDRHSIKKNLIGALLFDSGETAEATRLKRTARRRYTRRKNRICYLQEIFSNEMAKVDDSFFHRLEESFLVEEDKKHERHPIFGNIVDEVAYHEKYPTIYHLRKKLVDSTDKADLRLIYLALAHMIKFRGHFLIEGDLNPDNSDVDKLFIQLVQTYNQLFEENPINASGVDAKAILSARLSKSRRLENLIAQLPGEKKNGLFGNLIALSLGLTPNFKSNFDLAEDAKLQLSKDTYDDDLDNLLAQIGDQYADLFLAAKNLSDAILLSDILRVNTEITKAPLSASMIKRYDEHHQDLTLLKALVRQQLPEKYKEIFFDQSKNGYAGYIDGGASQEEFYKFIKPILEKMDGTEELLVKLNREDLLRKQRTFDNGSIPHQIHLGELHAILRRQEDFYPFLKDNREKIEKILTFRIPYYVGPLARGNSRFAWMTRKSEETITPWNFEEVVDKGASAQSFIERMTNFDKNLPNEKVLPKHSLLYEYFTVYNELTKVKYVTEGMRKPAFLSGEQKKAIVDLLFKTNRKVTVKQLKEDYFKKIECFDSVEISGVEDRFNASLGTYHDLLKIIKDKDFLDNEENEDILEDIVLTLTLFEDREMIEERLKTYAHLFDDKVMKQLKRRRYTGWGRLSRKLINGIRDKQSGKTILDFLKSDGFANRNFMQLIHDDSLTFKEDIQKAQVSGQGDSLHEHIANLAGSPAIKKGILQTVKVVDELVKVMGRHKPENIVIEMARENQTTQKGQKNSRERMKRIEEGIKELGSQILKEHPVENTQLQNEKLYLYYLQNGRDMYVDQELDINRLSDYDVDHIVPQSFLKDDSIDNKVLTRSDKARGKSDNVPSEEVVKKMKNYWRQLLNAKLITQRKFDNLTKAERGGLSELDKAGFIKRQLVETRQITKHVAQILDSRMNTKYDENDKLIREVKVITLKSKLVSDFRKDFQFYKVREINNYHHAHDAYLNAVVGTALIKKYPKLESEFVYGDYKVYDVRKMIAKSEQEIGKATAKYFFYSNIMNFFKTEITLANGEIRKRPLIETNGETGEIVWDKGRDFATVRKVLSMPQVNIVKKTEVQTGGFSKESILPKRNSDKLIARKKDWDPKKYGGFDSPTVAYSVLVVAKVEKGKSKKLKSVKELLGITIMERSSFEKNPIDFLEAKGYKEVKKDLIIKLPKYSLFELENGRKRMLASAGELQKGNELALPSKYVNFLYLASHYEKLKGSPEDNEQKQLFVEQHKHYLDEIIEQISEFSKRVILADANLDKVLSAYNKHRDKPIREQAENIIHLFTLTNLGAPAAFKYFDTTIDRKRYTSTKEVLDATLIHQSITGLYETRIDLSQLGGDGGPAPGSSGGTAPLEEEYRLFLEAPIQNVTLLEQWKREIPKVWAEINPPGLASTQAPIHVQLLSTALPVRVRQYPITLEAKRSLRETIRKFRAAGILRPVHSPWNTPLLPVRKSGTSEYRMVQDLREVNKRVETIHPTVPNPYTLLSLLPPDRIWYSVLDLKDAFFCIPLAPESQLIFAFEWADAEEGESGQLTWTRLPQGFKNSPTLFNEALNRDLQGFRLDHPSVSLLQYVDDLLIAADTQAACLSATRDLLMTLAELGYRVSGKKAQLCQEEVTYLGFKIHKGSRSLSNSRTQAILQIPVPKTKRQVREFLGKIGYCRLFIPGFAELAQPLYAATRPGNDPLVWGEKEEEAFQSLKLALTQPPALALPSLDKPFQLFVEETSGAAKGVLTQALGPWKRPVAYLSKRLDPVAAGWPRCLRAIAAAALLTREASKLTFGQDIEITSSHNLESLLRSPPDKWLTNARITQYQVLLLDPPRVRFKQTAALNPATLLPETDDTLPIHHCLDTLDSLTSTRPDLTDQPLAQAEATLFTDGSSYIRDGKRYAGAAVVTLDSVIWAEPLPIGTSAQKAELIALTKALEWSKDKSVNIYTDSRYAFATLHVHGMIYRERGWLTAGGKAIKNAPEILALLTAVWLPKRVAVMHCKGHQKDDAPTSTGNRRADEVAREVAIRPLSTQATISAGKRTADGSEFEKRTADGSEFESPKKKAKVE

SEQ ID NO: 6757 - protein, 2090 aa, synthetic construct
MPAAKRVKLDGGDKKYSIGLDIGTNSVGWAVITDEYKVPSKKFKVLGNTDRHSIKKNLIGALLFDSGETAEATRLKRTARRRYTRRKNRICYLQEIFSNEMAKVDDSFFHRLEESFLVEEDKKHERHPIFGNIVDEVAYHEKYPTIYHLRKKLVDSTDKADLRLIYLALAHMIKFRGHFLIEGDLNPDNSDVDKLFIQLVQTYNQLFEENPINASGVDAKAILSARLSKSRRLENLIAQLPGEKKNGLFGNLIALSLGLTPNFKSNFDLAEDAKLQLSKDTYDDDLDNLLAQIGDQYADLFLAAKNLSDAILLSDILRVNTEITKAPLSASMIKRYDEHHQDLTLLKALVRQQLPEKYKEIFFDQSKNGYAGYIDGGASQEEFYKFIKPILEKMDGTEELLVKLNREDLLRKQRTFDNGSIPHQIHLGELHAILRRQEDFYPFLKDNREKIEKILTFRIPYYVGPLARGNSRFAWMTRKSEETITPWNFEEVVDKGASAQSFIERMTNFDKNLPNEKVLPKHSLLYEYFTVYNELTKVKYVTEGMRKPAFLSGEQKKAIVDLLFKTNRKVTVKQLKEDYFKKIECFDSVEISGVEDRFNASLGTYHDLLKIIKDKDFLDNEENEDILEDIVLTLTLFEDREMIEERLKTYAHLFDDKVMKQLKRRRYTGWGRLSRKLINGIRDKQSGKTILDFLKSDGFANRNFMQLIHDDSLTFKEDIQKAQVSGQGDSLHEHIANLAGSPAIKKGILQTVKVVDELVKVMGRHKPENIVIEMARENQTTQKGQKNSRERMKRIEEGIKELGSQILKEHPVENTQLQNEKLYLYYLQNGRDMYVDQELDINRLSDYDVDHIVPQSFLKDDSIDNKVLTRSDKARGKSDNVPSEEVVKKMKNYWRQLLNAKLITQRKFDNLTKAERGGLSELDKAGFIKRQLVETRQITKHVAQILDSRMNTKYDENDKLIREVKVITLKSKLVSDFRKDFQFYKVREINNYHHAHDAYLNAVVGTALIKKYPKLESEFVYGDYKVYDVRKMIAKSEQEIGKATAKYFFYSNIMNFFKTEITLANGEIRKRPLIETNGETGEIVWDKGRDFATVRKVLSMPQVNIVKKTEVQTGGFSKESILPKRNSDKLIARKKDWDPKKYGGFDSPTVAYSVLVVAKVEKGKSKKLKSVKELLGITIMERSSFEKNPIDFLEAKGYKEVKKDLIIKLPKYSLFELENGRKRMLASAGELQKGNELALPSKYVNFLYLASHYEKLKGSPEDNEQKQLFVEQHKHYLDEIIEQISEFSKRVILADANLDKVLSAYNKHRDKPIREQAENIIHLFTLTNLGAPAAFKYFDTTIDRKRYTSTKEVLDATLIHQSITGLYETRIDLSQLGGDGGPAPGSSGGTLQLEEEYRLFEPESTQKQEMDIWLKNFPQAWAETGGMGTAHCQAPVLIQLKATATPISIRQYPMPHEAYQGIKPHIRRMLDQGILKPCQSPWNTPLLPVKKPGTEDYRPVQDLREVNKRVEDIHPTVPNPYNLLSTLPPSHPWYTVLDLKDAFFCLRLHSESQLLFAFEWRDPEIGLSGQLTWTRLPQGFKNSPTLFNEALHSDLADFRVRYPALVLLQYVDDLLLAAATRTECLEGTKALLETLGNKGYRASAKKAQICLQEVTYLGYSLKDGQRWLTKARKEAILSIPVPKNSRQVREFLGTAGYCRLWIPGFAELAAPLYPLTRPGTLFQWGTEQQLAFEDIKKALLSSPALGLPDITKPFELFIDENSGFAKGVLVQKLGPWKRPVAYLSKKLDTVASGWPPCLRMVAAIAILVKDAGKLTLGQPLTILTSHPVEALVRQPPNKWLSNARMTHYQAMLLDAERVHFGPTVSLNPATLLPLPSGGNHHDCLQILAETHGTRPDLTDQPLPDADLTWYTDGSSFIRNGEREAGAAVTTESEVIWAAPLPPGTSAQRAELIALTQALKMAEGKKLTVYTDSRYAFATTHVHGEIYRRRGWLTSEGKEIKNKNEILALLEALFLPKRLSIIHCPGHQKGDSPQAKGNRLADDTAKKAATETHSSLTVLPAGKRTADGSEFEKRTADGSEFESPKKKAKVE

SEQ ID NO: 6758 - protein, 2213 aa, synthetic construct
MPAAKRVKLDGGDKKYSIGLDIGTNSVGWAVITDEYKVPSKKFKVLGNTDRHSIKKNLIGALLFDSGETAEATRLKRTARRRYTRRKNRICYLQEIFSNEMAKVDDSFFHRLEESFLVEEDKKHERHPIFGNIVDEVAYHEKYPTIYHLRKKLVDSTDKADLRLIYLALAHMIKFRGHFLIEGDLNPDNSDVDKLFIQLVQTYNQLFEENPINASGVDAKAILSARLSKSRRLENLIAQLPGEKKNGLFGNLIALSLGLTPNFKSNFDLAEDAKLQLSKDTYDDDLDNLLAQIGDQYADLFLAAKNLSDAILLSDILRVNTEITKAPLSASMIKRYDEHHQDLTLLKALVRQQLPEKYKEIFFDQSKNGYAGYIDGGASQEEFYKFIKPILEKMDGTEELLVKLNREDLLRKQRTFDNGSIPHQIHLGELHAILRRQEDFYPFLKDNREKIEKILTFRIPYYVGPLARGNSRFAWMTRKSEETITPWNFEEVVDKGASAQSFIERMTNFDKNLPNEKVLPKHSLLYEYFTVYNELTKVKYVTEGMRKPAFLSGEQKKAIVDLLFKTNRKVTVKQLKEDYFKKIECFDSVEISGVEDRFNASLGTYHDLLKIIKDKDFLDNEENEDILEDIVLTLTLFEDREMIEERLKTYAHLFDDKVMKQLKRRRYTGWGRLSRKLINGIRDKQSGKTILDFLKSDGFANRNFMQLIHDDSLTFKEDIQKAQVSGQGDSLHEHIANLAGSPAIKKGILQTVKVVDELVKVMGRHKPENIVIEMARENQTTQKGQKNSRERMKRIEEGIKELGSQILKEHPVENTQLQNEKLYLYYLQNGRDMYVDQELDINRLSDYDVDHIVPQSFLKDDSIDNKVLTRSDKARGKSDNVPSEEVVKKMKNYWRQLLNAKLITQRKFDNLTKAERGGLSELDKAGFIKRQLVETRQITKHVAQILDSRMNTKYDENDKLIREVKVITLKSKLVSDFRKDFQFYKVREINNYHHAHDAYLNAVVGTALIKKYPKLESEFVYGDYKVYDVRKMIAKSEQEIGKATAKYFFYSNIMNFFKTEITLANGEIRKRPLIETNGETGEIVWDKGRDFATVRKVLSMPQVNIVKKTEVQTGGFSKESILPKRNSDKLIARKKDWDPKKYGGFDSPTVAYSVLVVAKVEKGKSKKLKSVKELLGITIMERSSFEKNPIDFLEAKGYKEVKKDLIIKLPKYSLFELENGRKRMLASAGELQKGNELALPSKYVNFLYLASHYEKLKGSPEDNEQKQLFVEQHKHYLDEIIEQISEFSKRVILADANLDKVLSAYNKHRDKPIREQAENIIHLFTLTNLGAPAAFKYFDTTIDRKRYTSTKEVLDATLIHQSITGLYETRIDLSQLGGDGGPAPGSSGGTLGDQGSRGSDPLPEPRVTLTVEGIPTEFLVNTGAEHSVLTKPMGKMGSKRTVVAGATGSKVYPWTTKRLLKIGQKQVTHSFLVIPECPAPLLGRDLLTKLKAQIQFSTEGPQVTWEDRPAMCLVLNLEEEYRLHEKPVPPSIDPSWLQLFPMVWAEKAGMGLANQVPPVVVELKSDASPVAVRQYPMSKEAREGIRPHIQRFLDLGILVPCQSPWNTPLLPVKKPGTNDYRPVQDLREVNKRVQDIHPTVPNPYNLLSSLPPSHTWYSVLDLKDAFFCLKLHPNSQPLFAFEWRDPEKGNTGQLTWTRLPQGFKNSPTLFNEALHRDLASFRALNPQVVMLQYVDDLLVAAPTYRDCKEGTRRLLQELSKLGYRVSAKKAQLCREEVTYLGYLLKGGKRWLTPARKATVMKIPTPTTPRQVREFLGTAGFCRLWIPGFASLAAPLYPLTRPKVPFTWTEAHQEAFGRIKEALLSAPALALPDLTKPFALYVDEKEGVARGVLTQTLGPWRRPVAYLSKKLDPVASGWPTCLKAIAAVALLLKDADKLTLGQNVLVIAPHNLESIVRQPPDRWMTNARMTHYQSLLLNERVSFAPPAILNPATLLPVESDDTPIHICSEILAEETGTRPDLRDQPLPGVPAWYTDGSSFIMDGRRQAGAAIVDNKRTVWASNLPEGTSAQKAELIALTQALRLAEGKSINIYTDSRYAFATAHVHGAIYKQRGWLTSAGKDIKNKEEILALLEAIHLPKRVAIIHCPGHQRGTDPVATGNRKADEAAKQAAQSTRILTETTKNAGKRTADGSEFEKRTADGSEFESPKKKAKVE

SEQ ID NO: 6759 - protein, 2091 aa, synthetic construct
MPAAKRVKLDGGDKKYSIGLDIGTNSVGWAVITDEYKVPSKKFKVLGNTDRHSIKKNLIGALLFDSGETAEATRLKRTARRRYTRRKNRICYLQEIFSNEMAKVDDSFFHRLEESFLVEEDKKHERHPIFGNIVDEVAYHEKYPTIYHLRKKLVDSTDKADLRLIYLALAHMIKFRGHFLIEGDLNPDNSDVDKLFIQLVQTYNQLFEENPINASGVDAKAILSARLSKSRRLENLIAQLPGEKKNGLFGNLIALSLGLTPNFKSNFDLAEDAKLQLSKDTYDDDLDNLLAQIGDQYADLFLAAKNLSDAILLSDILRVNTEITKAPLSASMIKRYDEHHQDLTLLKALVRQQLPEKYKEIFFDQSKNGYAGYIDGGASQEEFYKFIKPILEKMDGTEELLVKLNREDLLRKQRTFDNGSIPHQIHLGELHAILRRQEDFYPFLKDNREKIEKILTFRIPYYVGPLARGNSRFAWMTRKSEETITPWNFEEVVDKGASAQSFIERMTNFDKNLPNEKVLPKHSLLYEYFTVYNELTKVKYVTEGMRKPAFLSGEQKKAIVDLLFKTNRKVTVKQLKEDYFKKIECFDSVEISGVEDRFNASLGTYHDLLKIIKDKDFLDNEENEDILEDIVLTLTLFEDREMIEERLKTYAHLFDDKVMKQLKRRRYTGWGRLSRKLINGIRDKQSGKTILDFLKSDGFANRNFMQLIHDDSLTFKEDIQKAQVSGQGDSLHEHIANLAGSPAIKKGILQTVKVVDELVKVMGRHKPENIVIEMARENQTTQKGQKNSRERMKRIEEGIKELGSQILKEHPVENTQLQNEKLYLYYLQNGRDMYVDQELDINRLSDYDVDHIVPQSFLKDDSIDNKVLTRSDKARGKSDNVPSEEVVKKMKNYWRQLLNAKLITQRKFDNLTKAERGGLSELDKAGFIKRQLVETRQITKHVAQILDSRMNTKYDENDKLIREVKVITLKSKLVSDFRKDFQFYKVREINNYHHAHDAYLNAVVGTALIKKYPKLESEFVYGDYKVYDVRKMIAKSEQEIGKATAKYFFYSNIMNFFKTEITLANGEIRKRPLIETNGETGEIVWDKGRDFATVRKVLSMPQVNIVKKTEVQTGGFSKESILPKRNSDKLIARKKDWDPKKYGGFDSPTVAYSVLVVAKVEKGKSKKLKSVKELLGITIMERSSFEKNPIDFLEAKGYKEVKKDLIIKLPKYSLFELENGRKRMLASAGELQKGNELALPSKYVNFLYLASHYEKLKGSPEDNEQKQLFVEQHKHYLDEIIEQISEFSKRVILADANLDKVLSAYNKHRDKPIREQAENIIHLFTLTNLGAPAAFKYFDTTIDRKRYTSTKEVLDATLIHQSITGLYETRIDLSQLGGDGGPAPGSSGGTLNLEDEYRLYETSAEPEVSPGSTWLSDFPQAWAETGGMGLAVRQAPLIIPLKATSTPVSIKQYPMSQEAKLGIKPHIQRLLDQGILVPCQSPWNTPLLPVKKPGTNDYRPVQDLREVNKRVEDIHPTVPNPYNLLSGLPPSHRWYTVLDLKDAFFCLRLHPTSQPLFAFEWRDPGMGISGQLTWTRLPQGFKNSPTLFNEALHRDLADFRIQHPDLILLQYVDDILLAATSELDCQQGTRALLLTLGNLGYRASAKKAQLCQKQVKYLGYLLKEGQRWLTEARKETVMGQPTPKTPRQLREFLGTAGFCRLWIPGFAEMAAPLYPLTKPGTLFNWGPDQQKAYQEIKQALLTAPALGLPDLTKPFELFVDEKQGYAKGVLTQKLGPWRRPVAYLSKKLDPVAAGWPPCLRMVAAIAVLRKDAGKLTMGQPLVILAPHAVEALVKQPPDRWLSNARMTHYQAMLLDTDRVQFGPVVALNPATLLPLPEEGAPHDCLEILAETHGTRPDLTDQPIPDADHTWYTDGSSFLQEGQRKAGAAVTTETEVIWARALPAGTSAQRAELIALTQALKMAEGKRLNVYTDSRYAFATAHIHGEIYRRRGWLTSEGREIKNKSEILALLKALFLPKRLSIIHCLGHQKGDSAEARGNRLADQAAREAAIKTPPDTSTLLAGKRTADGSEFEKRTADGSEFESPKKKAKVE

SEQ ID NO: 6760 - protein, 2091 aa, synthetic construct; identical to SEQ ID NO: 4513

SEQ ID NO: 6761 - protein, 2091 aa, synthetic construct; identical to SEQ ID NO: 4513

SEQ ID NO: 6762 - protein, 2082 aa, synthetic construct
MPAAKRVKLDGGDKKYSIGLDIGTNSVGWAVITDEYKVPSKKFKVLGNTDRHSIKKNLIGALLFDSGETAEATRLKRTARRRYTRRKNRICYLQEIFSNEMAKVDDSFFHRLEESFLVEEDKKHERHPIFGNIVDEVAYHEKYPTIYHLRKKLVDSTDKADLRLIYLALAHMIKFRGHFLIEGDLNPDNSDVDKLFIQLVQTYNQLFEENPINASGVDAKAILSARLSKSRRLENLIAQLPGEKKNGLFGNLIALSLGLTPNFKSNFDLAEDAKLQLSKDTYDDDLDNLLAQIGDQYADLFLAAKNLSDAILLSDILRVNTEITKAPLSASMIKRYDEHHQDLTLLKALVRQQLPEKYKEIFFDQSKNGYAGYIDGGASQEEFYKFIKPILEKMDGTEELLVKLNREDLLRKQRTFDNGSIPHQIHLGELHAILRRQEDFYPFLKDNREKIEKILTFRIPYYVGPLARGNSRFAWMTRKSEETITPWNFEEVVDKGASAQSFIERMTNFDKNLPNEKVLPKHSLLYEYFTVYNELTKVKYVTEGMRKPAFLSGEQKKAIVDLLFKTNRKVTVKQLKEDYFKKIECFDSVEISGVEDRFNASLGTYHDLLKIIKDKDFLDNEENEDILEDIVLTLTLFEDREMIEERLKTYAHLFDDKVMKQLKRRRYTGWGRLSRKLINGIRDKQSGKTILDFLKSDGFANRNFMQLIHDDSLTFKEDIQKAQVSGQGDSLHEHIANLAGSPAIKKGILQTVKVVDELVKVMGRHKPENIVIEMARENQTTQKGQKNSRERMKRIEEGIKELGSQILKEHPVENTQLQNEKLYLYYLQNGRDMYVDQELDINRLSDYDVDHIVPQSFLKDDSIDNKVLTRSDKARGKSDNVPSEEVVKKMKNYWRQLLNAKLITQRKFDNLTKAERGGLSELDKAGFIKRQLVETRQITKHVAQILDSRMNTKYDENDKLIREVKVITLKSKLVSDFRKDFQFYKVREINNYHHAHDAYLNAVVGTALIKKYPKLESEFVYGDYKVYDVRKMIAKSEQEIGKATAKYFFYSNIMNFFKTEITLANGEIRKRPLIETNGETGEIVWDKGRDFATVRKVLSMPQVNIVKKTEVQTGGFSKESILPKRNSDKLIARKKDWDPKKYGGFDSPTVAYSVLVVAKVEKGKSKKLKSVKELLGITIMERSSFEKNPIDFLEAKGYKEVKKDLIIKLPKYSLFELENGRKRMLASAGELQKGNELALPSKYVNFLYLASHYEKLKGSPEDNEQKQLFVEQHKHYLDEIIEQISEFSKRVILADANLDKVLSAYNKHRDKPIREQAENIIHLFTLTNLGAPAAFKYFDTTIDRKRYTSTKEVLDATLIHQSITGLYETRIDLSQLGGDGGPAPGSSGGIPWLMKKPLQLTTLVPLQEYEERLLKQTMLTGSYKEKLQSLFLKYDALWQHWENQVGHRRIKPHHIATGTVNPRPQKQYPINPKAKASIQTVINDLLKQGVLIQQNSIMNTPVYPVPKPDGKWRMVLDYREVNKTIPLIAAQNQHSAGILSSIFRGKYKTTLDLSNGFWAHSITPESYWLTAFTWLGQQYCWTRLPQGFLNSPALFNADVVDLLKEVPNVQVYVDDIYISHDDPREHLEQLEKVFSLLLNAGYVVSLKKSEIAQHEVEFLGFNITKEGRGLTETFKQKLLNITPPRDLKQLQSILGKLNFARNFIPNFSELVKPLYNIIATAPGKYITWTTDNSQQLQNIISMLNSAENLEERNPEVRLIMKVNTSPSAGYIRFYNEFAKRPIMYLNYVYTKAEVKFTNTEKLLTTIHKGLIKALDLGMGQEILVYSPIVSMTKIQKTPLPERKALPIRWITWMSYLEDPRIQFHYDKTLPELQQVPTVTDDIIAKIKHPSEFSMVFYTDGSAIKHPNVNKSHNAGMGIAQVQFKPEFTVINTWSIPLGDHTAQLAEVAAVEFACKKALKIDGPVLIVTDSFYVAESVNKELPYWQSNGFFNNKKKPLKHVSKWKSIADCIQLKPDIIIIHEKGHQPTASTFHTEGNNLADKLATQGSYVVNAGKRTADGSEFEKRTADGSEFESPKKKAKVE

SEQ ID NO: 6763 - protein, 2012 aa, synthetic construct
MPAAKRVKLDGGDKKYSIGLDIGTNSVGWAVITDEYKVPSKKFKVLGNTDRHSIKKNLIGALLFDSGETAEATRLKRTARRRYTRRKNRICYLQEIFSNEMAKVDDSFFHRLEESFLVEEDKKHERHPIFGNIVDEVAYHEKYPTIYHLRKKLVDSTDKADLRLIYLALAHMIKFRGHFLIEGDLNPDNSDVDKLFIQLVQTYNQLFEENPINASGVDAKAILSARLSKSRRLENLIAQLPGEKKNGLFGNLIALSLGLTPNFKSNFDLAEDAKLQLSKDTYDDDLDNLLAQIGDQYADLFLAAKNLSDAILLSDILRVNTEITKAPLSASMIKRYDEHHQDLTLLKALVRQQLPEKYKEIFFDQSKNGYAGYIDGGASQEEFYKFIKPILEKMDGTEELLVKLNREDLLRKQRTFDNGSIPHQIHLGELHAILRRQEDFYPFLKDNREKIEKILTFRIPYYVGPLARGNSRFAWMTRKSEETITPWNFEEVVDKGASAQSFIERMTNFDKNLPNEKVLPKHSLLYEYFTVYNELTKVKYVTEGMRKPAFLSGEQKKAIVDLLFKTNRKVTVKQLKEDYFKKIECFDSVEISGVEDRFNASLGTYHDLLKIIKDKDFLDNEENEDILEDIVLTLTLFEDREMIEERLKTYAHLFDDKVMKQLKRRRYTGWGRLSRKLINGIRDKQSGKTILDFLKSDGFANRNFMQLIHDDSLTFKEDIQKAQVSGQGDSLHEHIANLAGSPAIKKGILQTVKVVDELVKVMGRHKPENIVIEMARENQTTQKGQKNSRERMKRIEEGIKELGSQILKEHPVENTQLQNEKLYLYYLQNGRDMYVDQELDINRLSDYDVDHIVPQSFLKDDSIDNKVLTRSDKARGKSDNVPSEEVVKKMKNYWRQLLNAKLITQRKFDNLTKAERGGLSELDKAGFIKRQLVETRQITKHVAQILDSRMNTKYDENDKLIREVKVITLKSKLVSDFRKDFQFYKVREINNYHHAHDAYLNAVVGTALIKKYPKLESEFVYGDYKVYDVRKMIAKSEQEIGKATAKYFFYSNIMNFFKTEITLANGEIRKRPLIETNGETGEIVWDKGRDFATVRKVLSMPQVNIVKKTEVQTGGFSKESILPKRNSDKLIARKKDWDPKKYGGFDSPTVAYSVLVVAKVEKGKSKKLKSVKELLGITIMERSSFEKNPIDFLEAKGYKEVKKDLIIKLPKYSLFELENGRKRMLASAGELQKGNELALPSKYVNFLYLASHYEKLKGSPEDNEQKQLFVEQHKHYLDEIIEQISEFSKRVILADANLDKVLSAYNKHRDKPIREQAENIIHLFTLTNLGAPAAFKYFDTTIDRKRYTSTKEVLDATLIHQSITGLYETRIDLSQLGGDGGPAPGSSGGPRSRAIDIPVPHADKISWKITDPVWVDQWPLTYEKTLAAIALVQEQLAAGHIEPTNSPWNTPIFIIKKKSGSWRLLQDLRAVNKVMVPMGALQPGLPSPVAIPLNYHKIVIDLKDCFFTIPLHPEDRPYFAFSVPQINFQSPMPRYQWKVLPQGMANSPTLCQKFVAAAIAPVRSQWPEAYILHYMDDILLACDSAEAAKACYAHIISCLTSYGLKIAPDKVQVSEPFSYLGFELHHQQVFTPRVCLKTDHLKTLNDFQKLLGDIQWLRPYLKLPTSALVPLNNILKPDPNPLSVRALTPEAKQSLALINKAIQNQSVQQISYNLPLVLLLLPTPHTPTAVFWQPNGTDPTKNGSPLLWLHLPASPSKVLLTYPSLLAMLIIKGRYTGRQLFGRDPHSIIIPYTQDQLTWLLQTSDEWAIALSSFTGDIDNHYPSDPVIQFAKLHQFIFPKITKCAPIPQATLVFTDGSSNGIAAYVIDNQPISIKSPYLSAQLVELYAILQVFTVLAHQPFNLYTDSAYIAQSVPLLETVPFIKSSTNATPLFSKLQQLILNRQHPFFIGHLRAHLNLPGPLAEGNALADAATQIFPIISDAGKRTADGSEFEKRTADGSEFESPKKKAKVE

SEQ ID NO: 6764 - protein, 2091 aa, synthetic construct
MPAAKRVKLDGGDKKYSIGLDIGTNSVGWAVITDEYKVPSKKFKVLGNTDRHSIKKNLIGALLFDSGETAEATRLKRTARRRYTRRKNRICYLQEIFSNEMAKVDDSFFHRLEESFLVEEDKKHERHPIFGNIVDEVAYHEKYPTIYHLRKKLVDSTDKADLRLIYLALAHMIKFRGHFLIEGDLNPDNSDVDKLFIQLVQTYNQLFEENPINASGVDAKAILSARLSKSRRLENLIAQLPGEKKNGLFGNLIALSLGLTPNFKSNFDLAEDAKLQLSKDTYDDDLDNLLAQIGDQYADLFLAAKNLSDAILLSDILRVNTEITKAPLSASMIKRYDEHHQDLTLLKALVRQQLPEKYKEIFFDQSKNGYAGYIDGGASQEEFYKFIKPILEKMDGTEELLVKLNREDLLRKQRTFDNGSIPHQIHLGELHAILRRQEDFYPFLKDNREKIEKILTFRIPYYVGPLARGNSRFAWMTRKSEETITPWNFEEVVDKGASAQSFIERMTNFDKNLPNEKVLPKHSLLYEYFTVYNELTKVKYVTEGMRKPAFLSGEQKKAIVDLLFKTNRKVTVKQLKEDYFKKIECFDSVEISGVEDRFNASLGTYHDLLKIIKDKDFLDNEENEDILEDIVLTLTLFEDREMIEERLKTYAHLFDDKVMKQLKRRRYTGWGRLSRKLINGIRDKQSGKTILDFLKSDGFANRNFMQLIHDDSLTFKEDIQKAQVSGQGDSLHEHIANLAGSPAIKKGILQTVKVVDELVKVMGRHKPENIVIEMARENQTTQKGQKNSRERMKRIEEGIKELGSQILKEHPVENTQLQNEKLYLYYLQNGRDMYVDQELDINRLSDYDVDHIVPQSFLKDDSIDNKVLTRSDKARGKSDNVPSEEVVKKMKNYWRQLLNAKLITQRKFDNLTKAERGGLSELDKAGFIKRQLVETRQITKHVAQILDSRMNTKYDENDKLIREVKVITLKSKLVSDFRKDFQFYKVREINNYHHAHDAYLNAVVGTALIKKYPKLESEFVYGDYKVYDVRKMIAKSEQEIGKATAKYFFYSNIMNFFKTEITLANGEIRKRPLIETNGETGEIVWDKGRDFATVRKVLSMPQVNIVKKTEVQTGGFSKESILPKRNSDKLIARKKDWDPKKYGGFDSPTVAYSVLVVAKVEKGKSKKLKSVKELLGITIMERSSFEKNPIDFLEAKGYKEVKKDLIIKLPKYSLFELENGRKRMLASAGELQKGNELALPSKYVNFLYLASHYEKLKGSPEDNEQKQLFVEQHKHYLDEIIEQISEFSKRVILADANLDKVLSAYNKHRDKPIREQAENIIHLFTLTNLGAPAAFKYFDTTIDRKRYTSTKEVLDATLIHQSITGLYETRIDLSQLGGDGGPAPGSSGGTLNIEDEYRLHETSKEPDVPLGSTWLSDFPQAWAETGGMGLAVRQAPLIIPLKATSTPVSIKQYPMSQEARLGIKPHIQRLLDQGILVPCQSPWNTPLLPVKKPGTNDYRPVQDLREVNKRVEDIHPTVPNPYNLLSGLPPSHQWYTVLDLKDAFFCLRLHPTSQPLFAFEWRDPEMGISGQLTWTRLPQGFKNSPTLFNEALHRDLADFRIQHPDLILLQYVDDLLLAATSEQDCQRGTRALLQTLGNLGYRASAKKAQICQKQVKYLGYLLKEGQRWLTEARKETVMGQPTPKTPRQLREFLGKAGFCRLFIPGFAEMAAPLYPLTKPGTLFNWGPDQQKAYQEIKQALLTAPALGLPDLTKPFELFVDEKQGYAKGVLTQKLGPWRRPVAYLSKKLDPVAAGWPPCLRMVAAIAVLTKDAGKLTMGQPLVILAPHAVEALVKQPPDRWLSNARMTHYQAMLLDTDRVQFGPVVALNPATLLPLPEKEAPHDCLEILAETHGTRPDLTDQPIPDADYTWYTDGSSFLQEGQRRAGAAVTTETEVIWARALPAGTSAQRAELIALTQALKMAEGKKLNVYTDSRYAFATAHVHGEIYRRRGWLTSEGREIKNKNEILALLKALFLPKRLSIIHCPGHQKGNSAEARGNRMADQAAREAAMKAVLETSTLLAGKRTADGSEFEKRTADGSEFESPKKKAKVE

SEQ ID NO: 6765 - protein, 2095 aa, synthetic construct
MPAAKRVKLDGGDKKYSIGLDIGTNSVGWAVITDEYKVPSKKFKVLGNTDRHSIKKNLIGALLFDSGETAEATRLKRTARRRYTRRKNRICYLQEIFSNEMAKVDDSFFHRLEESFLVEEDKKHERHPIFGNIVDEVAYHEKYPTIYHLRKKLVDSTDKADLRLIYLALAHMIKFRGHFLIEGDLNPDNSDVDKLFIQLVQTYNQLFEENPINASGVDAKAILSARLSKSRRLENLIAQLPGEKKNGLFGNLIALSLGLTPNFKSNFDLAEDAKLQLSKDTYDDDLDNLLAQIGDQYADLFLAAKNLSDAILLSDILRVNTEITKAPLSASMIKRYDEHHQDLTLLKALVRQQLPEKYKEIFFDQSKNGYAGYIDGGASQEEFYKFIKPILEKMDGTEELLVKLNREDLLRKQRTFDNGSIPHQIHLGELHAILRRQEDFYPFLKDNREKIEKILTFRIPYYVGPLARGNSRFAWMTRKSEETITPWNFEEVVDKGASAQSFIERMTNFDKNLPNEKVLPKHSLLYEYFTVYNELTKVKYVTEGMRKPAFLSGEQKKAIVDLLFKTNRKVTVKQLKEDYFKKIECFDSVEISGVEDRFNASLGTYHDLLKIIKDKDFLDNEENEDILEDIVLTLTLFEDREMIEERLKTYAHLFDDKVMKQLKRRRYTGWGRLSRKLINGIRDKQSGKTILDFLKSDGFANRNFMQLIHDDSLTFKEDIQKAQVSGQGDSLHEHIANLAGSPAIKKGILQTVKVVDELVKVMGRHKPENIVIEMARENQTTQKGQKNSRERMKRIEEGIKELGSQILKEHPVENTQLQNEKLYLYYLQNGRDMYVDQELDINRLSDYDVDHIVPQSFLKDDSIDNKVLTRSDKARGKSDNVPSEEVVKKMKNYWRQLLNAKLITQRKFDNLTKAERGGLSELDKAGFIKRQLVETRQITKHVAQILDSRMNTKYDENDKLIREVKVITLKSKLVSDFRKDFQFYKVREINNYHHAHDAYLNAVVGTALIKKYPKLESEFVYGDYKVYDVRKMIAKSEQEIGKATAKYFFYSNIMNFFKTEITLANGEIRKRPLIETNGETGEIVWDKGRDFATVRKVLSMPQVNIVKKTEVQTGGFSKESILPKRNSDKLIARKKDWDPKKYGGFDSPTVAYSVLVVAKVEKGKSKKLKSVKELLGITIMERSSFEKNPIDFLEAKGYKEVKKDLIIKLPKYSLFELENGRKRMLASAGELQKGNELALPSKYVNFLYLASHYEKLKGSPEDNEQKQLFVEQHKHYLDEIIEQISEFSKRVILADANLDKVLSAYNKHRDKPIREQAENIIHLFTLTNLGAPAAFKYFDTTIDRKRYTSTKEVLDATLIHQSITGLYETRIDLSQLGGDGGEAAAKPAPGGTAPLEEEYRLFLEAPIQNVTLLEQWKREIPKVWAEINPPGLASTQAPIHVQLLSTALPVRVRQYPITLEAKRSLRETIRKFRAAGILRPVHSPWNTPLLPVRKSGTSEYRMVQDLREVNKRVETIHPTVPNPYTLLSLLPPDRIWYSVLDLKDAFFCIPLAPESQLIFAFEWADAEEGESGQLTWTRLPQGFKNSPTLFNEALNRDLQGFRLDHPSVSLLQYVDDLLIAADTQAACLSATRDLLMTLAELGYRVSGKKAQLCQEEVTYLGFKIHKGSRSLSNSRTQAILQIPVPKTKRQVREFLGKIGYCRLFIPGFAELAQPLYAATRPGNDPLVWGEKEEEAFQSLKLALTQPPALALPSLDKPFQLFVEETSGAAKGVLTQALGPWKRPVAYLSKRLDPVAAGWPRCLRAIAAAALLTREASKLTFGQDIEITSSHNLESLLRSPPDKWLTNARITQYQVLLLDPPRVRFKQTAALNPATLLPETDDTLPIHHCLDTLDSLTSTRPDLTDQPLAQAEATLFTDGSSYIRDGKRYAGAAVVTLDSVIWAEPLPIGTSAQKAELIALTKALEWSKDKSVNIYTDSRYAFATLHVHGMIYRERGWLTAGGKAIKNAPEILALLTAVWLPKRVAVMHCKGHQKDDAPTSTGNRRADEVAREVAIRPLSTQATISAGKRTADGSEFEKRTADGSEFESPKKKAKVE

SEQ ID NO: 6766 - protein, 2084 aa, synthetic construct
MPAAKRVKLDGGDKKYSIGLDIGTNSVGWAVITDEYKVPSKKFKVLGNTDRHSIKKNLIGALLFDSGETAEATRLKRTARRRYTRRKNRICYLQEIFSNEMAKVDDSFFHRLEESFLVEEDKKHERHPIFGNIVDEVAYHEKYPTIYHLRKKLVDSTDKADLRLIYLALAHMIKFRGHFLIEGDLNPDNSDVDKLFIQLVQTYNQLFEENPINASGVDAKAILSARLSKSRRLENLIAQLPGEKKNGLFGNLIALSLGLTPNFKSNFDLAEDAKLQLSKDTYDDDLDNLLAQIGDQYADLFLAAKNLSDAILLSDILRVNTEITKAPLSASMIKRYDEHHQDLTLLKALVRQQLPEKYKEIFFDQSKNGYAGYIDGGASQEEFYKFIKPILEKMDGTEELLVKLNREDLLRKQRTFDNGSIPHQIHLGELHAILRRQEDFYPFLKDNREKIEKILTFRIPYYVGPLARGNSRFAWMTRKSEETITPWNFEEVVDKGASAQSFIERMTNFDKNLPNEKVLPKHSLLYEYFTVYNELTKVKYVTEGMRKPAFLSGEQKKAIVDLLFKTNRKVTVKQLKEDYFKKIECFDSVEISGVEDRFNASLGTYHDLLKIIKDKDFLDNEENEDILEDIVLTLTLFEDREMIEERLKTYAHLFDDKVMKQLKRRRYTGWGRLSRKLINGIRDKQSGKTILDFLKSDGFANRNFMQLIHDDSLTFKEDIQKAQVSGQGDSLHEHIANLAGSPAIKKGILQTVKVVDELVKVMGRHKPENIVIEMARENQTTQKGQKNSRERMKRIEEGIKELGSQILKEHPVENTQLQNEKLYLYYLQNGRDMYVDQELDINRLSDYDVDHIVPQSFLKDDSIDNKVLTRSDKARGKSDNVPSEEVVKKMKNYWRQLLNAKLITQRKFDNLTKAERGGLSELDKAGFIKRQLVETRQITKHVAQILDSRMNTKYDENDKLIREVKVITLKSKLVSDFRKDFQFYKVREINNYHHAHDAYLNAVVGTALIKKYPKLESEFVYGDYKVYDVRKMIAKSEQEIGKATAKYFFYSNIMNFFKTEITLANGEIRKRPLIETNGETGEIVWDKGRDFATVRKVLSMPQVNIVKKTEVQTGGFSKESILPKRNSDKLIARKKDWDPKKYGGFDSPTVAYSVLVVAKVEKGKSKKLKSVKELLGITIMERSSFEKNPIDFLEAKGYKEVKKDLIIKLPKYSLFELENGRKRMLASAGELQKGNELALPSKYVNFLYLASHYEKLKGSPEDNEQKQLFVEQHKHYLDEIIEQISEFSKRVILADANLDKVLSAYNKHRDKPIREQAENIIHLFTLTNLGAPAAFKYFDTTIDRKRYTSTKEVLDATLIHQSITGLYETRIDLSQLGGDGGEAAAKPAPGGVPWILKKPLELTIKLDLEEQQGTLLNNSILSKKGKEELKQLFEKYSALWQSWENQVGHRRIRPHKIATGTVKPTPQKQYHINPKAKPDIQIVINDLLKQGVLIQKESTMNTPVYPVPKPNGRWRMVLDYRAVNKVTPLIAVQNQHSYGILGSLFKGRYKTTIDLSNGFWAHPIVPEDYWITAFTWQGKQYCWTVLPQGFLNSPGLFNGDVVDLLQGIPNVEVYVDDVYISHDSEKEHLEYLDILFNRLKEAGYIISLKKSNIANSIVDFLGFQITNEGRGLTDTFKEKLENITAPTTLKQLQSILGLLNFARNFIPDFTELIAPLYALIPKSPKNYVPWQIEHSTTLETLITKLNGAEYLQGRKGDKTLIMKVNASYTTGYIRYYNEGEKKPISYVSIVFSKTELKFTELEKLLTTVHKGLLKALDLSMGQNIHVYSPIVSMQNIQKTPQTAKKALASRWLSWLSYLEDPRIRFFYDPQMPALKDLPAVDTGKDNKKHPSNFQHIFYTDGSAITSPTKEGHLNAGMGIVYFINKDGNLQKQQEWSISLGNHTAQFAEIAAFEFALKKCLPLGGNILVVTDSNYVAKAYNEELDVWASNGFVNNRKKPLKHISKWKSVADLKRLRPDVVVTHEPGHQKLDSSPHAYGNNLADQLATQASFKVHAGKRTADGSEFEKRTADGSEFESPKKKAKVE

SEQ ID NO: 6767 - protein, 2084 aa, synthetic construct
MPAAKRVKLDGGDKKYSIGLDIGTNSVGWAVITDEYKVPSKKFKVLGNTDRHSIKKNLIGALLFDSGETAEATRLKRTARRRYTRRKNRICYLQEIFSNEMAKVDDSFFHRLEESFLVEEDKKHERHPIFGNIVDEVAYHEKYPTIYHLRKKLVDSTDKADLRLIYLALAHMIKFRGHFLIEGDLNPDNSDVDKLFIQLVQTYNQLFEENPINASGVDAKAILSARLSKSRRLENLIAQLPGEKKNGLFGNLIALSLGLTPNFKSNFDLAEDAKLQLSKDTYDDDLDNLLAQIGDQYADLFLAAKNLSDAILLSDILRVNTEITKAPLSASMIKRYDEHHQDLTLLKALVRQQLPEKYKEIFFDQSKNGYAGYIDGGASQEEFYKFIKPILEKMDGTEELLVKLNREDLLRKQRTFDNGSIPHQIHLGELHAILRRQEDFYPFLKDNREKIEKILTFRIPYYVGPLARGNSRFAWMTRKSEETITPWNFEEVVDKGASAQSFIERMTNFDKNLPNEKVLPKHSLLYEYFTVYNELTKVKYVTEGMRKPAFLSGEQKKAIVDLLFKTNRKVTVKQLKEDYFKKIECFDSVEISGVEDRFNASLGTYHDLLKIIKDKDFLDNEENEDILEDIVLTLTLFEDREMIEERLKTYAHLFDDKVMKQLKRRRYTGWGRLSRKLINGIRDKQSGKTILDFLKSDGFANRNFMQLIHDDSLTFKEDIQKAQVSGQGDSLHEHIANLAGSPAIKKGILQTVKVVDELVKVMGRHKPENIVIEMARENQTTQKGQKNSRERMKRIEEGIKELGSQILKEHPVENTQLQNEKLYLYYLQNGRDMYVDQELDINRLSDYDVDHIVPQSFLKDDSIDNKVLTRSDKARGKSDNVPSEEVVKKMKNYWRQLLNAKLITQRKFDNLTKAERGGLSELDKAGFIKRQLVETRQITKHVAQILDSRMNTKYDENDKLIREVKVITLKSKLVSDFRKDFQFYKVREINNYHHAHDAYLNAVVGTALIKKYPKLESEFVYGDYKVYDVRKMIAKSEQEIGKATAKYFFYSNIMNFFKTEITLANGEIRKRPLIETNGETGEIVWDKGRDFATVRKVLSMPQVNIVKKTEVQTGGFSKESILPKRNSDKLIARKKDWDPKKYGGFDSPTVAYSVLVVAKVEKGKSKKLKSVKELLGITIMERSSFEKNPIDFLEAKGYKEVKKDLIIKLPKYSLFELENGRKRMLASAGELQKGNELALPSKYVNFLYLASHYEKLKGSPEDNEQKQLFVEQHKHYLDEIIEQISEFSKRVILADANLDKVLSAYNKHRDKPIREQAENIIHLFTLTNLGAPAAFKYFDTTIDRKRYTSTKEVLDATLIHQSITGLYETRIDLSQLGGDGGEAAAKPAPGGVPWLTQQPLQLTILVPLQEYQEKILSKTALPEDQKQQLKTLFVKYDNLWQHWENQVGHRKIRPHNIATGDYPPRPQKQYPINPKAKPSIQIVIDDLLKQGVLTPQNSTMNTPVYPVPKPDGRWRMVLDYREVNKTIPLTAAQNQHSAGILATIVRQKYKTTLDLANGFWAHPITPESYWLTAFTWQGKQYCWTRLPQGFLNSPALFNADVVDLLKEIPNVQVYVDDIYLSHDDPKEHVQQLEKVFQILLQAGYVVSLKKSEIGQKTVEFLGFNITKEGRGLTDTFKTKLLNITPPKDLKQLQSILGKLNFARNFIPNFAELVQPLYNLIAPAKGKYIEWSEENTKQLNMVIEALNTASNLEERLPEQRLVIKVNTSPSAGYVRYYNETGKKPIMYLNYVFSKAELKFSMLEKLLTTMHKALIKAMDLAMGQEILVYSPIVSMTKIQKTPLPERKALPIRWITWMTYLEDPRIQFHYDKTLPELKHIPDVYTSSQSPVKHPSQYEGVFYTDGSAIKSPDPTKSNNAGMGIVHATYKPEYQVLNQWSIPLGNHTAQMAEIAAVEFACKKALKIPGPVLVITDSFYVAESANKELPYWKSNGFVNNKKKPLKHISKWKSIAECLSMKPDITIQHEKGISLQIPVFILKGNALADKLATQGSYVVNAGKRTADGSEFEKRTADGSEFESPKKKAKVE

SEQ ID NO: 6768 - protein, 2173 aa, synthetic construct
MPAAKRVKLDGGDKKYSIGLDIGTNSVGWAVITDEYKVPSKKFKVLGNTDRHSIKKNLIGALLFDSGETAEATRLKRTARRRYTRRKNRICYLQEIFSNEMAKVDDSFFHRLEESFLVEEDKKHERHPIFGNIVDEVAYHEKYPTIYHLRKKLVDSTDKADLRLIYLALAHMIKFRGHFLIEGDLNPDNSDVDKLFIQLVQTYNQLFEENPINASGVDAKAILSARLSKSRRLENLIAQLPGEKKNGLFGNLIALSLGLTPNFKSNFDLAEDAKLQLSKDTYDDDLDNLLAQIGDQYADLFLAAKNLSDAILLSDILRVNTEITKAPLSASMIKRYDEHHQDLTLLKALVRQQLPEKYKEIFFDQSKNGYAGYIDGGASQEEFYKFIKPILEKMDGTEELLVKLNREDLLRKQRTFDNGSIPHQIHLGELHAILRRQEDFYPFLKDNREKIEKILTFRIPYYVGPLARGNSRFAWMTRKSEETITPWNFEEVVDKGASAQSFIERMTNFDKNLPNEKVLPKHSLLYEYFTVYNELTKVKYVTEGMRKPAFLSGEQKKAIVDLLFKTNRKVTVKQLKEDYFKKIECFDSVEISGVEDRFNASLGTYHDLLKIIKDKDFLDNEENEDILEDIVLTLTLFEDREMIEERLKTYAHLFDDKVMKQLKRRRYTGWGRLSRKLINGIRDKQSGKTILDFLKSDGFANRNFMQLIHDDSLTFKEDIQKAQVSGQGDSLHEHIANLAGSPAIKKGILQTVKVVDELVKVMGRHKPENIVIEMARENQTTQKGQKNSRERMKRIEEGIKELGSQILKEHPVENTQLQNEKLYLYYLQNGRDMYVDQELDINRLSDYDVDHIVPQSFLKDDSIDNKVLTRSDKARGKSDNVPSEEVVKKMKNYWRQLLNAKLITQRKFDNLTKAERGGLSELDKAGFIKRQLVETRQITKHVAQILDSRMNTKYDENDKLIREVKVITLKSKLVSDFRKDFQFYKVREINNYHHAHDAYLNAVVGTALIKKYPKLESEFVYGDYKVYDVRKMIAKSEQEIGKATAKYFFYSNIMNFFKTEITLANGEIRKRPLIETNGETGEIVWDKGRDFATVRKVLSMPQVNIVKKTEVQTGGFSKESILPKRNSDKLIARKKDWDPKKYGGFDSPTVAYSVLVVAKVEKGKSKKLKSVKELLGITIMERSSFEKNPIDFLEAKGYKEVKKDLIIKLPKYSLFELENGRKRMLASAGELQKGNELALPSKYVNFLYLASHYEKLKGSPEDNEQKQLFVEQHKHYLDEIIEQISEFSKRVILADANLDKVLSAYNKHRDKPIREQAENIIHLFTLTNLGAPAAFKYFDTTIDRKRYTSTKEVLDATLIHQSITGLYETRIDLSQLGGDGGEAAAKPAPGGMNPLQLLQPLPAEIKGTKLLAHWNSGATITCIPESFLEDEQPIKKTLIKTIHGEKQQNVYYVTFKVKGRKVEAEVIASPYEYILLSPTDVPWLTQQPLQLTILVPLQEYQEKILSKTALPEDQKQQLKTLFVKYDNLWQHWENQVGHRKIRPHNIATGDYPPRPQKQYPINPKAKPSIQIVIDDLLKQGVLTPQNSTMNTPVYPVPKPDGRWRMVLDYREVNKTIPLTAAQNQHSAGILATIVRQKYKTTLDLANGFWAHPITPESYWLTAFTWQGKQYCWTRLPQGFLNSPALFNADVVDLLKEIPNVQVYVDDIYLSHDDPKEHVQQLEKVFQILLQAGYVVSLKKSEIGQKTVEFLGFNITKEGRGLTDTFKTKLLNITPPKDLKQLQSILGKLNFARNFIPNFAELVQPLYNLIAPAKGKYIEWSEENTKQLNMVIEALNTASNLEERLPEQRLVIKVNTSPSAGYVRYYNETGKKPIMYLNYVFSKAELKFSMLEKLLTTMHKALIKAMDLAMGQEILVYSPIVSMTKIQKTPLPERKALPIRWITWMTYLEDPRIQFHYDKTLPELKHIPDVYTSSQSPVKHPSQYEGVFYTDGSAIKSPDPTKSNNAGMGIVHATYKPEYQVLNQWSIPLGNHTAQMAEIAAVEFACKKALKIPGPVLVITDSFYVAESANKELPYWKSNGFVNNKKKPLKHISKWKSIAECLSMKPDITIQHEKGISLQIPVFILKGNALADKLATQGSYVVNAGKRTADGSEFEKRTADGSEFESPKKKAKVE

SEQ ID NO: 6769 - protein, 2091 aa, synthetic construct
MPAAKRVKLDGGDKKYSIGLDIGTNSVGWAVITDEYKVPSKKFKVLGNTDRHSIKKNLIGALLFDSGETAEATRLKRTARRRYTRRKNRICYLQEIFSNEMAKVDDSFFHRLEESFLVEEDKKHERHPIFGNIVDEVAYHEKYPTIYHLRKKLVDSTDKADLRLIYLALAHMIKFRGHFLIEGDLNPDNSDVDKLFIQLVQTYNQLFEENPINASGVDAKAILSARLSKSRRLENLIAQLPGEKKNGLFGNLIALSLGLTPNFKSNFDLAEDAKLQLSKDTYDDDLDNLLAQIGDQYADLFLAAKNLSDAILLSDILRVNTEITKAPLSASMIKRYDEHHQDLTLLKALVRQQLPEKYKEIFFDQSKNGYAGYIDGGASQEEFYKFIKPILEKMDGTEELLVKLNREDLLRKQRTFDNGSIPHQIHLGELHAILRRQEDFYPFLKDNREKIEKILTFRIPYYVGPLARGNSRFAWMTRKSEETITPWNFEEVVDKGASAQSFIERMTNFDKNLPNEKVLPKHSLLYEYFTVYNELTKVKYVTEGMRKPAFLSGEQKKAIVDLLFKTNRKVTVKQLKEDYFKKIECFDSVEISGVEDRFNASLGTYHDLLKIIKDKDFLDNEENEDILEDIVLTLTLFEDREMIEERLKTYAHLFDDKVMKQLKRRRYTGWGRLSRKLINGIRDKQSGKTILDFLKSDGFANRNFMQLIHDDSLTFKEDIQKAQVSGQGDSLHEHIANLAGSPAIKKGILQTVKVVDELVKVMGRHKPENIVIEMARENQTTQKGQKNSRERMKRIEEGIKELGSQILKEHPVENTQLQNEKLYLYYLQNGRDMYVDQELDINRLSDYDVDHIVPQSFLKDDSIDNKVLTRSDKARGKSDNVPSEEVVKKMKNYWRQLLNAKLITQRKFDNLTKAERGGLSELDKAGFIKRQLVETRQITKHVAQILDSRMNTKYDENDKLIREVKVITLKSKLVSDFRKDFQFYKVREINNYHHAHDAYLNAVVGTALIKKYPKLESEFVYGDYKVYDVRKMIAKSEQEIGKATAKYFFYSNIMNFFKTEITLANGEIRKRPLIETNGETGEIVWDKGRDFATVRKVLSMPQVNIVKKTEVQTGGFSKESILPKRNSDKLIARKKDWDPKKYGGFDSPTVAYSVLVVAKVEKGKSKKLKSVKELLGITIMERSSFEKNPIDFLEAKGYKEVKKDLIIKLPKYSLFELENGRKRMLASAGELQKGNELALPSKYVNFLYLASHYEKLKGSPEDNEQKQLFVEQHKHYLDEIIEQISEFSKRVILADANLDKVLSAYNKHRDKPIREQAENIIHLFTLTNLGAPAAFKYFDTTIDRKRYTSTKEVLDATLIHQSITGLYETRIDLSQLGGDGGEAAAKPAPGGVLNLEEEYRLHEKPVPSSIDPSWLQLFPTVWAERAGMGLANQVPPVVVELRSGASPVAVRQYPMSKEAREGIRPHIQKFLDLGVLVPCRSPWNTPLLPVKKPGTNDYRPVQDLREINKRVQDIHPTVPNPYNLLSSLPPSYTWYSVLDLKDAFFCLRLHPNSQPLFAFEWKDPEKGNTGQLTWTRLPQGFKNSPTLFNEALHRDLAPFRALNPQVVLLQYVDDLLVAAPTYEDCKKGTQKLLQELSKLGYRVSAKKAQLCQREVTYLGYLLKEGKRWLTPARKATVMKIPVPTTPRQVREFLGKAGFCRLFIPGFASLAAPLYPLTKPSIPFIWTEEHQQAFDHIKKALLSAPALALPDLTKPFTLYIDERAGVARGVLTQTLGPWRRPVAYLSKKLDPVASGWPTCLKAVAAVALLLKDADKLTLGQNVTVIASHSLESIVRQPPDRWMTNARMTHYQSLLLNERVSFAPPAVLNPATLLPVESEATPVHRCSEILAEETGTRRDLEDQPLPGVPTWYTDGSSFITEGKRRAGAPIVDGKRTVWASSLPEGTSAQKAELVALTQALRLAEGKNINIYTDSRYAFATAHIHGAIYKQRGWLTSAGKDIKNKEEILALLEAIHLPRRVAIIHCPGHQRGSNPVATGNRRADEAAKQAALSTRVLAGTTKPAGKRTADGSEFEKRTADGSEFESPKKKAKVE

SEQ ID NO: 6770 - protein, 2124 aa, synthetic construct
MPAAKRVKLDGGDKKYSIGLDIGTNSVGWAVITDEYKVPSKKFKVLGNTDRHSIKKNLIGALLFDSGETAEATRLKRTARRRYTRRKNRICYLQEIFSNEMAKVDDSFFHRLEESFLVEEDKKHERHPIFGNIVDEVAYHEKYPTIYHLRKKLVDSTDKADLRLIYLALAHMIKFRGHFLIEGDLNPDNSDVDKLFIQLVQTYNQLFEENPINASGVDAKAILSARLSKSRRLENLIAQLPGEKKNGLFGNLIALSLGLTPNFKSNFDLAEDAKLQLSKDTYDDDLDNLLAQIGDQYADLFLAAKNLSDAILLSDILRVNTEITKAPLSASMIKRYDEHHQDLTLLKALVRQQLPEKYKEIFFDQSKNGYAGYIDGGASQEEFYKFIKPILEKMDGTEELLVKLNREDLLRKQRTFDNGSIPHQIHLGELHAILRRQEDFYPFLKDNREKIEKILTFRIPYYVGPLARGNSRFAWMTRKSEETITPWNFEEVVDKGASAQSFIERMTNFDKNLPNEKVLPKHSLLYEYFTVYNELTKVKYVTEGMRKPAFLSGEQKKAIVDLLFKTNRKVTVKQLKEDYFKKIECFDSVEISGVEDRFNASLGTYHDLLKIIKDKDFLDNEENEDILEDIVLTLTLFEDREMIEERLKTYAHLFDDKVMKQLKRRRYTGWGRLSRKLINGIRDKQSGKTILDFLKSDGFANRNFMQLIHDDSLTFKEDIQKAQVSGQGDSLHEHIANLAGSPAIKKGILQTVKVVDELVKVMGRHKPENIVIEMARENQTTQKGQKNSRERMKRIEEGIKELGSQILKEHPVENTQLQNEKLYLYYLQNGRDMYVDQELDINRLSDYDVDHIVPQSFLKDDSIDNKVLTRSDKARGKSDNVPSEEVVKKMKNYWRQLLNAKLITQRKFDNLTKAERGGLSELDKAGFIKRQLVETRQITKHVAQILDSRMNTKYDENDKLIREVKVITLKSKLVSDFRKDFQFYKVREINNYHHAHDAYLNAVVGTALIKKYPKLESEFVYGDYKVYDVRKMIAKSEQEIGKATAKYFFYSNIMNFFKTEITLANGEIRKRPLIETNGETGEIVWDKGRDFATVRKVLSMPQVNIVKKTEVQTGGFSKESILPKRNSDKLIARKKDWDPKKYGGFDSPTVAYSVLVVAKVEKGKSKKLKSVKELLGITIMERSSFEKNPIDFLEAKGYKEVKKDLIIKLPKYSLFELENGRKRMLASAGELQKGNELALPSKYVNFLYLASHYEKLKGSPEDNEQKQLFVEQHKHYLDEIIEQISEFSKRVILADANLDKVLSAYNKHRDKPIREQAENIIHLFTLTNLGAPAAFKYFDTTIDRKRYTSTKEVLDATLIHQSITGLYETRIDLSQLGGDGGEAAAKPAPGGLLGRDLLTKLKAQIQFSTEGPQVTWEDRPAMCLVLNLEEEYRLHEKPVPPSIDPSWLQLFPMVWAEKAGMGLANQVPPVVVELKSDASPVAVRQYPMSKEAREGIRPHIQRFLDLGILVPCQSPWNTPLLPVKKPGTNDYRPVQDLREVNKRVQDIHPTVPNPYNLLSSLPPSHTWYSVLDLKDAFFCLKLHPNSQPLFAFEWRDPEKGNTGQLTWTRLPQGFKNSPTLFNEALHRDLASFRALNPQVVMLQYVDDLLVAAPTYRDCKEGTRRLLQELSKLGYRVSAKKAQLCREEVTYLGYLLKGGKRWLTPARKATVMKIPTPTTPRQVREFLGTAGFCRLWIPGFASLAAPLYPLTRPKVPFTWTEAHQEAFGRIKEALLSAPALALPDLTKPFALYVDEKEGVARGVLTQTLGPWRRPVAYLSKKLDPVASGWPTCLKAIAAVALLLKDADKLTLGQNVLVIAPHNLESIVRQPPDRWMTNARMTHYQSLLLNERVSFAPPAILNPATLLPVESDDTPIHICSEILAEETGTRPDLRDQPLPGVPAWYTDGSSFIMDGRRQAGAAIVDNKRTVWASNLPEGTSAQKAELIALTQALRLAEGKSINIYTDSRYAFATAHVHGAIYKQRGWLTSAGKDIKNKEEILALLEAIHLPKRVAIIHCPGHQRGTDPVATGNRKADEAAKQAAQSTRILTETTKNAGKRTADGSEFEKRTADGSEFESPKKKAKVE

SEQ ID NO: 6771 - protein, 2124 aa, synthetic construct
MPAAKRVKLDGGDKKYSIGLDIGTNSVGWAVITDEYKVPSKKFKVLGNTDRHSIKKNLIGALLFDSGETAEATRLKRTARRRYTRRKNRICYLQEIFSNEMAKVDDSFFHRLEESFLVEEDKKHERHPIFGNIVDEVAYHEKYPTIYHLRKKLVDSTDKADLRLIYLALAHMIKFRGHFLIEGDLNPDNSDVDKLFIQLVQTYNQLFEENPINASGVDAKAILSARLSKSRRLENLIAQLPGEKKNGLFGNLIALSLGLTPNFKSNFDLAEDAKLQLSKDTYDDDLDNLLAQIGDQYADLFLAAKNLSDAILLSDILRVNTEITKAPLSASMIKRYDEHHQDLTLLKALVRQQLPEKYKEIFFDQSKNGYAGYIDGGASQEEFYKFIKPILEKMDGTEELLVKLNREDLLRKQRTFDNGSIPHQIHLGELHAILRRQEDFYPFLKDNREKIEKILTFRIPYYVGPLARGNSRFAWMTRKSEETITPWNFEEVVDKGASAQSFIERMTNFDKNLPNEKVLPKHSLLYEYFTVYNELTKVKYVTEGMRKPAFLSGEQKKAIVDLLFKTNRKVTVKQLKEDYFKKIECFDSVEISGVEDRFNASLGTYHDLLKIIKDKDFLDNEENEDILEDIVLTLTLFEDREMIEERLKTYAHLFDDKVMKQLKRRRYTGWGRLSRKLINGIRDKQSGKTILDFLKSDGFANRNFMQLIHDDSLTFKEDIQKAQVSGQGDSLHEHIANLAGSPAIKKGILQTVKVVDELVKVMGRHKPENIVIEMARENQTTQKGQKNSRERMKRIEEGIKELGSQILKEHPVENTQLQNEKLYLYYLQNGRDMYVDQELDINRLSDYDVDHIVPQSFLKDDSIDNKVLTRSDKARGKSDNVPSEEVVKKMKNYWRQLLNAKLITQRKFDNLTKAERGGLSELDKAGFIKRQLVETRQITKHVAQILDSRMNTKYDENDKLIREVKVITLKSKLVSDFRKDFQFYKVREINNYHHAHDAYLNAVVGTALIKKYPKLESEFVYGDYKVYDVRKMIAKSEQEIGKATAKYFFYSNIMNFFKTEITLANGEIRKRPLIETNGETGEIVWDKGRDFATVRKVLSMPQVNIVKKTEVQTGGFSKESILPKRNSDKLIARKKDWDPKKYGGFDSPTVAYSVLVVAKVEKGKSKKLKSVKELLGITIMERSSFEKNPIDFLEAKGYKEVKKDLIIKLPKYSLFELENGRKRMLASAGELQKGNELALPSKYVNFLYLASHYEKLKGSPEDNEQKQLFVEQHKHYLDEIIEQISEFSKRVILADANLDKVLSAYNKHRDKPIREQAENIIHLFTLTNLGAPAAFKYFDTTIDRKRYTSTKEVLDATLIHQSITGLYETRIDLSQLGGDGGEAAAKPAPGGLLGRDLLTKLKAQIQFSTEGPQVTWEDRPAMCLVLNLEEEYRLHEKPVPPSIDPSWLQLFPMVWAEKAGMGLANQVPPVVVELKSDASPVAVRQYPMSKEAREGIRPHIQRFLDLGILVPCQSPWNTPLLPVKKPGTNDYRPVQDLREVNKRVQDIHPTVPNPYNLLSSLPPSHTWYSVLDLKDAFFCLKLHPNSQPLFAFEWRDPEKGNTGQLTWTRLPQGFKNSPTLFNEALHRDLASFRALNPQVVMLQYVDDLLVAAPTYRDCKEGTRRLLQELSKLGYRVSAKKAQLCREEVTYLGYLLKGGKRWLTPARKATVMKIPTPTTPRQVREFLGKAGFCRLFIPGFASLAAPLYPLTRPKVPFTWTEAHQEAFGRIKEALLSAPALALPDLTKPFALYVDEKEGVARGVLTQTLGPWRRPVAYLSKKLDPVASGWPTCLKAIAAVALLLKDADKLTLGQNVLVIAPHNLESIVRQPPDRWMTNARMTHYQSLLLNERVSFAPPAILNPATLLPVESDDTPIHICSEILAEETGTRPDLRDQPLPGVPAWYTDGSSFIMDGRRQAGAAIVDNKRTVWASNLPEGTSAQKAELIALTQALRLAEGKSINIYTDSRYAFATAHVHGAIYKQRGWLTSAGKDIKNKEEILALLEAIHLPKRVAIIHCPGHQRGTDPVATGNRKADEAAKQAAQSTRILTETTKNAGKRTADGSEFEKRTADGSEFESPKKKAKVE

SEQ ID NO: 6772 - protein, 2215 aa, synthetic construct
MPAAKRVKLDGGDKKYSIGLDIGTNSVGWAVITDEYKVPSKKFKVLGNTDRHSIKKNLIGALLFDSGETAEATRLKRTARRRYTRRKNRICYLQEIFSNEMAKVDDSFFHRLEESFLVEEDKKHERHPIFGNIVDEVAYHEKYPTIYHLRKKLVDSTDKADLRLIYLALAHMIKFRGHFLIEGDLNPDNSDVDKLFIQLVQTYNQLFEENPINASGVDAKAILSARLSKSRRLENLIAQLPGEKKNGLFGNLIALSLGLTPNFKSNFDLAEDAKLQLSKDTYDDDLDNLLAQIGDQYADLFLAAKNLSDAILLSDILRVNTEITKAPLSASMIKRYDEHHQDLTLLKALVRQQLPEKYKEIFFDQSKNGYAGYIDGGASQEEFYKFIKPILEKMDGTEELLVKLNREDLLRKQRTFDNGSIPHQIHLGELHAILRRQEDFYPFLKDNREKIEKILTFRIPYYVGPLARGNSRFAWMTRKSEETITPWNFEEVVDKGASAQSFIERMTNFDKNLPNEKVLPKHSLLYEYFTVYNELTKVKYVTEGMRKPAFLSGEQKKAIVDLLFKTNRKVTVKQLKEDYFKKIECFDSVEISGVEDRFNASLGTYHDLLKIIKDKDFLDNEENEDILEDIVLTLTLFEDREMIEERLKTYAHLFDDKVMKQLKRRRYTGWGRLSRKLINGIRDKQSGKTILDFLKSDGFANRNFMQLIHDDSLTFKEDIQKAQVSGQGDSLHEHIANLAGSPAIKKGILQTVKVVDELVKVMGRHKPENIVIEMARENQTTQKGQKNSRERMKRIEEGIKELGSQILKEHPVENTQLQNEKLYLYYLQNGRDMYVDQELDINRLSDYDVDHIVPQSFLKDDSIDNKVLTRSDKARGKSDNVPSEEVVKKMKNYWRQLLNAKLITQRKFDNLTKAERGGLSELDKAGFIKRQLVETRQITKHVAQILDSRMNTKYDENDKLIREVKVITLKSKLVSDFRKDFQFYKVREINNYHHAHDAYLNAVVGTALIKKYPKLESEFVYGDYKVYDVRKMIAKSEQEIGKATAKYFFYSNIMNFFKTEITLANGEIRKRPLIETNGETGEIVWDKGRDFATVRKVLSMPQVNIVKKTEVQTGGFSKESILPKRNSDKLIARKKDWDPKKYGGFDSPTVAYSVLVVAKVEKGKSKKLKSVKELLGITIMERSSFEKNPIDFLEAKGYKEVKKDLIIKLPKYSLFELENGRKRMLASAGELQKGNELALPSKYVNFLYLASHYEKLKGSPEDNEQKQLFVEQHKHYLDEIIEQISEFSKRVILADANLDKVLSAYNKHRDKPIREQAENIIHLFTLTNLGAPAAFKYFDTTIDRKRYTSTKEVLDATLIHQSITGLYETRIDLSQLGGDGGEAAAKPAPGGTLGDQGSRGSDPLPEPRVTLTVEGIPTEFLVNTGAEHSVLTKPMGKMGSKRTVVAGATGSKVYPWTTKRLLKIGQKQVTHSFLVIPECPAPLLGRDLLTKLKAQIQFSTEGPQVTWEDRPAMCLVLNLEEEYRLHEKPVPPSIDPSWLQLFPMVWAEKAGMGLANQVPPVVVELKSDASPVAVRQYPMSKEAREGIRPHIQRFLDLGILVPCQSPWNTPLLPVKKPGTNDYRPVQDLREVNKRVQDIHPTVPNPYNLLSSLPPSHTWYSVLDLKDAFFCLKLHPNSQPLFAFEWRDPEKGNTGQLTWTRLPQGFKNSPTLFNEALHRDLASFRALNPQVVMLQYVDDLLVAAPTYRDCKEGTRRLLQELSKLGYRVSAKKAQLCREEVTYLGYLLKGGKRWLTPARKATVMKIPTPTTPRQVREFLGTAGFCRLWIPGFASLAAPLYPLTRPKVPFTWTEAHQEAFGRIKEALLSAPALALPDLTKPFALYVDEKEGVARGVLTQTLGPWRRPVAYLSKKLDPVASGWPTCLKAIAAVALLLKDADKLTLGQNVLVIAPHNLESIVRQPPDRWMTNARMTHYQSLLLNERVSFAPPAILNPATLLPVESDDTPIHICSEILAEETGTRPDLRDQPLPGVPAWYTDGSSFIMDGRRQAGAAIVDNKRTVWASNLPEGTSAQKAELIALTQALRLAEGKSINIYTDSRYAFATAHVHGAIYKQRGWLTSAGKDIKNKEEILALLEAIHLPKRVAIIHCPGHQRGTDPVATGNRKADEAAKQAAQSTRILTETTKNAGKRTADGSEFEKRTADGSEFESPKKKAKVE

SEQ ID NO: 6773 - protein, 2093 aa, synthetic construct
MPAAKRVKLDGGDKKYSIGLDIGTNSVGWAVITDEYKVPSKKFKVLGNTDRHSIKKNLIGALLFDSGETAEATRLKRTARRRYTRRKNRICYLQEIFSNEMAKVDDSFFHRLEESFLVEEDKKHERHPIFGNIVDEVAYHEKYPTIYHLRKKLVDSTDKADLRLIYLALAHMIKFRGHFLIEGDLNPDNSDVDKLFIQLVQTYNQLFEENPINASGVDAKAILSARLSKSRRLENLIAQLPGEKKNGLFGNLIALSLGLTPNFKSNFDLAEDAKLQLSKDTYDDDLDNLLAQIGDQYADLFLAAKNLSDAILLSDILRVNTEITKAPLSASMIKRYDEHHQDLTLLKALVRQQLPEKYKEIFFDQSKNGYAGYIDGGASQEEFYKFIKPILEKMDGTEELLVKLNREDLLRKQRTFDNGSIPHQIHLGELHAILRRQEDFYPFLKDNREKIEKILTFRIPYYVGPLARGNSRFAWMTRKSEETITPWNFEEVVDKGASAQSFIERMTNFDKNLPNEKVLPKHSLLYEYFTVYNELTKVKYVTEGMRKPAFLSGEQKKAIVDLLFKTNRKVTVKQLKEDYFKKIECFDSVEISGVEDRFNASLGTYHDLLKIIKDKDFLDNEENEDILEDIVLTLTLFEDREMIEERLKTYAHLFDDKVMKQLKRRRYTGWGRLSRKLINGIRDKQSGKTILDFLKSDGFANRNFMQLIHDDSLTFKEDIQKAQVSGQGDSLHEHIANLAGSPAIKKGILQTVKVVDELVKVMGRHKPENIVIEMARENQTTQKGQKNSRERMKRIEEGIKELGSQILKEHPVENTQLQNEKLYLYYLQNGRDMYVDQELDINRLSDYDVDHIVPQSFLKDDSIDNKVLTRSDKARGKSDNVPSEEVVKKMKNYWRQLLNAKLITQRKFDNLTKAERGGLSELDKAGFIKRQLVETRQITKHVAQILDSRMNTKYDENDKLIREVKVITLKSKLVSDFRKDFQFYKVREINNYHHAHDAYLNAVVGTALIKKYPKLESEFVYGDYKVYDVRKMIAKSEQEIGKATAKYFFYSNIMNFFKTEITLANGEIRKRPLIETNGETGEIVWDKGRDFATVRKVLSMPQVNIVKKTEVQTGGFSKESILPKRNSDKLIARKKDWDPKKYGGFDSPTVAYSVLVVAKVEKGKSKKLKSVKELLGITIMERSSFEKNPIDFLEAKGYKEVKKDLIIKLPKYSLFELENGRKRMLASAGELQKGNELALPSKYVNFLYLASHYEKLKGSPEDNEQKQLFVEQHKHYLDEIIEQISEFSKRVILADANLDKVLSAYNKHRDKPIREQAENIIHLFTLTNLGAPAAFKYFDTTIDRKRYTSTKEVLDATLIHQSITGLYETRIDLSQLGGDGGEAAAKPAPGGTLNLEDEYRLYETSAEPEVSPGSTWLSDFPQAWAETGGMGLAVRQAPLIIPLKATSTPVSIKQYPMSQEAKLGIKPHIQRLLDQGILVPCQSPWNTPLLPVKKPGTNDYRPVQDLREVNKRVEDIHPTVPNPYNLLSGLPPSHRWYTVLDLKDAFFCLRLHPTSQPLFAFEWRDPGMGISGQLTWTRLPQGFKNSPTLFNEALHRDLADFRIQHPDLILLQYVDDILLAATSELDCQQGTRALLLTLGNLGYRASAKKAQLCQKQVKYLGYLLKEGQRWLTEARKETVMGQPTPKTPRQLREFLGKAGFCRLFIPGFAEMAAPLYPLTKPGTLFNWGPDQQKAYQEIKQALLTAPALGLPDLTKPFELFVDEKQGYAKGVLTQKLGPWRRPVAYLSKKLDPVAAGWPPCLRMVAAIAVLRKDAGKLTMGQPLVILAPHAVEALVKQPPDRWLSNARMTHYQAMLLDTDRVQFGPVVALNPATLLPLPEEGAPHDCLEILAETHGTRPDLTDQPIPDADHTWYTDGSSFLQEGQRKAGAAVTTETEVIWARALPAGTSAQRAELIALTQALKMAEGKRLNVYTDSRYAFATAHIHGEIYRRRGWLTSEGREIKNKSEILALLKALFLPKRLSIIHCLGHQKGDSAEARGNRLADQAAREAAIKTPPDTSTLLAGKRTADGSEFEKRTADGSEFESPKKKAKVE

SEQ ID NO: 6774 - protein, 2093 aa, synthetic construct
MPAAKRVKLDGGDKKYSIGLDIGTNSVGWAVITDEYKVPSKKFKVLGNTDRHSIKKNLIGALLFDSGETAEATRLKRTARRRYTRRKNRICYLQEIFSNEMAKVDDSFFHRLEESFLVEEDKKHERHPIFGNIVDEVAYHEKYPTIYHLRKKLVDSTDKADLRLIYLALAHMIKFRGHFLIEGDLNPDNSDVDKLFIQLVQTYNQLFEENPINASGVDAKAILSARLSKSRRLENLIAQLPGEKKNGLFGNLIALSLGLTPNFKSNFDLAEDAKLQLSKDTYDDDLDNLLAQIGDQYADLFLAAKNLSDAILLSDILRVNTEITKAPLSASMIKRYDEHHQDLTLLKALVRQQLPEKYKEIFFDQSKNGYAGYIDGGASQEEFYKFIKPILEKMDGTEELLVKLNREDLLRKQRTFDNGSIPHQIHLGELHAILRRQEDFYPFLKDNREKIEKILTFRIPYYVGPLARGNSRFAWMTRKSEETITPWNFEEVVDKGASAQSFIERMTNFDKNLPNEKVLPKHSLLYEYFTVYNELTKVKYVTEGMRKPAFLSGEQKKAIVDLLFKTNRKVTVKQLKEDYFKKIECFDSVEISGVEDRFNASLGTYHDLLKIIKDKDFLDNEENEDILEDIVLTLTLFEDREMIEERLKTYAHLFDDKVMKQLKRRRYTGWGRLSRKLINGIRDKQSGKTILDFLKSDGFANRNFMQLIHDDSLTFKEDIQKAQVSGQGDSLHEHIANLAGSPAIKKGILQTVKVVDELVKVMGRHKPENIVIEMARENQTTQKGQKNSRERMKRIEEGIKELGSQILKEHPVENTQLQNEKLYLYYLQNGRDMYVDQELDINRLSDYDVDHIVPQSFLKDDSIDNKVLTRSDKARGKSDNVPSEEVVKKMKNYWRQLLNAKLITQRKFDNLTKAERGGLSELDKAGFIKRQLVETRQITKHVAQILDSRMNTKYDENDKLIREVKVITLKSKLVSDFRKDFQFYKVREINNYHHAHDAYLNAVVGTALIKKYPKLESEFVYGDYKVYDVRKMIAKSEQEIGKATAKYFFYSNIMNFFKTEITLANGEIRKRPLIETNGETGEIVWDKGRDFATVRKVLSMPQVNIVKKTEVQTGGFSKESILPKRNSDKLIARKKDWDPKKYGGFDSPTVAYSVLVVAKVEKGKSKKLKSVKELLGITIMERSSFEKNPIDFLEAKGYKEVKKDLIIKLPKYSLFELENGRKRMLASAGELQKGNELALPSKYVNFLYLASHYEKLKGSPEDNEQKQLFVEQHKHYLDEIIEQISEFSKRVILADANLDKVLSAYNKHRDKPIREQAENIIHLFTLTNLGAPAAFKYFDTTIDRKRYTSTKEVLDATLIHQSITGLYETRIDLSQLGGDGGEAAAKPAPGGTLGIEDEYRLHETSTEPDVSLGSTWLSDFPQAWAETGGMGLAVRQAPLIIPLKATSTPVSIQQYPMSHEARLGIKPHIQRLLDQGILVPCQSPWNTPLLPVKKPGTNDYRPVQDLREVNKRVEDIHPTVPNPYNLLSGLPPSHQWYTVLDLKDAFFCLRLHPTSQPLFAFEWRDPGMGISGQLTWTRLPQGFKNSPTLFNEALHRDLADFRIQHPDLILLQYVDDILLAATSELDCQQGTRALLQTLGDLGYRASAKKAQICQKQVKYLGYLLREGQRWLTEARKETVMGQPVPKTPRQLREFLGTAGFCRLWIPGFAEMAAPLYPLTKPGTLFSWGPDQQKAYQEIKQALLTAPALGLPDLTKPFELFVDEKQGYAKGVLTQKLGPWRRPVAYLSKKLDPVAAGWPPCLRMVAAIAVLTKDAGKLTMGQPLVILAPHAVEALVKQPPDRWLSNARMTHYQAMLLDTDRVQFGPVVALNPATLLPLPEEGAPHDCLEILAETHGTRPDLTDQPIPDADHTWYTDGSSFLQEGQRKAGAAVTTETEVIWAGALPAGTSAQRAELIALTQALKMAEGKRLNVYTDSRYAFATAHIHGEIYRRRGWLTSEGREIKNKSEILALLKALFLPKRLSIIHCLGHQKGDSAEARGNRLADQAAREAAIKTPPDTSTLLAGKRTADGSEFEKRTADGSEFESPKKKAKVE

SEQ ID NO: 6775 - protein, 2093 aa, synthetic construct
MPAAKRVKLDGGDKKYSIGLDIGTNSVGWAVITDEYKVPSKKFKVLGNTDRHSIKKNLIGALLFDSGETAEATRLKRTARRRYTRRKNRICYLQEIFSNEMAKVDDSFFHRLEESFLVEEDKKHERHPIFGNIVDEVAYHEKYPTIYHLRKKLVDSTDKADLRLIYLALAHMIKFRGHFLIEGDLNPDNSDVDKLFIQLVQTYNQLFEENPINASGVDAKAILSARLSKSRRLENLIAQLPGEKKNGLFGNLIALSLGLTPNFKSNFDLAEDAKLQLSKDTYDDDLDNLLAQIGDQYADLFLAAKNLSDAILLSDILRVNTEITKAPLSASMIKRYDEHHQDLTLLKALVRQQLPEKYKEIFFDQSKNGYAGYIDGGASQEEFYKFIKPILEKMDGTEELLVKLNREDLLRKQRTFDNGSIPHQIHLGELHAILRRQEDFYPFLKDNREKIEKILTFRIPYYVGPLARGNSRFAWMTRKSEETITPWNFEEVVDKGASAQSFIERMTNFDKNLPNEKVLPKHSLLYEYFTVYNELTKVKYVTEGMRKPAFLSGEQKKAIVDLLFKTNRKVTVKQLKEDYFKKIECFDSVEISGVEDRFNASLGTYHDLLKIIKDKDFLDNEENEDILEDIVLTLTLFEDREMIEERLKTYAHLFDDKVMKQLKRRRYTGWGRLSRKLINGIRDKQSGKTILDFLKSDGFANRNFMQLIHDDSLTFKEDIQKAQVSGQGDSLHEHIANLAGSPAIKKGILQTVKVVDELVKVMGRHKPENIVIEMARENQTTQKGQKNSRERMKRIEEGIKELGSQILKEHPVENTQLQNEKLYLYYLQNGRDMYVDQELDINRLSDYDVDHIVPQSFLKDDSIDNKVLTRSDKARGKSDNVPSEEVVKKMKNYWRQLLNAKLITQRKFDNLTKAERGGLSELDKAGFIKRQLVETRQITKHVAQILDSRMNTKYDENDKLIREVKVITLKSKLVSDFRKDFQFYKVREINNYHHAHDAYLNAVVGTALIKKYPKLESEFVYGDYKVYDVRKMIAKSEQEIGKATAKYFFYSNIMNFFKTEITLANGEIRKRPLIETNGETGEIVWDKGRDFATVRKVLSMPQVNIVKKTEVQTGGFSKESILPKRNSDKLIARKKDWDPKKYGGFDSPTVAYSVLVVAKVEKGKSKKLKSVKELLGITIMERSSFEKNPIDFLEAKGYKEVKKDLIIKLPKYSLFELENGRKRMLASAGELQKGNELALPSKYVNFLYLASHYEKLKGSPEDNEQKQLFVEQHKHYLDEIIEQISEFSKRVILADANLDKVLSAYNKHRDKPIREQAENIIHLFTLTNLGAPAAFKYFDTTIDRKRYTSTKEVLDATLIHQSITGLYETRIDLSQLGGDGGEAAAKPAPGGTLNIEDEYRLHETSKEPDVSLGSTWLSDFPQAWAETGGMGLAVRQAPLIIPLKATSTPVSIKQYPMSQEARLGIKPHIQRLLDQGILVPCQSPWNTPLLPVKKPGTNDYRPVQDLREVNKRVEDIHPTVPNPYNLLSGLPPSHQWYTVLDLKDAFFCLRLHPTSQPLFAFEWRDPEMGISGQLTWTRLPQGFKNSPTLFNEALHRDLAGFRIQHPDLILLQYVDDLLLAATSELDCQQGTRALLQTLGDLGYRASAKKAQICQKQVKYLGYLLKEGQRWLTEARKETVMGQPIPKTPRQLREFLGTAGFCRLWIPGFAEMAAPLYPLTKPGTLFNWGPDQQKAFQEIKQALLTAPALGLPDLTKPFELFVDEKQGYAKGVLTQKLGPWRRPVAYLSKKLDPVAAGWPPCLRMVAAIAVLTKDAGKLTMGQPLVILAPHAVEALVKQPPDRWLSNARMTHYQALLLDTDRVQFGPVVALNPATLLPLPEEGLQHDCLDILAEAHGTRSDLMDQPLPDADHTWYTDGSSFLQEGQRKAGAAVTTETEVIWARALPAGTSAQRAELIALTQALKMAEGKKLNVYTDSRYAFATAHIHGEIYRRRGWLTSEGKEIKNKDEILALLKALFLPKRLSIIHCPGHQKGNSAEARGNRMADQAAREVATRETPETSTLLAGKRTADGSEFEKRTADGSEFESPKKKAKVE

SEQ ID NO: 6776 - protein, 2093 aa, synthetic construct
MPAAKRVKLDGGDKKYSIGLDIGTNSVGWAVITDEYKVPSKKFKVLGNTDRHSIKKNLIGALLFDSGETAEATRLKRTARRRYTRRKNRICYLQEIFSNEMAKVDDSFFHRLEESFLVEEDKKHERHPIFGNIVDEVAYHEKYPTIYHLRKKLVDSTDKADLRLIYLALAHMIKFRGHFLIEGDLNPDNSDVDKLFIQLVQTYNQLFEENPINASGVDAKAILSARLSKSRRLENLIAQLPGEKKNGLFGNLIALSLGLTPNFKSNFDLAEDAKLQLSKDTYDDDLDNLLAQIGDQYADLFLAAKNLSDAILLSDILRVNTEITKAPLSASMIKRYDEHHQDLTLLKALVRQQLPEKYKEIFFDQSKNGYAGYIDGGASQEEFYKFIKPILEKMDGTEELLVKLNREDLLRKQRTFDNGSIPHQIHLGELHAILRRQEDFYPFLKDNREKIEKILTFRIPYYVGPLARGNSRFAWMTRKSEETITPWNFEEVVDKGASAQSFIERMTNFDKNLPNEKVLPKHSLLYEYFTVYNELTKVKYVTEGMRKPAFLSGEQKKAIVDLLFKTNRKVTVKQLKEDYFKKIECFDSVEISGVEDRFNASLGTYHDLLKIIKDKDFLDNEENEDILEDIVLTLTLFEDREMIEERLKTYAHLFDDKVMKQLKRRRYTGWGRLSRKLINGIRDKQSGKTILDFLKSDGFANRNFMQLIHDDSLTFKEDIQKAQVSGQGDSLHEHIANLAGSPAIKKGILQTVKVVDELVKVMGRHKPENIVIEMARENQTTQKGQKNSRERMKRIEEGIKELGSQILKEHPVENTQLQNEKLYLYYLQNGRDMYVDQELDINRLSDYDVDHIVPQSFLKDDSIDNKVLTRSDKARGKSDNVPSEEVVKKMKNYWRQLLNAKLITQRKFDNLTKAERGGLSELDKAGFIKRQLVETRQITKHVAQILDSRMNTKYDENDKLIREVKVITLKSKLVSDFRKDFQFYKVREINNYHHAHDAYLNAVVGTALIKKYPKLESEFVYGDYKVYDVRKMIAKSEQEIGKATAKYFFYSNIMNFFKTEITLANGEIRKRPLIETNGETGEIVWDKGRDFATVRKVLSMPQVNIVKKTEVQTGGFSKESILPKRNSDKLIARKKDWDPKKYGGFDSPTVAYSVLVVAKVEKGKSKKLKSVKELLGITIMERSSFEKNPIDFLEAKGYKEVKKDLIIKLPKYSLFELENGRKRMLASAGELQKGNELALPSKYVNFLYLASHYEKLKGSPEDNEQKQLFVEQHKHYLDEIIEQISEFSKRVILADANLDKVLSAYNKHRDKPIREQAENIIHLFTLTNLGAPAAFKYFDTTIDRKRYTSTKEVLDATLIHQSITGLYETRIDLSQLGGDGGEAAAKPAPGGTLNIEDEYRLHETSKGPDVPLGSTWLSDFPQAWAETGGMGLAVRQAPLIIPLKATSTPVSIKQYPMSQEARLGIKPHIQRLLDQGILVPCQSPWNTPLLPVKKPGTNDYRPVQDLREVNKRVEDIHPTVPNPYNLLSGLPPSHQWYTVLDLKDAFFCLRLHPTSQSLFAFEWRDPEMGISGQLTWTRLPQGFKNSPTLFNEALHRDLADFRIQHPDLILLQYVDDLLLAATSELDCQQGTRALLQTLGDLGYRASAKKAQICQKQVKYLGYLLKEGQRWLTEARKETVMGQPTPKTPRQLREFLGTAGFCRLWIPGFAEMAAPLYPLTKPGTLFEWGPDQQKAYQEIKQALLTAPALGLPDLTKPFELFVDEKQGYAKGVLTQKLGPWRRPVAYLSKKLDPVAAGWPPCLRMVAAIAVLTKDAGKLTMGQPLVILAPHAVEALVKQPPDRWLSNARMTHYQALLLDTDRVQFGPIVALNPATLLPLPEEGLQHDCLDILAEAHGTRPDLTDQPLPDADHTWYTDGSSFLQEGQRKAGAAVTTETEVVWAKALPAGTSAQRAELIALTQALKMAEGKKLNVYTDSRYAFATAHIHGEIYRRRGWLTSEGKEIKNKDEILALLKALFLPKRLSIIHCPGHQKGNRAEARGNRMADQAAREVATRETPETSTLLAGKRTADGSEFEKRTADGSEFESPKKKAKVE

SEQ ID NO: 6777 - protein, 2113 aa, synthetic construct
MPAAKRVKLDGGDKKYSIGLDIGTNSVGWAVITDEYKVPSKKFKVLGNTDRHSIKKNLIGALLFDSGETAEATRLKRTARRRYTRRKNRICYLQEIFSNEMAKVDDSFFHRLEESFLVEEDKKHERHPIFGNIVDEVAYHEKYPTIYHLRKKLVDSTDKADLRLIYLALAHMIKFRGHFLIEGDLNPDNSDVDKLFIQLVQTYNQLFEENPINASGVDAKAILSARLSKSRRLENLIAQLPGEKKNGLFGNLIALSLGLTPNFKSNFDLAEDAKLQLSKDTYDDDLDNLLAQIGDQYADLFLAAKNLSDAILLSDILRVNTEITKAPLSASMIKRYDEHHQDLTLLKALVRQQLPEKYKEIFFDQSKNGYAGYIDGGASQEEFYKFIKPILEKMDGTEELLVKLNREDLLRKQRTFDNGSIPHQIHLGELHAILRRQEDFYPFLKDNREKIEKILTFRIPYYVGPLARGNSRFAWMTRKSEETITPWNFEEVVDKGASAQSFIERMTNFDKNLPNEKVLPKHSLLYEYFTVYNELTKVKYVTEGMRKPAFLSGEQKKAIVDLLFKTNRKVTVKQLKEDYFKKIECFDSVEISGVEDRFNASLGTYHDLLKIIKDKDFLDNEENEDILEDIVLTLTLFEDREMIEERLKTYAHLFDDKVMKQLKRRRYTGWGRLSRKLINGIRDKQSGKTILDFLKSDGFANRNFMQLIHDDSLTFKEDIQKAQVSGQGDSLHEHIANLAGSPAIKKGILQTVKVVDELVKVMGRHKPENIVIEMARENQTTQKGQKNSRERMKRIEEGIKELGSQILKEHPVENTQLQNEKLYLYYLQNGRDMYVDQELDINRLSDYDVDHIVPQSFLKDDSIDNKVLTRSDKARGKSDNVPSEEVVKKMKNYWRQLLNAKLITQRKFDNLTKAERGGLSELDKAGFIKRQLVETRQITKHVAQILDSRMNTKYDENDKLIREVKVITLKSKLVSDFRKDFQFYKVREINNYHHAHDAYLNAVVGTALIKKYPKLESEFVYGDYKVYDVRKMIAKSEQEIGKATAKYFFYSNIMNFFKTEITLANGEIRKRPLIETNGETGEIVWDKGRDFATVRKVLSMPQVNIVKKTEVQTGGFSKESILPKRNSDKLIARKKDWDPKKYGGFDSPTVAYSVLVVAKVEKGKSKKLKSVKELLGITIMERSSFEKNPIDFLEAKGYKEVKKDLIIKLPKYSLFELENGRKRMLASAGELQKGNELALPSKYVNFLYLASHYEKLKGSPEDNEQKQLFVEQHKHYLDEIIEQISEFSKRVILADANLDKVLSAYNKHRDKPIREQAENIIHLFTLTNLGAPAAFKYFDTTIDRKRYTSTKEVLDATLIHQSITGLYETRIDLSQLGGDGGEAAAKPAPGGTLNIEDEYRLHETSKEPDVSLGSTWLSDFPQAWAETGGMGLAVRQAPLIIPLKATSTPVSIKQYPMSQEARLGIKPHIQRLLDQGILVPCQSPWNTPLLPVKKPGTNDYRPVQDLREVNKRVEDIHPTVPNPYNLLSGLPPSHQWYTVLDLKDAFFCLRLHPTSQPLFAFEWRDPEMGISGQLTWTRLPQGFKNSPTLFNEALHRDLADFRIQHPDLILLQYVDDLLLAATSELDCQQGTRALLQTLGNLGYRASAKKAQICQKQVKYLGYLLKEGQRWLTEARKETVMGQPTPKTPRQLREFLGKAGFCRLFIPGFAEMAAPLYPLTKPGTLFNWGPDQQKAYQEIKQALLTAPALGLPDLTKPFELFVDEKQGYAKGVLTQKLGPWRRPVAYLSKKLDPVAAGWPPCLRMVAAIAVLTKDAGKLTMGQPLVILAPHAVEALVKQPPDRWLSNARMTHYQALLLDTDRVQFGPVVALNPATLLPLPEEGLQHNCLDILAEAHGTRPDLTDQPLPDADHTWYTDGSSLLQEGQRKAGAAVTTETEVIWAKALPAGTSAQRAELIALTQALKMAEGKKLNVYTDSRYAFATAHIHGEIYRRRGWLTSEGKEIKNKDEILALLKALFLPKRLSIIHCPGHQKGHSAEARGNRMADQAARKAAITETPDTSTLLIENSSPSGGSKRTADGSEFEAGKRTADGSEFEKRTADGSEFESPKKKAKVE

SEQ ID NO: 6778 - protein, 2113 aa, synthetic construct; identical to SEQ ID NO: 6777

SEQ ID NO: 6779 - protein, 2021 aa, synthetic construct
MPAAKRVKLDGGDKKYSIGLDIGTNSVGWAVITDEYKVPSKKFKVLGNTDRHSIKKNLIGALLFDSGETAEATRLKRTARRRYTRRKNRICYLQEIFSNEMAKVDDSFFHRLEESFLVEEDKKHERHPIFGNIVDEVAYHEKYPTIYHLRKKLVDSTDKADLRLIYLALAHMIKFRGHFLIEGDLNPDNSDVDKLFIQLVQTYNQLFEENPINASGVDAKAILSARLSKSRRLENLIAQLPGEKKNGLFGNLIALSLGLTPNFKSNFDLAEDAKLQLSKDTYDDDLDNLLAQIGDQYADLFLAAKNLSDAILLSDILRVNTEITKAPLSASMIKRYDEHHQDLTLLKALVRQQLPEKYKEIFFDQSKNGYAGYIDGGASQEEFYKFIKPILEKMDGTEELLVKLNREDLLRKQRTFDNGSIPHQIHLGELHAILRRQEDFYPFLKDNREKIEKILTFRIPYYVGPLARGNSRFAWMTRKSEETITPWNFEEVVDKGASAQSFIERMTNFDKNLPNEKVLPKHSLLYEYFTVYNELTKVKYVTEGMRKPAFLSGEQKKAIVDLLFKTNRKVTVKQLKEDYFKKIECFDSVEISGVEDRFNASLGTYHDLLKIIKDKDFLDNEENEDILEDIVLTLTLFEDREMIEERLKTYAHLFDDKVMKQLKRRRYTGWGRLSRKLINGIRDKQSGKTILDFLKSDGFANRNFMQLIHDDSLTFKEDIQKAQVSGQGDSLHEHIANLAGSPAIKKGILQTVKVVDELVKVMGRHKPENIVIEMARENQTTQKGQKNSRERMKRIEEGIKELGSQILKEHPVENTQLQNEKLYLYYLQNGRDMYVDQELDINRLSDYDVDHIVPQSFLKDDSIDNKVLTRSDKARGKSDNVPSEEVVKKMKNYWRQLLNAKLITQRKFDNLTKAERGGLSELDKAGFIKRQLVETRQITKHVAQILDSRMNTKYDENDKLIREVKVITLKSKLVSDFRKDFQFYKVREINNYHHAHDAYLNAVVGTALIKKYPKLESEFVYGDYKVYDVRKMIAKSEQEIGKATAKYFFYSNIMNFFKTEITLANGEIRKRPLIETNGETGEIVWDKGRDFATVRKVLSMPQVNIVKKTEVQTGGFSKESILPKRNSDKLIARKKDWDPKKYGGFDSPTVAYSVLVVAKVEKGKSKKLKSVKELLGITIMERSSFEKNPIDFLEAKGYKEVKKDLIIKLPKYSLFELENGRKRMLASAGELQKGNELALPSKYVNFLYLASHYEKLKGSPEDNEQKQLFVEQHKHYLDEIIEQISEFSKRVILADANLDKVLSAYNKHRDKPIREQAENIIHLFTLTNLGAPAAFKYFDTTIDRKRYTSTKEVLDATLIHQSITGLYETRIDLSQLGGDGGEAAAKPAPGGGRDIMKDIKVRLMTDSPDDSQDLMIGAIESNLFADQISWKSDQPVWLNQWPLKQEKLQALQQLVTEQLQLGHLEESNSPWNTPVFVIKKKSGKWRLLQDLRAVNATMHDMGALQPGLPSPVAVPKGWEIIIIDLQDCFFNIKLHPEDCKRFAFSVPSPNFKRPYQRFQWKVLPQGMKNSPTLCQKFVDKAILTVRDKYQDSYIVHYMDDILLAHPSRSIVDEILTSMIQALNKHGLVVSTEKIQKYDNLKYLGTHIQGDSVSYQKLQIRTDKLRTLNDFQKLLGNINWIRPFLKLTTGELKPLFEILNGDSNPISTRKLTPEACKALQLMNERLSTARVKRLDLSQPWSLCILKTEYTPTACLWQDGVVEWIHLPHISPKVITPYDIFCTQLIIKGRHRSKELFSKDPDYIVVPYTKVQFDLLLQEKEDWPISLLGFLGEVHFHLPKDPLLTFTLQTAIIFPHMTSTTPLEKGIVIFTDGSANGRSVTYIQGREPIIKENTQNTAQQAEIVAVITAFEEVSQPFNLYTDSKYVTGLFPEIETATLSPRTKIYTELKHLQRLIHKRQEKFYIGHIRGHTGLPGPLAQGNAYADSLTRILTAGKRTADGSEFEKRTADGSEFESPKKKAKVE

SEQ ID NO: 6780 - protein, 2084 aa, synthetic construct
MPAAKRVKLDGGDKKYSIGLDIGTNSVGWAVITDEYKVPSKKFKVLGNTDRHSIKKNLIGALLFDSGETAEATRLKRTARRRYTRRKNRICYLQEIFSNEMAKVDDSFFHRLEESFLVEEDKKHERHPIFGNIVDEVAYHEKYPTIYHLRKKLVDSTDKADLRLIYLALAHMIKFRGHFLIEGDLNPDNSDVDKLFIQLVQTYNQLFEENPINASGVDAKAILSARLSKSRRLENLIAQLPGEKKNGLFGNLIALSLGLTPNFKSNFDLAEDAKLQLSKDTYDDDLDNLLAQIGDQYADLFLAAKNLSDAILLSDILRVNTEITKAPLSASMIKRYDEHHQDLTLLKALVRQQLPEKYKEIFFDQSKNGYAGYIDGGASQEEFYKFIKPILEKMDGTEELLVKLNREDLLRKQRTFDNGSIPHQIHLGELHAILRRQEDFYPFLKDNREKIEKILTFRIPYYVGPLARGNSRFAWMTRKSEETITPWNFEEVVDKGASAQSFIERMTNFDKNLPNEKVLPKHSLLYEYFTVYNELTKVKYVTEGMRKPAFLSGEQKKAIVDLLFKTNRKVTVKQLKEDYFKKIECFDSVEISGVEDRFNASLGTYHDLLKIIKDKDFLDNEENEDILEDIVLTLTLFEDREMIEERLKTYAHLFDDKVMKQLKRRRYTGWGRLSRKLINGIRDKQSGKTILDFLKSDGFANRNFMQLIHDDSLTFKEDIQKAQVSGQGDSLHEHIANLAGSPAIKKGILQTVKVVDELVKVMGRHKPENIVIEMARENQTTQKGQKNSRERMKRIEEGIKELGSQILKEHPVENTQLQNEKLYLYYLQNGRDMYVDQELDINRLSDYDVDHIVPQSFLKDDSIDNKVLTRSDKARGKSDNVPSEEVVKKMKNYWRQLLNAKLITQRKFDNLTKAERGGLSELDKAGFIKRQLVETRQITKHVAQILDSRMNTKYDENDKLIREVKVITLKSKLVSDFRKDFQFYKVREINNYHHAHDAYLNAVVGTALIKKYPKLESEFVYGDYKVYDVRKMIAKSEQEIGKATAKYFFYSNIMNFFKTEITLANGEIRKRPLIETNGETGEIVWDKGRDFATVRKVLSMPQVNIVKKTEVQTGGFSKESILPKRNSDKLIARKKDWDPKKYGGFDSPTVAYSVLVVAKVEKGKSKKLKSVKELLGITIMERSSFEKNPIDFLEAKGYKEVKKDLIIKLPKYSLFELENGRKRMLASAGELQKGNELALPSKYVNFLYLASHYEKLKGSPEDNEQKQLFVEQHKHYLDEIIEQISEFSKRVILADANLDKVLSAYNKHRDKPIREQAENIIHLFTLTNLGAPAAFKYFDTTIDRKRYTSTKEVLDATLIHQSITGLYETRIDLSQLGGDGGEAAAKPAPGGIPWLMKKPLQLTTLVPLQEYEERLLKQTMLTGSYKEKLQSLFLKYDALWQHWENQVGHRRIKPHHIATGTVNPRPQKQYPINPKAKASIQTVINDLLKQGVLIQQNSIMNTPVYPVPKPDGKWRMVLDYREVNKTIPLIAAQNQHSAGILSSIFRGKYKTTLDLSNGFWAHSITPESYWLTAFTWLGQQYCWTRLPQGFLNSPALFNADVVDLLKEVPNVQVYVDDIYISHDDPREHLEQLEKVFSLLLNAGYVVSLKKSEIAQHEVEFLGFNITKEGRGLTETFKQKLLNITPPRDLKQLQSILGKLNFARNFIPNFSELVKPLYNIIATAPGKYITWTTDNSQQLQNIISMLNSAENLEERNPEVRLIMKVNTSPSAGYIRFYNEFAKRPIMYLNYVYTKAEVKFTNTEKLLTTIHKGLIKALDLGMGQEILVYSPIVSMTKIQKTPLPERKALPIRWITWMSYLEDPRIQFHYDKTLPELQQVPTVTDDIIAKIKHPSEFSMVFYTDGSAIKHPNVNKSHNAGMGIAQVQFKPEFTVINTWSIPLGDHTAQLAEVAAVEFACKKALKIDGPVLIVTDSFYVAESVNKELPYWQSNGFFNNKKKPLKHVSKWKSIADCIQLKPDIIIIHEKGHQPTASTFHTEGNNLADKLATQGSYVVNAGKRTADGSEFEKRTADGSEFESPKKKAKVE

SEQ ID NO: 6781 - protein, 2173 aa, synthetic construct
MPAAKRVKLDGGDKKYSIGLDIGTNSVGWAVITDEYKVPSKKFKVLGNTDRHSIKKNLIGALLFDSGETAEATRLKRTARRRYTRRKNRICYLQEIFSNEMAKVDDSFFHRLEESFLVEEDKKHERHPIFGNIVDEVAYHEKYPTIYHLRKKLVDSTDKADLRLIYLALAHMIKFRGHFLIEGDLNPDNSDVDKLFIQLVQTYNQLFEENPINASGVDAKAILSARLSKSRRLENLIAQLPGEKKNGLFGNLIALSLGLTPNFKSNFDLAEDAKLQLSKDTYDDDLDNLLAQIGDQYADLFLAAKNLSDAILLSDILRVNTEITKAPLSASMIKRYDEHHQDLTLLKALVRQQLPEKYKEIFFDQSKNGYAGYIDGGASQEEFYKFIKPILEKMDGTEELLVKLNREDLLRKQRTFDNGSIPHQIHLGELHAILRRQEDFYPFLKDNREKIEKILTFRIPYYVGPLARGNSRFAWMTRKSEETITPWNFEEVVDKGASAQSFIERMTNFDKNLPNEKVLPKHSLLYEYFTVYNELTKVKYVTEGMRKPAFLSGEQKKAIVDLLFKTNRKVTVKQLKEDYFKKIECFDSVEISGVEDRFNASLGTYHDLLKIIKDKDFLDNEENEDILEDIVLTLTLFEDREMIEERLKTYAHLFDDKVMKQLKRRRYTGWGRLSRKLINGIRDKQSGKTILDFLKSDGFANRNFMQLIHDDSLTFKEDIQKAQVSGQGDSLHEHIANLAGSPAIKKGILQTVKVVDELVKVMGRHKPENIVIEMARENQTTQKGQKNSRERMKRIEEGIKELGSQILKEHPVENTQLQNEKLYLYYLQNGRDMYVDQELDINRLSDYDVDHIVPQSFLKDDSIDNKVLTRSDKARGKSDNVPSEEVVKKMKNYWRQLLNAKLITQRKFDNLTKAERGGLSELDKAGFIKRQLVETRQITKHVAQILDSRMNTKYDENDKLIREVKVITLKSKLVSDFRKDFQFYKVREINNYHHAHDAYLNAVVGTALIKKYPKLESEFVYGDYKVYDVRKMIAKSEQEIGKATAKYFFYSNIMNFFKTEITLANGEIRKRPLIETNGETGEIVWDKGRDFATVRKVLSMPQVNIVKKTEVQTGGFSKESILPKRNSDKLIARKKDWDPKKYGGFDSPTVAYSVLVVAKVEKGKSKKLKSVKELLGITIMERSSFEKNPIDFLEAKGYKEVKKDLIIKLPKYSLFELENGRKRMLASAGELQKGNELALPSKYVNFLYLASHYEKLKGSPEDNEQKQLFVEQHKHYLDEIIEQISEFSKRVILADANLDKVLSAYNKHRDKPIREQAENIIHLFTLTNLGAPAAFKYFDTTIDRKRYTSTKEVLDATLIHQSITGLYETRIDLSQLGGDGGEAAAKPAPGGMDPLQLLQPLEAEIKGTKLKAHWNSGATITCVPQAFLEEEVPIKNIWIKTIHGEKEQPVYYLTFKIQGRKVEAEVISSPYDYILVSPSDIPWLMKKPLQLTTLVPLQEYEERLLKQTMLTGSYKEKLQSLFLKYDALWQHWENQVGHRRIKPHHIATGTVNPRPQKQYPINPKAKASIQTVINDLLKQGVLIQQNSIMNTPVYPVPKPDGKWRMVLDYREVNKTIPLIAAQNQHSAGILSSIFRGKYKTTLDLSNGFWAHSITPESYWLTAFTWLGQQYCWTRLPQGFLNSPALFNADVVDLLKEVPNVQVYVDDIYISHDDPREHLEQLEKVFSLLLNAGYVVSLKKSEIAQHEVEFLGFNITKEGRGLTETFKQKLLNITPPRDLKQLQSILGKLNFARNFIPNFSELVKPLYNIIATAPGKYITWTTDNSQQLQNIISMLNSAENLEERNPEVRLIMKVNTSPSAGYIRFYNEFAKRPIMYLNYVYTKAEVKFTNTEKLLTTIHKGLIKALDLGMGQEILVYSPIVSMTKIQKTPLPERKALPIRWITWMSYLEDPRIQFHYDKTLPELQQVPTVTDDIIAKIKHPSEFSMVFYTDGSAIKHPNVNKSHNAGMGIAQVQFKPEFTVINTWSIPLGDHTAQLAEVAAVEFACKKALKIDGPVLIVTDSFYVAESVNKELPYWQSNGFFNNKKKPLKHVSKWKSIADCIQLKPDIIIIHEKGHQPTASTFHTEGNNLADKLATQGSYVVNAGKRTADGSEFEKRTADGSEFESPKKKAKVE

SEQ ID NO: 6782 - protein, 2091 aa, synthetic construct
MPAAKRVKLDGGDKKYSIGLDIGTNSVGWAVITDEYKVPSKKFKVLGNTDRHSIKKNLIGALLFDSGETAEATRLKRTARRRYTRRKNRICYLQEIFSNEMAKVDDSFFHRLEESFLVEEDKKHERHPIFGNIVDEVAYHEKYPTIYHLRKKLVDSTDKADLRLIYLALAHMIKFRGHFLIEGDLNPDNSDVDKLFIQLVQTYNQLFEENPINASGVDAKAILSARLSKSRRLENLIAQLPGEKKNGLFGNLIALSLGLTPNFKSNFDLAEDAKLQLSKDTYDDDLDNLLAQIGDQYADLFLAAKNLSDAILLSDILRVNTEITKAPLSASMIKRYDEHHQDLTLLKALVRQQLPEKYKEIFFDQSKNGYAGYIDGGASQEEFYKFIKPILEKMDGTEELLVKLNREDLLRKQRTFDNGSIPHQIHLGELHAILRRQEDFYPFLKDNREKIEKILTFRIPYYVGPLARGNSRFAWMTRKSEETITPWNFEEVVDKGASAQSFIERMTNFDKNLPNEKVLPKHSLLYEYFTVYNELTKVKYVTEGMRKPAFLSGEQKKAIVDLLFKTNRKVTVKQLKEDYFKKIECFDSVEISGVEDRFNASLGTYHDLLKIIKDKDFLDNEENEDILEDIVLTLTLFEDREMIEERLKTYAHLFDDKVMKQLKRRRYTGWGRLSRKLINGIRDKQSGKTILDFLKSDGFANRNFMQLIHDDSLTFKEDIQKAQVSGQGDSLHEHIANLAGSPAIKKGILQTVKVVDELVKVMGRHKPENIVIEMARENQTTQKGQKNSRERMKRIEEGIKELGSQILKEHPVENTQLQNEKLYLYYLQNGRDMYVDQELDINRLSDYDVDHIVPQSFLKDDSIDNKVLTRSDKARGKSDNVPSEEVVKKMKNYWRQLLNAKLITQRKFDNLTKAERGGLSELDKAGFIKRQLVETRQITKHVAQILDSRMNTKYDENDKLIREVKVITLKSKLVSDFRKDFQFYKVREINNYHHAHDAYLNAVVGTALIKKYPKLESEFVYGDYKVYDVRKMIAKSEQEIGKATAKYFFYSNIMNFFKTEITLANGEIRKRPLIETNGETGEIVWDKGRDFATVRKVLSMPQVNIVKKTEVQTGGFSKESILPKRNSDKLIARKKDWDPKKYGGFDSPTVAYSVLVVAKVEKGKSKKLKSVKELLGITIMERSSFEKNPIDFLEAKGYKEVKKDLIIKLPKYSLFELENGRKRMLASAGELQKGNELALPSKYVNFLYLASHYEKLKGSPEDNEQKQLFVEQHKHYLDEIIEQISEFSKRVILADANLDKVLSAYNKHRDKPIREQAENIIHLFTLTNLGAPAAFKYFDTTIDRKRYTSTKEVLDATLIHQSITGLYETRIDLSQLGGDGGEAAAKPAPGGVLNLEEEYRLHEKPVPSSIDPSWLQLFPTVWAERAGMGLANQVPPVVVELRSGASPVAVRQYPMSKEAREGIRPHIQRFLDLGVLVPCQSPWNTPLLPVKKPGTNDYRPVQDLREINKRVQDIHPTVPNPYNLLSSLPPSHTWYSVLDLKDAFFCLKLHPNSQPLFAFEWRDPEKGNTGQLTWTRLPQGFKNSPTLFNEALHRDLAPFRALNPQVVLLQYVDDLLVAAPTYRDCKEGTQKLLQELSKLGYRVSAKKAQLCQKEVTYLGYLLKEGKRWLTPARKATVMKIPPPTTPRQVREFLGTAGFCRLWIPGFASLAAPLYPLTKPSIPFIWTEEHQKAFDRIKEALLSAPALALPDLTKPFTLYVDERAGVARGVLTQTLGPWRRPVAYLSKKLDPVASGWPTCLKAVAAVALLLKDADKLTLGQNVTVIASHSLESIVRQPPDRWMTNARMTHYQSLLLNERVSFAPPAVLNPATLLPVESEATPVHRCSEILAEETGTRRDLKDQPLPGVPAWYTDGSSFIAEGKRRAGAAIVDGKRTVWASSLPEGTSAQKAELVALTQALRLAEGKDINIYTDSRYAFATAHIHGAIYKQRGWLTSAGKDIKNKEEILALLEAIHLPKRVAIIHCPGHQKGNDPVATGNRRADEAAKQAALSTRVLAETTKPAGKRTADGSEFEKRTADGSEFESPKKKAKVE

SEQ ID NO: 6783 - protein, 2091 aa, synthetic construct; identical to SEQ ID NO: 4515

SEQ ID NO: 6784 - protein, 2095 aa, synthetic construct
MPAAKRVKLDGGDKKYSIGLDIGTNSVGWAVITDEYKVPSKKFKVLGNTDRHSIKKNLIGALLFDSGETAEATRLKRTARRRYTRRKNRICYLQEIFSNEMAKVDDSFFHRLEESFLVEEDKKHERHPIFGNIVDEVAYHEKYPTIYHLRKKLVDSTDKADLRLIYLALAHMIKFRGHFLIEGDLNPDNSDVDKLFIQLVQTYNQLFEENPINASGVDAKAILSARLSKSRRLENLIAQLPGEKKNGLFGNLIALSLGLTPNFKSNFDLAEDAKLQLSKDTYDDDLDNLLAQIGDQYADLFLAAKNLSDAILLSDILRVNTEITKAPLSASMIKRYDEHHQDLTLLKALVRQQLPEKYKEIFFDQSKNGYAGYIDGGASQEEFYKFIKPILEKMDGTEELLVKLNREDLLRKQRTFDNGSIPHQIHLGELHAILRRQEDFYPFLKDNREKIEKILTFRIPYYVGPLARGNSRFAWMTRKSEETITPWNFEEVVDKGASAQSFIERMTNFDKNLPNEKVLPKHSLLYEYFTVYNELTKVKYVTEGMRKPAFLSGEQKKAIVDLLFKTNRKVTVKQLKEDYFKKIECFDSVEISGVEDRFNASLGTYHDLLKIIKDKDFLDNEENEDILEDIVLTLTLFEDREMIEERLKTYAHLFDDKVMKQLKRRRYTGWGRLSRKLINGIRDKQSGKTILDFLKSDGFANRNFMQLIHDDSLTFKEDIQKAQVSGQGDSLHEHIANLAGSPAIKKGILQTVKVVDELVKVMGRHKPENIVIEMARENQTTQKGQKNSRERMKRIEEGIKELGSQILKEHPVENTQLQNEKLYLYYLQNGRDMYVDQELDINRLSDYDVDHIVPQSFLKDDSIDNKVLTRSDKARGKSDNVPSEEVVKKMKNYWRQLLNAKLITQRKFDNLTKAERGGLSELDKAGFIKRQLVETRQITKHVAQILDSRMNTKYDENDKLIREVKVITLKSKLVSDFRKDFQFYKVREINNYHHAHDAYLNAVVGTALIKKYPKLESEFVYGDYKVYDVRKMIAKSEQEIGKATAKYFFYSNIMNFFKTEITLANGEIRKRPLIETNGETGEIVWDKGRDFATVRKVLSMPQVNIVKKTEVQTGGFSKESILPKRNSDKLIARKKDWDPKKYGGFDSPTVAYSVLVVAKVEKGKSKKLKSVKELLGITIMERSSFEKNPIDFLEAKGYKEVKKDLIIKLPKYSLFELENGRKRMLASAGELQKGNELALPSKYVNFLYLASHYEKLKGSPEDNEQKQLFVEQHKHYLDEIIEQISEFSKRVILADANLDKVLSAYNKHRDKPIREQAENIIHLFTLTNLGAPAAFKYFDTTIDRKRYTSTKEVLDATLIHQSITGLYETRIDLSQLGGDGGPAPEAAAKGGTAPLEEEYRLFLEAPIQNVTLLEQWKREIPKVWAEINPPGLASTQAPIHVQLLSTALPVRVRQYPITLEAKRSLRETIRKFRAAGILRPVHSPWNTPLLPVRKSGTSEYRMVQDLREVNKRVETIHPTVPNPYTLLSLLPPDRIWYSVLDLKDAFFCIPLAPESQLIFAFEWADAEEGESGQLTWTRLPQGFKNSPTLFNEALNRDLQGFRLDHPSVSLLQYVDDLLIAADTQAACLSATRDLLMTLAELGYRVSGKKAQLCQEEVTYLGFKIHKGSRSLSNSRTQAILQIPVPKTKRQVREFLGTIGYCRLWIPGFAELAQPLYAATRPGNDPLVWGEKEEEAFQSLKLALTQPPALALPSLDKPFQLFVEETSGAAKGVLTQALGPWKRPVAYLSKRLDPVAAGWPRCLRAIAAAALLTREASKLTFGQDIEITSSHNLESLLRSPPDKWLTNARITQYQVLLLDPPRVRFKQTAALNPATLLPETDDTLPIHHCLDTLDSLTSTRPDLTDQPLAQAEATLFTDGSSYIRDGKRYAGAAVVTLDSVIWAEPLPIGTSAQKAELIALTKALEWSKDKSVNIYTDSRYAFATLHVHGMIYRERGWLTAGGKAIKNAPEILALLTAVWLPKRVAVMHCKGHQKDDAPTSTGNRRADEVAREVAIRPLSTQATISAGKRTADGSEFEKRTADGSEFESPKKKAKVE

SEQ ID NO: 6785 - protein, 2092 aa, synthetic construct
MPAAKRVKLDGGDKKYSIGLDIGTNSVGWAVITDEYKVPSKKFKVLGNTDRHSIKKNLIGALLFDSGETAEATRLKRTARRRYTRRKNRICYLQEIFSNEMAKVDDSFFHRLEESFLVEEDKKHERHPIFGNIVDEVAYHEKYPTIYHLRKKLVDSTDKADLRLIYLALAHMIKFRGHFLIEGDLNPDNSDVDKLFIQLVQTYNQLFEENPINASGVDAKAILSARLSKSRRLENLIAQLPGEKKNGLFGNLIALSLGLTPNFKSNFDLAEDAKLQLSKDTYDDDLDNLLAQIGDQYADLFLAAKNLSDAILLSDILRVNTEITKAPLSASMIKRYDEHHQDLTLLKALVRQQLPEKYKEIFFDQSKNGYAGYIDGGASQEEFYKFIKPILEKMDGTEELLVKLNREDLLRKQRTFDNGSIPHQIHLGELHAILRRQEDFYPFLKDNREKIEKILTFRIPYYVGPLARGNSRFAWMTRKSEETITPWNFEEVVDKGASAQSFIERMTNFDKNLPNEKVLPKHSLLYEYFTVYNELTKVKYVTEGMRKPAFLSGEQKKAIVDLLFKTNRKVTVKQLKEDYFKKIECFDSVEISGVEDRFNASLGTYHDLLKIIKDKDFLDNEENEDILEDIVLTLTLFEDREMIEERLKTYAHLFDDKVMKQLKRRRYTGWGRLSRKLINGIRDKQSGKTILDFLKSDGFANRNFMQLIHDDSLTFKEDIQKAQVSGQGDSLHEHIANLAGSPAIKKGILQTVKVVDELVKVMGRHKPENIVIEMARENQTTQKGQKNSRERMKRIEEGIKELGSQILKEHPVENTQLQNEKLYLYYLQNGRDMYVDQELDINRLSDYDVDHIVPQSFLKDDSIDNKVLTRSDKARGKSDNVPSEEVVKKMKNYWRQLLNAKLITQRKFDNLTKAERGGLSELDKAGFIKRQLVETRQITKHVAQILDSRMNTKYDENDKLIREVKVITLKSKLVSDFRKDFQFYKVREINNYHHAHDAYLNAVVGTALIKKYPKLESEFVYGDYKVYDVRKMIAKSEQEIGKATAKYFFYSNIMNFFKTEITLANGEIRKRPLIETNGETGEIVWDKGRDFATVRKVLSMPQVNIVKKTEVQTGGFSKESILPKRNSDKLIARKKDWDPKKYGGFDSPTVAYSVLVVAKVEKGKSKKLKSVKELLGITIMERSSFEKNPIDFLEAKGYKEVKKDLIIKLPKYSLFELENGRKRMLASAGELQKGNELALPSKYVNFLYLASHYEKLKGSPEDNEQKQLFVEQHKHYLDEIIEQISEFSKRVILADANLDKVLSAYNKHRDKPIREQAENIIHLFTLTNLGAPAAFKYFDTTIDRKRYTSTKEVLDATLIHQSITGLYETRIDLSQLGGDGGPAPEAAAKGGTLQLEEEYRLFEPESTQKQEMDIWLKNFPQAWAETGGMGTAHCQAPVLIQLKATATPISIRQYPMPHEAYQGIKPHIRRMLDQGILKPCQSPWNTPLLPVKKPGTEDYRPVQDLREVNKRVEDIHPTVPNPYNLLSTLPPSHPWYTVLDLKDAFFCLRLHSESQLLFAFEWRDPEIGLSGQLTWTRLPQGFKNSPTLFNEALHSDLADFRVRYPALVLLQYVDDLLLAAATRTECLEGTKALLETLGNKGYRASAKKAQICLQEVTYLGYSLKDGQRWLTKARKEAILSIPVPKNSRQVREFLGTAGYCRLWIPGFAELAAPLYPLTRPGTLFQWGTEQQLAFEDIKKALLSSPALGLPDITKPFELFIDENSGFAKGVLVQKLGPWKRPVAYLSKKLDTVASGWPPCLRMVAAIAILVKDAGKLTLGQPLTILTSHPVEALVRQPPNKWLSNARMTHYQAMLLDAERVHFGPTVSLNPATLLPLPSGGNHHDCLQILAETHGTRPDLTDQPLPDADLTWYTDGSSFIRNGEREAGAAVTTESEVIWAAPLPPGTSAQRAELIALTQALKMAEGKKLTVYTDSRYAFATTHVHGEIYRRRGWLTSEGKEIKNKNEILALLEALFLPKRLSIIHCPGHQKGDSPQAKGNRLADDTAKKAATETHSSLTVLPAGKRTADGSEFEKRTADGSEFESPKKKAKVE

SEQ ID NO: 6786 - protein, 2124 aa, synthetic construct
MPAAKRVKLDGGDKKYSIGLDIGTNSVGWAVITDEYKVPSKKFKVLGNTDRHSIKKNLIGALLFDSGETAEATRLKRTARRRYTRRKNRICYLQEIFSNEMAKVDDSFFHRLEESFLVEEDKKHERHPIFGNIVDEVAYHEKYPTIYHLRKKLVDSTDKADLRLIYLALAHMIKFRGHFLIEGDLNPDNSDVDKLFIQLVQTYNQLFEENPINASGVDAKAILSARLSKSRRLENLIAQLPGEKKNGLFGNLIALSLGLTPNFKSNFDLAEDAKLQLSKDTYDDDLDNLLAQIGDQYADLFLAAKNLSDAILLSDILRVNTEITKAPLSASMIKRYDEHHQDLTLLKALVRQQLPEKYKEIFFDQSKNGYAGYIDGGASQEEFYKFIKPILEKMDGTEELLVKLNREDLLRKQRTFDNGSIPHQIHLGELHAILRRQEDFYPFLKDNREKIEKILTFRIPYYVGPLARGNSRFAWMTRKSEETITPWNFEEVVDKGASAQSFIERMTNFDKNLPNEKVLPKHSLLYEYFTVYNELTKVKYVTEGMRKPAFLSGEQKKAIVDLLFKTNRKVTVKQLKEDYFKKIECFDSVEISGVEDRFNASLGTYHDLLKIIKDKDFLDNEENEDILEDIVLTLTLFEDREMIEERLKTYAHLFDDKVMKQLKRRRYTGWGRLSRKLINGIRDKQSGKTILDFLKSDGFANRNFMQLIHDDSLTFKEDIQKAQVSGQGDSLHEHIANLAGSPAIKKGILQTVKVVDELVKVMGRHKPENIVIEMARENQTTQKGQKNSRERMKRIEEGIKELGSQILKEHPVENTQLQNEKLYLYYLQNGRDMYVDQELDINRLSDYDVDHIVPQSFLKDDSIDNKVLTRSDKARGKSDNVPSEEVVKKMKNYWRQLLNAKLITQRKFDNLTKAERGGLSELDKAGFIKRQLVETRQITKHVAQILDSRMNTKYDENDKLIREVKVITLKSKLVSDFRKDFQFYKVREINNYHHAHDAYLNAVVGTALIKKYPKLESEFVYGDYKVYDVRKMIAKSEQEIGKATAKYFFYSNIMNFFKTEITLANGEIRKRPLIETNGETGEIVWDKGRDFATVRKVLSMPQVNIVKKTEVQTGGFSKESILPKRNSDKLIARKKDWDPKKYGGFDSPTVAYSVLVVAKVEKGKSKKLKSVKELLGITIMERSSFEKNPIDFLEAKGYKEVKKDLIIKLPKYSLFELENGRKRMLASAGELQKGNELALPSKYVNFLYLASHYEKLKGSPEDNEQKQLFVEQHKHYLDEIIEQISEFSKRVILADANLDKVLSAYNKHRDKPIREQAENIIHLFTLTNLGAPAAFKYFDTTIDRKRYTSTKEVLDATLIHQSITGLYETRIDLSQLGGDGGPAPEAAAKGGLLGRDLLTKLKAQIQFSTEGPQVTWEDRPAMCLVLNLEEEYRLHEKPVPPSIDPSWLQLFPMVWAEKAGMGLANQVPPVVVELKSDASPVAVRQYPMSKEAREGIRPHIQRFLDLGILVPCQSPWNTPLLPVKKPGTNDYRPVQDLREVNKRVQDIHPTVPNPYNLLSSLPPSHTWYSVLDLKDAFFCLKLHPNSQPLFAFEWRDPEKGNTGQLTWTRLPQGFKNSPTLFNEALHRDLASFRALNPQVVMLQYVDDLLVAAPTYRDCKEGTRRLLQELSKLGYRVSAKKAQLCREEVTYLGYLLKGGKRWLTPARKATVMKIPTPTTPRQVREFLGTAGFCRLWIPGFASLAAPLYPLTRPKVPFTWTEAHQEAFGRIKEALLSAPALALPDLTKPFALYVDEKEGVARGVLTQTLGPWRRPVAYLSKKLDPVASGWPTCLKAIAAVALLLKDADKLTLGQNVLVIAPHNLESIVRQPPDRWMTNARMTHYQSLLLNERVSFAPPAILNPATLLPVESDDTPIHICSEILAEETGTRPDLRDQPLPGVPAWYTDGSSFIMDGRRQAGAAIVDNKRTVWASNLPEGTSAQKAELIALTQALRLAEGKSINIYTDSRYAFATAHVHGAIYKQRGWLTSAGKDIKNKEEILALLEAIHLPKRVAIIHCPGHQRGTDPVATGNRKADEAAKQAAQSTRILTETTKNAGKRTADGSEFEKRTADGSEFESPKKKAKVE

SEQ ID NO: 6787 - protein, 2215 aa, synthetic construct
MPAAKRVKLDGGDKKYSIGLDIGTNSVGWAVITDEYKVPSKKFKVLGNTDRHSIKKNLIGALLFDSGETAEATRLKRTARRRYTRRKNRICYLQEIFSNEMAKVDDSFFHRLEESFLVEEDKKHERHPIFGNIVDEVAYHEKYPTIYHLRKKLVDSTDKADLRLIYLALAHMIKFRGHFLIEGDLNPDNSDVDKLFIQLVQTYNQLFEENPINASGVDAKAILSARLSKSRRLENLIAQLPGEKKNGLFGNLIALSLGLTPNFKSNFDLAEDAKLQLSKDTYDDDLDNLLAQIGDQYADLFLAAKNLSDAILLSDILRVNTEITKAPLSASMIKRYDEHHQDLTLLKALVRQQLPEKYKEIFFDQSKNGYAGYIDGGASQEEFYKFIKPILEKMDGTEELLVKLNREDLLRKQRTFDNGSIPHQIHLGELHAILRRQEDFYPFLKDNREKIEKILTFRIPYYVGPLARGNSRFAWMTRKSEETITPWNFEEVVDKGASAQSFIERMTNFDKNLPNEKVLPKHSLLYEYFTVYNELTKVKYVTEGMRKPAFLSGEQKKAIVDLLFKTNRKVTVKQLKEDYFKKIECFDSVEISGVEDRFNASLGTYHDLLKIIKDKDFLDNEENEDILEDIVLTLTLFEDREMIEERLKTYAHLFDDKVMKQLKRRRYTGWGRLSRKLINGIRDKQSGKTILDFLKSDGFANRNFMQLIHDDSLTFKEDIQKAQVSGQGDSLHEHIANLAGSPAIKKGILQTVKVVDELVKVMGRHKPENIVIEMARENQTTQKGQKNSRERMKRIEEGIKELGSQILKEHPVENTQLQNEKLYLYYLQNGRDMYVDQELDINRLSDYDVDHIVPQSFLKDDSIDNKVLTRSDKARGKSDNVPSEEVVKKMKNYWRQLLNAKLITQRKFDNLTKAERGGLSELDKAGFIKRQLVETRQITKHVAQILDSRMNTKYDENDKLIREVKVITLKSKLVSDFRKDFQFYKVREINNYHHAHDAYLNAVVGTALIKKYPKLESEFVYGDYKVYDVRKMIAKSEQEIGKATAKYFFYSNIMNFFKTEITLANGEIRKRPLIETNGETGEIVWDKGRDFATVRKVLSMPQVNIVKKTEVQTGGFSKESILPKRNSDKLIARKKDWDPKKYGGFDSPTVAYSVLVVAKVEKGKSKKLKSVKELLGITIMERSSFEKNPIDFLEAKGYKEVKKDLIIKLPKYSLFELENGRKRMLASAGELQKGNELALPSKYVNFLYLASHYEKLKGSPEDNEQKQLFVEQHKHYLDEIIEQISEFSKRVILADANLDKVLSAYNKHRDKPIREQAENIIHLFTLTNLGAPAAFKYFDTTIDRKRYTSTKEVLDATLIHQSITGLYETRIDLSQLGGDGGPAPEAAAKGGTLGDQGSRGSDPLPEPRVTLTVEGIPTEFLVNTGAEHSVLTKPMGKMGSKRTVVAGATGSKVYPWTTKRLLKIGQKQVTHSFLVIPECPAPLLGRDLLTKLKAQIQFSTEGPQVTWEDRPAMCLVLNLEEEYRLHEKPVPPSIDPSWLQLFPMVWAEKAGMGLANQVPPVVVELKSDASPVAVRQYPMSKEAREGIRPHIQRFLDLGILVPCQSPWNTPLLPVKKPGTNDYRPVQDLREVNKRVQDIHPTVPNPYNLLSSLPPSHTWYSVLDLKDAFFCLKLHPNSQPLFAFEWRDPEKGNTGQLTWTRLPQGFKNSPTLFNEALHRDLASFRALNPQVVMLQYVDDLLVAAPTYRDCKEGTRRLLQELSKLGYRVSAKKAQLCREEVTYLGYLLKGGKRWLTPARKATVMKIPTPTTPRQVREFLGKAGFCRLFIPGFASLAAPLYPLTRPKVPFTWTEAHQEAFGRIKEALLSAPALALPDLTKPFALYVDEKEGVARGVLTQTLGPWRRPVAYLSKKLDPVASGWPTCLKAIAAVALLLKDADKLTLGQNVLVIAPHNLESIVRQPPDRWMTNARMTHYQSLLLNERVSFAPPAILNPATLLPVESDDTPIHICSEILAEETGTRPDLRDQPLPGVPAWYTDGSSFIMDGRRQAGAAIVDNKRTVWASNLPEGTSAQKAELIALTQALRLAEGKSINIYTDSRYAFATAHVHGAIYKQRGWLTSAGKDIKNKEEILALLEAIHLPKRVAIIHCPGHQRGTDPVATGNRKADEAAKQAAQSTRILTETTKNAGKRTADGSEFEKRTADGSEFESPKKKAKVE

SEQ ID NO: 6788 - protein, 2093 aa, synthetic construct; identical to SEQ ID NO: 4516

SEQ ID NO: 6789 - protein, 2093 aa, synthetic construct
MPAAKRVKLDGGDKKYSIGLDIGTNSVGWAVITDEYKVPSKKFKVLGNTDRHSIKKNLIGALLFDSGETAEATRLKRTARRRYTRRKNRICYLQEIFSNEMAKVDDSFFHRLEESFLVEEDKKHERHPIFGNIVDEVAYHEKYPTIYHLRKKLVDSTDKADLRLIYLALAHMIKFRGHFLIEGDLNPDNSDVDKLFIQLVQTYNQLFEENPINASGVDAKAILSARLSKSRRLENLIAQLPGEKKNGLFGNLIALSLGLTPNFKSNFDLAEDAKLQLSKDTYDDDLDNLLAQIGDQYADLFLAAKNLSDAILLSDILRVNTEITKAPLSASMIKRYDEHHQDLTLLKALVRQQLPEKYKEIFFDQSKNGYAGYIDGGASQEEFYKFIKPILEKMDGTEELLVKLNREDLLRKQRTFDNGSIPHQIHLGELHAILRRQEDFYPFLKDNREKIEKILTFRIPYYVGPLARGNSRFAWMTRKSEETITPWNFEEVVDKGASAQSFIERMTNFDKNLPNEKVLPKHSLLYEYFTVYNELTKVKYVTEGMRKPAFLSGEQKKAIVDLLFKTNRKVTVKQLKEDYFKKIECFDSVEISGVEDRFNASLGTYHDLLKIIKDKDFLDNEENEDILEDIVLTLTLFEDREMIEERLKTYAHLFDDKVMKQLKRRRYTGWGRLSRKLINGIRDKQSGKTILDFLKSDGFANRNFMQLIHDDSLTFKEDIQKAQVSGQGDSLHEHIANLAGSPAIKKGILQTVKVVDELVKVMGRHKPENIVIEMARENQTTQKGQKNSRERMKRIEEGIKELGSQILKEHPVENTQLQNEKLYLYYLQNGRDMYVDQELDINRLSDYDVDHIVPQSFLKDDSIDNKVLTRSDKARGKSDNVPSEEVVKKMKNYWRQLLNAKLITQRKFDNLTKAERGGLSELDKAGFIKRQLVETRQITKHVAQILDSRMNTKYDENDKLIREVKVITLKSKLVSDFRKDFQFYKVREINNYHHAHDAYLNAVVGTALIKKYPKLESEFVYGDYKVYDVRKMIAKSEQEIGKATAKYFFYSNIMNFFKTEITLANGEIRKRPLIETNGETGEIVWDKGRDFATVRKVLSMPQVNIVKKTEVQTGGFSKESILPKRNSDKLIARKKDWDPKKYGGFDSPTVAYSVLVVAKVEKGKSKKLKSVKELLGITIMERSSFEKNPIDFLEAKGYKEVKKDLIIKLPKYSLFELENGRKRMLASAGELQKGNELALPSKYVNFLYLASHYEKLKGSPEDNEQKQLFVEQHKHYLDEIIEQISEFSKRVILADANLDKVLSAYNKHRDKPIREQAENIIHLFTLTNLGAPAAFKYFDTTIDRKRYTSTKEVLDATLIHQSITGLYETRIDLSQLGGDGGPAPEAAAKGGTLNIEDEYRLHETSKEPDVSLGSTWLSDFPQAWAETGGMGLAVRQAPLIIPLKATSTPVSIKQYPMSQEARLGIKPHIQRLLDQGILVPCQSPWNTPLLPVKKPGTNDYRPVQDLREVNKRVEDIHPTVPNPYNLLSGLPPSHQWYTVLDLKDAFFCLRLHPTSQPLFAFEWRDPEMGISGQLTWTRLPQGFKNSPTLFNEALHRDLAGFRIQHPDLILLQYVDDLLLAATSELDCQQGTRALLQTLGDLGYRASAKKAQICQKQVKYLGYLLKEGQRWLTEARKETVMGQPIPKTPRQLREFLGTAGFCRLWIPGFAEMAAPLYPLTKPGTLFNWGPDQQKAFQEIKQALLTAPALGLPDLTKPFELFVDEKQGYAKGVLTQKLGPWRRPVAYLSKKLDPVAAGWPPCLRMVAAIAVLTKDAGKLTMGQPLVILAPHAVEALVKQPPDRWLSNARMTHYQALLLDTDRVQFGPVVALNPATLLPLPEEGLQHDCLDILAEAHGTRSDLMDQPLPDADHTWYTDGSSFLQEGQRKAGAAVTTETEVIWARALPAGTSAQRAELIALTQALKMAEGKKLNVYTDSRYAFATAHIHGEIYRRRGWLTSEGKEIKNKDEILALLKALFLPKRLSIIHCPGHQKGNSAEARGNRMADQAAREVATRETPETSTLLAGKRTADGSEFEKRTADGSEFESPKKKAKVE

SEQ ID NO: 6790 - protein, 2113 aa, synthetic construct
MPAAKRVKLDGGDKKYSIGLDIGTNSVGWAVITDEYKVPSKKFKVLGNTDRHSIKKNLIGALLFDSGETAEATRLKRTARRRYTRRKNRICYLQEIFSNEMAKVDDSFFHRLEESFLVEEDKKHERHPIFGNIVDEVAYHEKYPTIYHLRKKLVDSTDKADLRLIYLALAHMIKFRGHFLIEGDLNPDNSDVDKLFIQLVQTYNQLFEENPINASGVDAKAILSARLSKSRRLENLIAQLPGEKKNGLFGNLIALSLGLTPNFKSNFDLAEDAKLQLSKDTYDDDLDNLLAQIGDQYADLFLAAKNLSDAILLSDILRVNTEITKAPLSASMIKRYDEHHQDLTLLKALVRQQLPEKYKEIFFDQSKNGYAGYIDGGASQEEFYKFIKPILEKMDGTEELLVKLNREDLLRKQRTFDNGSIPHQIHLGELHAILRRQEDFYPFLKDNREKIEKILTFRIPYYVGPLARGNSRFAWMTRKSEETITPWNFEEVVDKGASAQSFIERMTNFDKNLPNEKVLPKHSLLYEYFTVYNELTKVKYVTEGMRKPAFLSGEQKKAIVDLLFKTNRKVTVKQLKEDYFKKIECFDSVEISGVEDRFNASLGTYHDLLKIIKDKDFLDNEENEDILEDIVLTLTLFEDREMIEERLKTYAHLFDDKVMKQLKRRRYTGWGRLSRKLINGIRDKQSGKTILDFLKSDGFANRNFMQLIHDDSLTFKEDIQKAQVSGQGDSLHEHIANLAGSPAIKKGILQTVKVVDELVKVMGRHKPENIVIEMARENQTTQKGQKNSRERMKRIEEGIKELGSQILKEHPVENTQLQNEKLYLYYLQNGRDMYVDQELDINRLSDYDVDHIVPQSFLKDDSIDNKVLTRSDKARGKSDNVPSEEVVKKMKNYWRQLLNAKLITQRKFDNLTKAERGGLSELDKAGFIKRQLVETRQITKHVAQILDSRMNTKYDENDKLIREVKVITLKSKLVSDFRKDFQFYKVREINNYHHAHDAYLNAVVGTALIKKYPKLESEFVYGDYKVYDVRKMIAKSEQEIGKATAKYFFYSNIMNFFKTEITLANGEIRKRPLIETNGETGEIVWDKGRDFATVRKVLSMPQVNIVKKTEVQTGGFSKESILPKRNSDKLIARKKDWDPKKYGGFDSPTVAYSVLVVAKVEKGKSKKLKSVKELLGITIMERSSFEKNPIDFLEAKGYKEVKKDLIIKLPKYSLFELENGRKRMLASAGELQKGNELALPSKYVNFLYLASHYEKLKGSPEDNEQKQLFVEQHKHYLDEIIEQISEFSKRVILADANLDKVLSAYNKHRDKPIREQAENIIHLFTLTNLGAPAAFKYFDTTIDRKRYTSTKEVLDATLIHQSITGLYETRIDLSQLGGDGGPAPEAAAKGGVQEISDSRPMLHIYLNGRRFLGLLDTGADKTCIAGRDWPANWPIHQTESSLQGLGMACGVARSSQPLRWQHEDKSGIIHPFVIPTLPFTLWGRDIMKDIKVRLMTDSPDDSQDLMIGAIESNLFADQISWKSDQPVWLNQWPLKQEKLQALQQLVTEQLQLGHLEESNSPWNTPVFVIKKKSGKWRLLQDLRAVNATMHDMGALQPGLPSPVAVPKGWEIIIIDLQDCFFNIKLHPEDCKRFAFSVPSPNFKRPYQRFQWKVLPQGMKNSPTLCQKFVDKAILTVRDKYQDSYIVHYMDDILLAHPSRSIVDEILTSMIQALNKHGLVVSTEKIQKYDNLKYLGTHIQGDSVSYQKLQIRTDKLRTLNDFQKLLGNINWIRPFLKLTTGELKPLFEILNPDSNPISTRKLTPEACKALQLMNERLSTARVKRLDLSQPWSLCILKTEYTPTACLWQDGVVEWIHLPHISPKVITPYDIFCTQLIIKGRHRSKELFSKDPDYIVVPYTKVQFDLLLQEKEDWPISLLGFLGEVHFHLPKDPLLTFTLQTAIIFPHMTSTTPLEKGIVIFTDGSANGRSVTYIQGREPIIKENTQNTAQQAEIVAVITAFEEVSQPFNLYTDSKYVTGLFPEIETATLSPRTKIYTELKHLQRLIHKRQEKFYIGHIRGHTGLPGPLAQGNAYADSLTRILTAAGKRTADGSEFEKRTADGSEFESPKKKAKVE

SEQ ID NO: 6791 - protein, 2085 aa, synthetic construct
MPAAKRVKLDGGDKKYSIGLDIGTNSVGWAVITDEYKVPSKKFKVLGNTDRHSIKKNLIGALLFDSGETAEATRLKRTARRRYTRRKNRICYLQEIFSNEMAKVDDSFFHRLEESFLVEEDKKHERHPIFGNIVDEVAYHEKYPTIYHLRKKLVDSTDKADLRLIYLALAHMIKFRGHFLIEGDLNPDNSDVDKLFIQLVQTYNQLFEENPINASGVDAKAILSARLSKSRRLENLIAQLPGEKKNGLFGNLIALSLGLTPNFKSNFDLAEDAKLQLSKDTYDDDLDNLLAQIGDQYADLFLAAKNLSDAILLSDILRVNTEITKAPLSASMIKRYDEHHQDLTLLKALVRQQLPEKYKEIFFDQSKNGYAGYIDGGASQEEFYKFIKPILEKMDGTEELLVKLNREDLLRKQRTFDNGSIPHQIHLGELHAILRRQEDFYPFLKDNREKIEKILTFRIPYYVGPLARGNSRFAWMTRKSEETITPWNFEEVVDKGASAQSFIERMTNFDKNLPNEKVLPKHSLLYEYFTVYNELTKVKYVTEGMRKPAFLSGEQKKAIVDLLFKTNRKVTVKQLKEDYFKKIECFDSVEISGVEDRFNASLGTYHDLLKIIKDKDFLDNEENEDILEDIVLTLTLFEDREMIEERLKTYAHLFDDKVMKQLKRRRYTGWGRLSRKLINGIRDKQSGKTILDFLKSDGFANRNFMQLIHDDSLTFKEDIQKAQVSGQGDSLHEHIANLAGSPAIKKGILQTVKVVDELVKVMGRHKPENIVIEMARENQTTQKGQKNSRERMKRIEEGIKELGSQILKEHPVENTQLQNEKLYLYYLQNGRDMYVDQELDINRLSDYDVDHIVPQSFLKDDSIDNKVLTRSDKARGKSDNVPSEEVVKKMKNYWRQLLNAKLITQRKFDNLTKAERGGLSELDKAGFIKRQLVETRQITKHVAQILDSRMNTKYDENDKLIREVKVITLKSKLVSDFRKDFQFYKVREINNYHHAHDAYLNAVVGTALIKKYPKLESEFVYGDYKVYDVRKMIAKSEQEIGKATAKYFFYSNIMNFFKTEITLANGEIRKRPLIETNGETGEIVWDKGRDFATVRKVLSMPQVNIVKKTEVQTGGFSKESILPKRNSDKLIARKKDWDPKKYGGFDSPTVAYSVLVVAKVEKGKSKKLKSVKELLGITIMERSSFEKNPIDFLEAKGYKEVKKDLIIKLPKYSLFELENGRKRMLASAGELQKGNELALPSKYVNFLYLASHYEKLKGSPEDNEQKQLFVEQHKHYLDEIIEQISEFSKRVILADANLDKVLSAYNKHRDKPIREQAENIIHLFTLTNLGAPAAFKYFDTTIDRKRYTSTKEVLDATLIHQSITGLYETRIDLSQLGGDGGPAPEAAAKGGLDDEYRLYSPLVKPDQNIQFWLEQFPQAWAETAGMGLAKQVPPQVIQLKASATPVSVRQYPLSKEAQEGIRPHVQRLIQQGILVPVQSPWNTPLLPVRKPGTNDYRPVQDLREVNKRVQDIHPTVPNPYNLLCALPPQRSWYTVLDLKDAFFCLRLHPTSQPLFAFEWRDPGTGRTGQLTWTRLPQGFKNSPTIFNEALHRDLANFRIQHPQVTLLQYVDDLLLAGATKQDCLEGTKALLLELSDLGYRASAKKAQICRREVTYLGYSLRDGQRWLTEARKKTVVQIPAPTTAKQVREFLGKAGFCRLFIPGFATLAAPLYPLTKPKGEFSWAPEHQKAFDAIKKALLSAPALALPDVTKPFTLYVDERKGVARGVLTQTLGPWRRPVAYLSKKLDPVASGWPVCLKAIAAVAILVKDADKLTLGQNITVIAPHALENIVRQPPDRWMTNARMTHYQSLLLTERVTFAPPAALNPATLLPEETDEPVTHDCHQLLIEETGVRKDLTDIPLTGEVLTWFTDGSSYVVEGKRMAGAAVVDGTRTIWASSLPEGTSAQKAELMALTQALRLAEGKSINIYTDSRYAFATAHVHGAIYKQRGWLTSAGREIKNKEEILSLLEALHLPKRLAIIHCPGHQKAKDPISRGNQMADRVAKQAAQGVNLLPAGKRTADGSEFEKRTADGSEFESPKKKAKVE

SEQ ID NO: 6792 - protein, 2087 aa, synthetic construct
MPAAKRVKLDGGDKKYSIGLDIGTNSVGWAVITDEYKVPSKKFKVLGNTDRHSIKKNLIGALLFDSGETAEATRLKRTARRRYTRRKNRICYLQEIFSNEMAKVDDSFFHRLEESFLVEEDKKHERHPIFGNIVDEVAYHEKYPTIYHLRKKLVDSTDKADLRLIYLALAHMIKFRGHFLIEGDLNPDNSDVDKLFIQLVQTYNQLFEENPINASGVDAKAILSARLSKSRRLENLIAQLPGEKKNGLFGNLIALSLGLTPNFKSNFDLAEDAKLQLSKDTYDDDLDNLLAQIGDQYADLFLAAKNLSDAILLSDILRVNTEITKAPLSASMIKRYDEHHQDLTLLKALVRQQLPEKYKEIFFDQSKNGYAGYIDGGASQEEFYKFIKPILEKMDGTEELLVKLNREDLLRKQRTFDNGSIPHQIHLGELHAILRRQEDFYPFLKDNREKIEKILTFRIPYYVGPLARGNSRFAWMTRKSEETITPWNFEEVVDKGASAQSFIERMTNFDKNLPNEKVLPKHSLLYEYFTVYNELTKVKYVTEGMRKPAFLSGEQKKAIVDLLFKTNRKVTVKQLKEDYFKKIECFDSVEISGVEDRFNASLGTYHDLLKIIKDKDFLDNEENEDILEDIVLTLTLFEDREMIEERLKTYAHLFDDKVMKQLKRRRYTGWGRLSRKLINGIRDKQSGKTILDFLKSDGFANRNFMQLIHDDSLTFKEDIQKAQVSGQGDSLHEHIANLAGSPAIKKGILQTVKVVDELVKVMGRHKPENIVIEMARENQTTQKGQKNSRERMKRIEEGIKELGSQILKEHPVENTQLQNEKLYLYYLQNGRDMYVDQELDINRLSDYDVDHIVPQSFLKDDSIDNKVLTRSDKARGKSDNVPSEEVVKKMKNYWRQLLNAKLITQRKFDNLTKAERGGLSELDKAGFIKRQLVETRQITKHVAQILDSRMNTKYDENDKLIREVKVITLKSKLVSDFRKDFQFYKVREINNYHHAHDAYLNAVVGTALIKKYPKLESEFVYGDYKVYDVRKMIAKSEQEIGKATAKYFFYSNIMNFFKTEITLANGEIRKRPLIETNGETGEIVWDKGRDFATVRKVLSMPQVNIVKKTEVQTGGFSKESILPKRNSDKLIARKKDWDPKKYGGFDSPTVAYSVLVVAKVEKGKSKKLKSVKELLGITIMERSSFEKNPIDFLEAKGYKEVKKDLIIKLPKYSLFELENGRKRMLASAGELQKGNELALPSKYVNFLYLASHYEKLKGSPEDNEQKQLFVEQHKHYLDEIIEQISEFSKRVILADANLDKVLSAYNKHRDKPIREQAENIIHLFTLTNLGAPAAFKYFDTTIDRKRYTSTKEVLDATLIHQSITGLYETRIDLSQLGGDGGPAPEAAAKGGTLQLDDEYRLYSPLVKPDQNIQFWLEQFPQAWAETAGMGLAKQVPPQVIQLKASATPVSVRQYPLSKEAQEGIRPHVQRLIQQGILVPVQSPWNTPLLPVRKPGTNDYRPVQDLREVNKRVQDIHPTVPNPYNLLCALPPQRSWYTVLDLKDAFFCLRLHPTSQPLFAFEWRDPGTGRTGQLTWTRLPQGFKNSPTIFDEALHRDLANFRIQHPQVTLLQYVDDLLLAGATKQDCLEGTKALLLELSDLGYRASAKKAQICRREVTYLGYSLRDGQRWLTEARKKTVVQIPAPTTAKQVREFLGTAGFCRLWIPGFATLAAPLYPLTKEKGEFSWAPEHQKAFDAIKKALLSAPALALPDVTKPFTLYVDERKGVARGVLTQTLGPWRRPVAYLSKKLDPVASGWPVCLKAIAAVAILVKDADKLTLGQNITVIAPHALENIVRQPPDRWMTNARMTHYQSLLLTERVTFAPPAALNPATLLPEETDEPVTHDCHQLLIEETGVRKDLTDIPLTGEVLTWFTDGSSYVVEGKRMAGAAVVDGTRTIWASSLPEGTSAQKAELMALTQALRLAEGKSINIYTDSRYAFATAHVHGAIYKQRGLLTSAGREIKNKEEILSLLEALHLPKRLAIIHCPGHQKAKDPISRGNQMADRVAKQAAQGVNLLAGKRTADGSEFEKRTADGSEFESPKKKAKVE

SEQ ID NO: 6793 - protein, 2085 aa, synthetic construct; identical to SEQ ID NO: 6791

SEQ ID NO: 6794 - protein, 2087 aa, synthetic construct; identical to SEQ ID NO: 6792

SEQ ID NO: 6795 - protein, 2091 aa, synthetic construct
MPAAKRVKLDGGDKKYSIGLDIGTNSVGWAVITDEYKVPSKKFKVLGNTDRHSIKKNLIGALLFDSGETAEATRLKRTARRRYTRRKNRICYLQEIFSNEMAKVDDSFFHRLEESFLVEEDKKHERHPIFGNIVDEVAYHEKYPTIYHLRKKLVDSTDKADLRLIYLALAHMIKFRGHFLIEGDLNPDNSDVDKLFIQLVQTYNQLFEENPINASGVDAKAILSARLSKSRRLENLIAQLPGEKKNGLFGNLIALSLGLTPNFKSNFDLAEDAKLQLSKDTYDDDLDNLLAQIGDQYADLFLAAKNLSDAILLSDILRVNTEITKAPLSASMIKRYDEHHQDLTLLKALVRQQLPEKYKEIFFDQSKNGYAGYIDGGASQEEFYKFIKPILEKMDGTEELLVKLNREDLLRKQRTFDNGSIPHQIHLGELHAILRRQEDFYPFLKDNREKIEKILTFRIPYYVGPLARGNSRFAWMTRKSEETITPWNFEEVVDKGASAQSFIERMTNFDKNLPNEKVLPKHSLLYEYFTVYNELTKVKYVTEGMRKPAFLSGEQKKAIVDLLFKTNRKVTVKQLKEDYFKKIECFDSVEISGVEDRFNASLGTYHDLLKIIKDKDFLDNEENEDILEDIVLTLTLFEDREMIEERLKTYAHLFDDKVMKQLKRRRYTGWGRLSRKLINGIRDKQSGKTILDFLKSDGFANRNFMQLIHDDSLTFKEDIQKAQVSGQGDSLHEHIANLAGSPAIKKGILQTVKVVDELVKVMGRHKPENIVIEMARENQTTQKGQKNSRERMKRIEEGIKELGSQILKEHPVENTQLQNEKLYLYYLQNGRDMYVDQELDINRLSDYDVDHIVPQSFLKDDSIDNKVLTRSDKARGKSDNVPSEEVVKKMKNYWRQLLNAKLITQRKFDNLTKAERGGLSELDKAGFIKRQLVETRQITKHVAQILDSRMNTKYDENDKLIREVKVITLKSKLVSDFRKDFQFYKVREINNYHHAHDAYLNAVVGTALIKKYPKLESEFVYGDYKVYDVRKMIAKSEQEIGKATAKYFFYSNIMNFFKTEITLANGEIRKRPLIETNGETGEIVWDKGRDFATVRKVLSMPQVNIVKKTEVQTGGFSKESILPKRNSDKLIARKKDWDPKKYGGFDSPTVAYSVLVVAKVEKGKSKKLKSVKELLGITIMERSSFEKNPIDFLEAKGYKEVKKDLIIKLPKYSLFELENGRKRMLASAGELQKGNELALPSKYVNFLYLASHYEKLKGSPEDNEQKQLFVEQHKHYLDEIIEQISEFSKRVILADANLDKVLSAYNKHRDKPIREQAENIIHLFTLTNLGAPAAFKYFDTTIDRKRYTSTKEVLDATLIHQSITGLYETRIDLSQLGGDGGPAPEAAAKGGVLNLEEEYRLHEKPVPSSIDPSWLQLFPTVWAERAGMGLANQVPPVVVELRSGASPVAVRQYPMSKEAREGIRPHIQRFLDLGVLVPCQSPWNTPLLPVKKPGTNDYRPVQDLREINKRVQDIHPTVPNPYNLLSSLPPSHTWYSVLDLKDAFFCLKLHPNSQPLFAFEWRDPEKGNTGQLTWTRLPQGFKNSPTLFDEALHRDLAPFRALNPQVVLLQYVDDLLVAAPTYRDCKEGTQKLLQELSKLGYRVSAKKAQLCQKEVTYLGYLLKEGKRWLTPARKATVMKIPPPTTPRQVREFLGTAGFCRLWIPGFASLAAPLYPLTKESIPFIWTEEHQKAFDRIKEALLSAPALALPDLTKPFTLYVDERAGVARGVLTQTLGPWRRPVAYLSKKLDPVASGWPTCLKAVAAVALLLKDADKLTLGQNVTVIASHSLESIVRQPPDRWMTNARMTHYQSLLLNERVSFAPPAVLNPATLLPVESEATPVHRCSEILAEETGTRRDLKDQPLPGVPAWYTDGSSFIAEGKRRAGAAIVDGKRTVWASSLPEGTSAQKAELVALTQALRLAEGKDINIYTDSRYAFATAHIHGAIYKQRGLLTSAGKDIKNKEEILALLEAIHLPKRVAIIHCPGHQKGNDPVATGNRRADEAAKQAALSTRVLAETTKPAGKRTADGSEFEKRTADGSEFESPKKKAKVE

SEQ ID NO: 6796 - protein, 2093 aa, synthetic construct
MPAAKRVKLDGGDKKYSIGLDIGTNSVGWAVITDEYKVPSKKFKVLGNTDRHSIKKNLIGALLFDSGETAEATRLKRTARRRYTRRKNRICYLQEIFSNEMAKVDDSFFHRLEESFLVEEDKKHERHPIFGNIVDEVAYHEKYPTIYHLRKKLVDSTDKADLRLIYLALAHMIKFRGHFLIEGDLNPDNSDVDKLFIQLVQTYNQLFEENPINASGVDAKAILSARLSKSRRLENLIAQLPGEKKNGLFGNLIALSLGLTPNFKSNFDLAEDAKLQLSKDTYDDDLDNLLAQIGDQYADLFLAAKNLSDAILLSDILRVNTEITKAPLSASMIKRYDEHHQDLTLLKALVRQQLPEKYKEIFFDQSKNGYAGYIDGGASQEEFYKFIKPILEKMDGTEELLVKLNREDLLRKQRTFDNGSIPHQIHLGELHAILRRQEDFYPFLKDNREKIEKILTFRIPYYVGPLARGNSRFAWMTRKSEETITPWNFEEVVDKGASAQSFIERMTNFDKNLPNEKVLPKHSLLYEYFTVYNELTKVKYVTEGMRKPAFLSGEQKKAIVDLLFKTNRKVTVKQLKEDYFKKIECFDSVEISGVEDRFNASLGTYHDLLKIIKDKDFLDNEENEDILEDIVLTLTLFEDREMIEERLKTYAHLFDDKVMKQLKRRRYTGWGRLSRKLINGIRDKQSGKTILDFLKSDGFANRNFMQLIHDDSLTFKEDIQKAQVSGQGDSLHEHIANLAGSPAIKKGILQTVKVVDELVKVMGRHKPENIVIEMARENQTTQKGQKNSRERMKRIEEGIKELGSQILKEHPVENTQLQNEKLYLYYLQNGRDMYVDQELDINRLSDYDVDHIVPQSFLKDDSIDNKVLTRSDKARGKSDNVPSEEVVKKMKNYWRQLLNAKLITQRKFDNLTKAERGGLSELDKAGFIKRQLVETRQITKHVAQILDSRMNTKYDENDKLIREVKVITLKSKLVSDFRKDFQFYKVREINNYHHAHDAYLNAVVGTALIKKYPKLESEFVYGDYKVYDVRKMIAKSEQEIGKATAKYFFYSNIMNFFKTEITLANGEIRKRPLIETNGETGEIVWDKGRDFATVRKVLSMPQVNIVKKTEVQTGGFSKESILPKRNSDKLIARKKDWDPKKYGGFDSPTVAYSVLVVAKVEKGKSKKLKSVKELLGITIMERSSFEKNPIDFLEAKGYKEVKKDLIIKLPKYSLFELENGRKRMLASAGELQKGNELALPSKYVNFLYLASHYEKLKGSPEDNEQKQLFVEQHKHYLDEIIEQISEFSKRVILADANLDKVLSAYNKHRDKPIREQAENIIHLFTLTNLGAPAAFKYFDTTIDRKRYTSTKEVLDATLIHQSITGLYETRIDLSQLGGDGGPAPEAAAKGGTLNIEDEYRLHETSKEPDVPLGSTWLSDFPQAWAETGGMGLAVRQAPLIIPLKATSTPVSIKQYPMSQEARLGIKPHIQRLLDQGILVPCQSPWNTPLLPVKKPGTNDYRPVQDLREVNKRVEDIHPTVPNPYNLLSGLPPSHQWYTVLDLKDAFFCLRLHPTSQPLFAFEWRDPEMGISGQLTWTRLPQGFKNSPTLFNEALHRDLADFRIQHPDLILLQYVDDLLLAATSEQDCQRGTRALLQTLGNLGYRASAKKAQICQKQVKYLGYLLKEGQRWLTEARKETVMGQPTPKTPRQLREFLGTAGFCRLWIPGFAEMAAPLYPLTKPGTLFNWGPDQQKAYQEIKQALLTAPALGLPDLTKPFELFVDEKQGYAKGVLTQKLGPWRRPVAYLSKKLDPVAAGWPPCLRMVAAIAVLTKDAGKLTMGQPLVILAPHAVEALVKQPPDRWLSNARMTHYQAMLLDTDRVQFGPVVALNPATLLPLPEKEAPHDCLEILAETHGTRPDLTDQPIPDADYTWYTDGSSFLQEGQRRAGAAVTTETEVIWARALPAGTSAQRAELIALTQALKMAEGKKLNVYTDSRYAFATAHVHGEIYRRRGWLTSEGREIKNKNEILALLKALFLPKRLSIIHCPGHQKGNSAEARGNRMADQAAREAAMKAVLETSTLLAGKRTADGSEFEKRTADGSEFESPKKKAKVE

SEQ ID NO: 6797 - protein, 2093 aa, synthetic construct
MPAAKRVKLDGGDKKYSIGLDIGTNSVGWAVITDEYKVPSKKFKVLGNTDRHSIKKNLIGALLFDSGETAEATRLKRTARRRYTRRKNRICYLQEIFSNEMAKVDDSFFHRLEESFLVEEDKKHERHPIFGNIVDEVAYHEKYPTIYHLRKKLVDSTDKADLRLIYLALAHMIKFRGHFLIEGDLNPDNSDVDKLFIQLVQTYNQLFEENPINASGVDAKAILSARLSKSRRLENLIAQLPGEKKNGLFGNLIALSLGLTPNFKSNFDLAEDAKLQLSKDTYDDDLDNLLAQIGDQYADLFLAAKNLSDAILLSDILRVNTEITKAPLSASMIKRYDEHHQDLTLLKALVRQQLPEKYKEIFFDQSKNGYAGYIDGGASQEEFYKFIKPILEKMDGTEELLVKLNREDLLRKQRTFDNGSIPHQIHLGELHAILRRQEDFYPFLKDNREKIEKILTFRIPYYVGPLARGNSRFAWMTRKSEETITPWNFEEVVDKGASAQSFIERMTNFDKNLPNEKVLPKHSLLYEYFTVYNELTKVKYVTEGMRKPAFLSGEQKKAIVDLLFKTNRKVTVKQLKEDYFKKIECFDSVEISGVEDRFNASLGTYHDLLKIIKDKDFLDNEENEDILEDIVLTLTLFEDREMIEERLKTYAHLFDDKVMKQLKRRRYTGWGRLSRKLINGIRDKQSGKTILDFLKSDGFANRNFMQLIHDDSLTFKEDIQKAQVSGQGDSLHEHIANLAGSPAIKKGILQTVKVVDELVKVMGRHKPENIVIEMARENQTTQKGQKNSRERMKRIEEGIKELGSQILKEHPVENTQLQNEKLYLYYLQNGRDMYVDQELDINRLSDYDVDHIVPQSFLKDDSIDNKVLTRSDKARGKSDNVPSEEVVKKMKNYWRQLLNAKLITQRKFDNLTKAERGGLSELDKAGFIKRQLVETRQITKHVAQILDSRMNTKYDENDKLIREVKVITLKSKLVSDFRKDFQFYKVREINNYHHAHDAYLNAVVGTALIKKYPKLESEFVYGDYKVYDVRKMIAKSEQEIGKATAKYFFYSNIMNFFKTEITLANGEIRKRPLIETNGETGEIVWDKGRDFATVRKVLSMPQVNIVKKTEVQTGGFSKESILPKRNSDKLIARKKDWDPKKYGGFDSPTVAYSVLVVAKVEKGKSKKLKSVKELLGITIMERSSFEKNPIDFLEAKGYKEVKKDLIIKLPKYSLFELENGRKRMLASAGELQKGNELALPSKYVNFLYLASHYEKLKGSPEDNEQKQLFVEQHKHYLDEIIEQISEFSKRVILADANLDKVLSAYNKHRDKPIREQAENIIHLFTLTNLGAPAAFKYFDTTIDRKRYTSTKEVLDATLIHQSITGLYETRIDLSQLGGDGGPAPEAAAKGGTLNIEDEYRLHETSKEPDVPLGSTWLSDFPQAWAETGGMGLAVRQAPLIIPLKATSTPVSIKQYPMSQEARLGIKPHIQRLLDQGILVPCQSPWNTPLLPVKKPGTNDYRPVQDLREVNKRVEDIHPTVPNPYNLLSGLPPSHQWYTVLDLKDAFFCLRLHPTSQPLFAFEWRDPEMGISGQLTWTRLPQGFKNSPTLFNEALHRDLADFRIQHPDLILLQYVDDLLLAATSEQDCQRGTRALLQTLGNLGYRASAKKAQICQKQVKYLGYLLKEGQRWLTEARKETVMGQPTPKTPRQLREFLGKAGFCRLFIPGFAEMAAPLYPLTKPGTLFNWGPDQQKAYQEIKQALLTAPALGLPDLTKPFELFVDEKQGYAKGVLTQKLGPWRRPVAYLSKKLDPVAAGWPPCLRMVAAIAVLTKDAGKLTMGQPLVILAPHAVEALVKQPPDRWLSNARMTHYQAMLLDTDRVQFGPVVALNPATLLPLPEKEAPHDCLEILAETHGTRPDLTDQPIPDADYTWYTDGSSFLQEGQRRAGAAVTTETEVIWARALPAGTSAQRAELIALTQALKMAEGKKLNVYTDSRYAFATAHVHGEIYRRRGWLTSEGREIKNKNEILALLKALFLPKRLSIIHCPGHQKGNSAEARGNRMADQAAREAAMKAVLETSTLLAGKRTADGSEFEKRTADGSEFESPKKKAKVE

SEQ ID NO: 6798 - protein, 2096 aa, synthetic construct
MPAAKRVKLDGGDKKYSIGLDIGTNSVGWAVITDEYKVPSKKFKVLGNTDRHSIKKNLIGALLFDSGETAEATRLKRTARRRYTRRKNRICYLQEIFSNEMAKVDDSFFHRLEESFLVEEDKKHERHPIFGNIVDEVAYHEKYPTIYHLRKKLVDSTDKADLRLIYLALAHMIKFRGHFLIEGDLNPDNSDVDKLFIQLVQTYNQLFEENPINASGVDAKAILSARLSKSRRLENLIAQLPGEKKNGLFGNLIALSLGLTPNFKSNFDLAEDAKLQLSKDTYDDDLDNLLAQIGDQYADLFLAAKNLSDAILLSDILRVNTEITKAPLSASMIKRYDEHHQDLTLLKALVRQQLPEKYKEIFFDQSKNGYAGYIDGGASQEEFYKFIKPILEKMDGTEELLVKLNREDLLRKQRTFDNGSIPHQIHLGELHAILRRQEDFYPFLKDNREKIEKILTFRIPYYVGPLARGNSRFAWMTRKSEETITPWNFEEVVDKGASAQSFIERMTNFDKNLPNEKVLPKHSLLYEYFTVYNELTKVKYVTEGMRKPAFLSGEQKKAIVDLLFKTNRKVTVKQLKEDYFKKIECFDSVEISGVEDRFNASLGTYHDLLKIIKDKDFLDNEENEDILEDIVLTLTLFEDREMIEERLKTYAHLFDDKVMKQLKRRRYTGWGRLSRKLINGIRDKQSGKTILDFLKSDGFANRNFMQLIHDDSLTFKEDIQKAQVSGQGDSLHEHIANLAGSPAIKKGILQTVKVVDELVKVMGRHKPENIVIEMARENQTTQKGQKNSRERMKRIEEGIKELGSQILKEHPVENTQLQNEKLYLYYLQNGRDMYVDQELDINRLSDYDVDHIVPQSFLKDDSIDNKVLTRSDKARGKSDNVPSEEVVKKMKNYWRQLLNAKLITQRKFDNLTKAERGGLSELDKAGFIKRQLVETRQITKHVAQILDSRMNTKYDENDKLIREVKVITLKSKLVSDFRKDFQFYKVREINNYHHAHDAYLNAVVGTALIKKYPKLESEFVYGDYKVYDVRKMIAKSEQEIGKATAKYFFYSNIMNFFKTEITLANGEIRKRPLIETNGETGEIVWDKGRDFATVRKVLSMPQVNIVKKTEVQTGGFSKESILPKRNSDKLIARKKDWDPKKYGGFDSPTVAYSVLVVAKVEKGKSKKLKSVKELLGITIMERSSFEKNPIDFLEAKGYKEVKKDLIIKLPKYSLFELENGRKRMLASAGELQKGNELALPSKYVNFLYLASHYEKLKGSPEDNEQKQLFVEQHKHYLDEIIEQISEFSKRVILADANLDKVLSAYNKHRDKPIREQAENIIHLFTLTNLGAPAAFKYFDTTIDRKRYTSTKEVLDATLIHQSITGLYETRIDLSQLGGDGGGGSGGGGSSGGTAPLEEEYRLFLEAPIQNVTLLEQWKREIPKVWAEINPPGLASTQAPIHVQLLSTALPVRVRQYPITLEAKRSLRETIRKFRAAGILRPVHSPWNTPLLPVRKSGTSEYRMVQDLREVNKRVETIHPTVPNPYTLLSLLPPDRIWYSVLDLKDAFFCIPLAPESQLIFAFEWADAEEGESGQLTWTRLPQGFKNSPTLFNEALNRDLQGFRLDHPSVSLLQYVDDLLIAADTQAACLSATRDLLMTLAELGYRVSGKKAQLCQEEVTYLGFKIHKGSRSLSNSRTQAILQIPVPKTKRQVREFLGKIGYCRLFIPGFAELAQPLYAATRPGNDPLVWGEKEEEAFQSLKLALTQPPALALPSLDKPFQLFVEETSGAAKGVLTQALGPWKRPVAYLSKRLDPVAAGWPRCLRAIAAAALLTREASKLTFGQDIEITSSHNLESLLRSPPDKWLTNARITQYQVLLLDPPRVRFKQTAALNPATLLPETDDTLPIHHCLDTLDSLTSTRPDLTDQPLAQAEATLFTDGSSYIRDGKRYAGAAVVTLDSVIWAEPLPIGTSAQKAELIALTKALEWSKDKSVNIYTDSRYAFATLHVHGMIYRERGWLTAGGKAIKNAPEILALLTAVWLPKRVAVMHCKGHQKDDAPTSTGNRRADEVAREVAIRPLSTQATISAGKRTADGSEFEKRTADGSEFESPKKKAKVE

SEQ ID NO: 6799 - protein, 2100 aa, synthetic construct
MPAAKRVKLDGGDKKYSIGLDIGTNSVGWAVITDEYKVPSKKFKVLGNTDRHSIKKNLIGALLFDSGETAEATRLKRTARRRYTRRKNRICYLQEIFSNEMAKVDDSFFHRLEESFLVEEDKKHERHPIFGNIVDEVAYHEKYPTIYHLRKKLVDSTDKADLRLIYLALAHMIKFRGHFLIEGDLNPDNSDVDKLFIQLVQTYNQLFEENPINASGVDAKAILSARLSKSRRLENLIAQLPGEKKNGLFGNLIALSLGLTPNFKSNFDLAEDAKLQLSKDTYDDDLDNLLAQIGDQYADLFLAAKNLSDAILLSDILRVNTEITKAPLSASMIKRYDEHHQDLTLLKALVRQQLPEKYKEIFFDQSKNGYAGYIDGGASQEEFYKFIKPILEKMDGTEELLVKLNREDLLRKQRTFDNGSIPHQIHLGELHAILRRQEDFYPFLKDNREKIEKILTFRIPYYVGPLARGNSRFAWMTRKSEETITPWNFEEVVDKGASAQSFIERMTNFDKNLPNEKVLPKHSLLYEYFTVYNELTKVKYVTEGMRKPAFLSGEQKKAIVDLLFKTNRKVTVKQLKEDYFKKIECFDSVEISGVEDRFNASLGTYHDLLKIIKDKDFLDNEENEDILEDIVLTLTLFEDREMIEERLKTYAHLFDDKVMKQLKRRRYTGWGRLSRKLINGIRDKQSGKTILDFLKSDGFANRNFMQLIHDDSLTFKEDIQKAQVSGQGDSLHEHIANLAGSPAIKKGILQTVKVVDELVKVMGRHKPENIVIEMARENQTTQKGQKNSRERMKRIEEGIKELGSQILKEHPVENTQLQNEKLYLYYLQNGRDMYVDQELDINRLSDYDVDHIVPQSFLKDDSIDNKVLTRSDKARGKSDNVPSEEVVKKMKNYWRQLLNAKLITQRKFDNLTKAERGGLSELDKAGFIKRQLVETRQITKHVAQILDSRMNTKYDENDKLIREVKVITLKSKLVSDFRKDFQFYKVREINNYHHAHDAYLNAVVGTALIKKYPKLESEFVYGDYKVYDVRKMIAKSEQEIGKATAKYFFYSNIMNFFKTEITLANGEIRKRPLIETNGETGEIVWDKGRDFATVRKVLSMPQVNIVKKTEVQTGGFSKESILPKRNSDKLIARKKDWDPKKYGGFDSPTVAYSVLVVAKVEKGKSKKLKSVKELLGITIMERSSFEKNPIDFLEAKGYKEVKKDLIIKLPKYSLFELENGRKRMLASAGELQKGNELALPSKYVNFLYLASHYEKLKGSPEDNEQKQLFVEQHKHYLDEIIEQISEFSKRVILADANLDKVLSAYNKHRDKPIREQAENIIHLFTLTNLGAPAAFKYFDTTIDRKRYTSTKEVLDATLIHQSITGLYETRIDLSQLGGDGGGGSGGGGSSGGTVSLQDEHRLFDIPVTTSLPDVWLQDFPQAWAETGGLGRAKCQAPIIIDLKPTAVPVSIKQYPMSLEAHMGIRQHIIKFLELGVLRPCRSPWNTPLLPVKKPGTQDYRPVQDLREINKRTVDIHPTVPNPYNLLSTLKPDYSWYTVLDLKDAFFCLPLAPQSQELFAFEWKDPERGISGQLTWTRLPQGFKNSPTLFDEALHRDLTDFRTQHPEVTLLQYVDDLLLAAPTKKACTQGTRHLLQELGEKGYRASAKKAQICQTKVTYLGYILSEGKRWLTPGRIETVARIPPPRNPREVREFLGTAGFCRLWIPGFAELAAPLYALTKESTPFTWQTEHQLAFEALKKALLSAPALGLPDTSKPFTLFLDERQGIAKGVLTQKLGPWKRPVAYLSKKLDPVAAGWPPCLRIMAATAMLVKDSAKLTLGQPLTVITPHTLEAIVRQPPDRWITNARLTHYQALLLDTDRVQFGPPVTLNPATLLPVPENQPSPHDCRQVLAETHGTREDLKDQELPDADHTWYTDGSSYLDSGTRRAGAAVVDGHNTIWAQSLPPGTSAQKAELIALTKALELSKGKKANIYTDSRYAFATAHTHGSIYERRGLLTSEGKEIKNKAEIIALLKALFLPQEVAIIHCPGHQKGQDPVAVGNRQADRVARQAAMAEVLTLATEPDNTSHITAGKRTADGSEFEKRTADGSEFESPKKKAKVE

SEQ ID NO: 6800 - protein, 1999 aa, synthetic construct
MPAAKRVKLDGGDKKYSIGLDIGTNSVGWAVITDEYKVPSKKFKVLGNTDRHSIKKNLIGALLFDSGETAEATRLKRTARRRYTRRKNRICYLQEIFSNEMAKVDDSFFHRLEESFLVEEDKKHERHPIFGNIVDEVAYHEKYPTIYHLRKKLVDSTDKADLRLIYLALAHMIKFRGHFLIEGDLNPDNSDVDKLFIQLVQTYNQLFEENPINASGVDAKAILSARLSKSRRLENLIAQLPGEKKNGLFGNLIALSLGLTPNFKSNFDLAEDAKLQLSKDTYDDDLDNLLAQIGDQYADLFLAAKNLSDAILLSDILRVNTEITKAPLSASMIKRYDEHHQDLTLLKALVRQQLPEKYKEIFFDQSKNGYAGYIDGGASQEEFYKFIKPILEKMDGTEELLVKLNREDLLRKQRTFDNGSIPHQIHLGELHAILRRQEDFYPFLKDNREKIEKILTFRIPYYVGPLARGNSRFAWMTRKSEETITPWNFEEVVDKGASAQSFIERMTNFDKNLPNEKVLPKHSLLYEYFTVYNELTKVKYVTEGMRKPAFLSGEQKKAIVDLLFKTNRKVTVKQLKEDYFKKIECFDSVEISGVEDRFNASLGTYHDLLKIIKDKDFLDNEENEDILEDIVLTLTLFEDREMIEERLKTYAHLFDDKVMKQLKRRRYTGWGRLSRKLINGIRDKQSGKTILDFLKSDGFANRNFMQLIHDDSLTFKEDIQKAQVSGQGDSLHEHIANLAGSPAIKKGILQTVKVVDELVKVMGRHKPENIVIEMARENQTTQKGQKNSRERMKRIEEGIKELGSQILKEHPVENTQLQNEKLYLYYLQNGRDMYVDQELDINRLSDYDVDHIVPQSFLKDDSIDNKVLTRSDKARGKSDNVPSEEVVKKMKNYWRQLLNAKLITQRKFDNLTKAERGGLSELDKAGFIKRQLVETRQITKHVAQILDSRMNTKYDENDKLIREVKVITLKSKLVSDFRKDFQFYKVREINNYHHAHDAYLNAVVGTALIKKYPKLESEFVYGDYKVYDVRKMIAKSEQEIGKATAKYFFYSNIMNFFKTEITLANGEIRKRPLIETNGETGEIVWDKGRDFATVRKVLSMPQVNIVKKTEVQTGGFSKESILPKRNSDKLIARKKDWDPKKYGGFDSPTVAYSVLVVAKVEKGKSKKLKSVKELLGITIMERSSFEKNPIDFLEAKGYKEVKKDLIIKLPKYSLFELENGRKRMLASAGELQKGNELALPSKYVNFLYLASHYEKLKGSPEDNEQKQLFVEQHKHYLDEIIEQISEFSKRVILADANLDKVLSAYNKHRDKPIREQAENIIHLFTLTNLGAPAAFKYFDTTIDRKRYTSTKEVLDATLIHQSITGLYETRIDLSQLGGDGGGGSGGGGSSGGGVLDTPPSHIGLEHLPPPPEVPQFPLNLERLQALQDLVHRSLEAGYISPWDGPGNNPVFPVRKPNGAWRFVHDLRATNALTKPIPALSPGPPDLTAPPTHPPHIICLDLKDAFFQIPVEDRFRFYLSFTLPSPGGLQPHRRFAWRVLPQGFINSPALFQRALQEPLRQVSAAFSQSLLVSYMDDILYASPTEEQRSQCYQALAARLRDLGFQVASEKTSQTPSPVPFLGQMVHEQIVTYQSLPTLQISSPISLHQLQAVLGDLQWVSRGTPTTRRPLQLLYSSLKRHHDPRAIIQLSPEQLQGIAELRQALSHNARSRYNEQEPLLAYVHLTRAGSTLVLFQKGAQFPLAYFQTPLTDNQASPWGLLLLLGCQYLQTQALSSYAKPILKYYHNLPKTSLDNWIQSSEDPRVQELLQLWPQISSQGIQPPGPWKTLITRAEVFLTPQFSPDPIPAALCLFSDGATGRGAYCLWKDHLLDFQAVPAPESAQKGELAGLLAGLAAAPPEPVNIWVDSKYLYSLLRTWVLGAWLQPDPVPSYALLYKSLLRHPAIVVGHVRSHSSASHPIASLNNYVDQLAGKRTADGSEFEKRTADGSEFESPKKKAKVE

SEQ ID NO: 6801 - protein, 2085 aa, synthetic construct
MPAAKRVKLDGGDKKYSIGLDIGTNSVGWAVITDEYKVPSKKFKVLGNTDRHSIKKNLIGALLFDSGETAEATRLKRTARRRYTRRKNRICYLQEIFSNEMAKVDDSFFHRLEESFLVEEDKKHERHPIFGNIVDEVAYHEKYPTIYHLRKKLVDSTDKADLRLIYLALAHMIKFRGHFLIEGDLNPDNSDVDKLFIQLVQTYNQLFEENPINASGVDAKAILSARLSKSRRLENLIAQLPGEKKNGLFGNLIALSLGLTPNFKSNFDLAEDAKLQLSKDTYDDDLDNLLAQIGDQYADLFLAAKNLSDAILLSDILRVNTEITKAPLSASMIKRYDEHHQDLTLLKALVRQQLPEKYKEIFFDQSKNGYAGYIDGGASQEEFYKFIKPILEKMDGTEELLVKLNREDLLRKQRTFDNGSIPHQIHLGELHAILRRQEDFYPFLKDNREKIEKILTFRIPYYVGPLARGNSRFAWMTRKSEETITPWNFEEVVDKGASAQSFIERMTNFDKNLPNEKVLPKHSLLYEYFTVYNELTKVKYVTEGMRKPAFLSGEQKKAIVDLLFKTNRKVTVKQLKEDYFKKIECFDSVEISGVEDRFNASLGTYHDLLKIIKDKDFLDNEENEDILEDIVLTLTLFEDREMIEERLKTYAHLFDDKVMKQLKRRRYTGWGRLSRKLINGIRDKQSGKTILDFLKSDGFANRNFMQLIHDDSLTFKEDIQKAQVSGQGDSLHEHIANLAGSPAIKKGILQTVKVVDELVKVMGRHKPENIVIEMARENQTTQKGQKNSRERMKRIEEGIKELGSQILKEHPVENTQLQNEKLYLYYLQNGRDMYVDQELDINRLSDYDVDHIVPQSFLKDDSIDNKVLTRSDKARGKSDNVPSEEVVKKMKNYWRQLLNAKLITQRKFDNLTKAERGGLSELDKAGFIKRQLVETRQITKHVAQILDSRMNTKYDENDKLIREVKVITLKSKLVSDFRKDFQFYKVREINNYHHAHDAYLNAVVGTALIKKYPKLESEFVYGDYKVYDVRKMIAKSEQEIGKATAKYFFYSNIMNFFKTEITLANGEIRKRPLIETNGETGEIVWDKGRDFATVRKVLSMPQVNIVKKTEVQTGGFSKESILPKRNSDKLIARKKDWDPKKYGGFDSPTVAYSVLVVAKVEKGKSKKLKSVKELLGITIMERSSFEKNPIDFLEAKGYKEVKKDLIIKLPKYSLFELENGRKRMLASAGELQKGNELALPSKYVNFLYLASHYEKLKGSPEDNEQKQLFVEQHKHYLDEIIEQISEFSKRVILADANLDKVLSAYNKHRDKPIREQAENIIHLFTLTNLGAPAAFKYFDTTIDRKRYTSTKEVLDATLIHQSITGLYETRIDLSQLGGDGGGGSGGGGSSGGVPWILKKPLELTIKLDLEEQQGTLLNNSILSKKGKEELKQLFEKYSALWQSWENQVGHRRIRPHKIATGTVKPTPQKQYHINPKAKPDIQIVINDLLKQGVLIQKESTMNTPVYPVPKPNGRWRMVLDYRAVNKVTPLIAVQNQHSYGILGSLFKGRYKTTIDLSNGFWAHPIVPEDYWITAFTWQGKQYCWTVLPQGFLNSPGLFTGDVVDLLQGIPNVEVYVDDVYISHDSEKEHLEYLDILFNRLKEAGYIISLKKSNIANSIVDFLGFQITNEGRGLTDTFKEKLENITAPTTLKQLQSILGLLNFARNFIPDFTELIAPLYALIPKSTKNYVPWQIEHSTTLETLITKLNGAEYLQGRKGDKTLIMKVNASYTTGYIRYYNEGEKKPISYVSIVFSKTELKFTELEKLLTTVHKGLLKALDLSMGQNIHVYSPIVSMQNIQKTPQTAKKALASRWLSWLSYLEDPRIRFFYDPQMPALKDLPAVDTGKDNKKHPSNFQHIFYTDGSAITSPTKEGHLNAGMGIVYFINKDGNLQKQQEWSISLGNHTAQFAEIAAFEFALKKCLPLGGNILVVTDSNYVAKAYNEELDVWASNGFVNNRKKPLKHISKWKSVADLKRLRPDVVVTHEPGHQKLDSSPHAYGNNLADQLATQASFKVHAGKRTADGSEFEKRTADGSEFESPKKKAKVE

SEQ ID NO: 6802 - protein, 2093 aa, synthetic construct
MPAAKRVKLDGGDKKYSIGLDIGTNSVGWAVITDEYKVPSKKFKVLGNTDRHSIKKNLIGALLFDSGETAEATRLKRTARRRYTRRKNRICYLQEIFSNEMAKVDDSFFHRLEESFLVEEDKKHERHPIFGNIVDEVAYHEKYPTIYHLRKKLVDSTDKADLRLIYLALAHMIKFRGHFLIEGDLNPDNSDVDKLFIQLVQTYNQLFEENPINASGVDAKAILSARLSKSRRLENLIAQLPGEKKNGLFGNLIALSLGLTPNFKSNFDLAEDAKLQLSKDTYDDDLDNLLAQIGDQYADLFLAAKNLSDAILLSDILRVNTEITKAPLSASMIKRYDEHHQDLTLLKALVRQQLPEKYKEIFFDQSKNGYAGYIDGGASQEEFYKFIKPILEKMDGTEELLVKLNREDLLRKQRTFDNGSIPHQIHLGELHAILRRQEDFYPFLKDNREKIEKILTFRIPYYVGPLARGNSRFAWMTRKSEETITPWNFEEVVDKGASAQSFIERMTNFDKNLPNEKVLPKHSLLYEYFTVYNELTKVKYVTEGMRKPAFLSGEQKKAIVDLLFKTNRKVTVKQLKEDYFKKIECFDSVEISGVEDRFNASLGTYHDLLKIIKDKDFLDNEENEDILEDIVLTLTLFEDREMIEERLKTYAHLFDDKVMKQLKRRRYTGWGRLSRKLINGIRDKQSGKTILDFLKSDGFANRNFMQLIHDDSLTFKEDIQKAQVSGQGDSLHEHIANLAGSPAIKKGILQTVKVVDELVKVMGRHKPENIVIEMARENQTTQKGQKNSRERMKRIEEGIKELGSQILKEHPVENTQLQNEKLYLYYLQNGRDMYVDQELDINRLSDYDVDHIVPQSFLKDDSIDNKVLTRSDKARGKSDNVPSEEVVKKMKNYWRQLLNAKLITQRKFDNLTKAERGGLSELDKAGFIKRQLVETRQITKHVAQILDSRMNTKYDENDKLIREVKVITLKSKLVSDFRKDFQFYKVREINNYHHAHDAYLNAVVGTALIKKYPKLESEFVYGDYKVYDVRKMIAKSEQEIGKATAKYFFYSNIMNFFKTEITLANGEIRKRPLIETNGETGEIVWDKGRDFATVRKVLSMPQVNIVKKTEVQTGGFSKESILPKRNSDKLIARKKDWDPKKYGGFDSPTVAYSVLVVAKVEKGKSKKLKSVKELLGITIMERSSFEKNPIDFLEAKGYKEVKKDLIIKLPKYSLFELENGRKRMLASAGELQKGNELALPSKYVNFLYLASHYEKLKGSPEDNEQKQLFVEQHKHYLDEIIEQISEFSKRVILADANLDKVLSAYNKHRDKPIREQAENIIHLFTLTNLGAPAAFKYFDTTIDRKRYTSTKEVLDATLIHQSITGLYETRIDLSQLGGDGGGGSGGGGSSGGTLQLEEEYRLFEPESTQKQEMDIWLKNFPQAWAETGGMGTAHCQAPVLIQLKATATPISIRQYPMPHEAYQGIKPHIRRMLDQGILKPCQSPWNTPLLPVKKPGTEDYRPVQDLREVNKRVEDIHPTVPNPYNLLSTLPPSHPWYTVLDLKDAFFCLRLHSESQLLFAFEWRDPEIGLSGQLTWTRLPQGFKNSPTLFNEALHSDLADFRVRYPALVLLQYVDDLLLAAATRTECLEGTKALLETLGNKGYRASAKKAQICLQEVTYLGYSLKDGQRWLTKARKEAILSIPVPKNSRQVREFLGTAGYCRLWIPGFAELAAPLYPLTRPGTLFQWGTEQQLAFEDIKKALLSSPALGLPDITKPFELFIDENSGFAKGVLVQKLGPWKRPVAYLSKKLDTVASGWPPCLRMVAAIAILVKDAGKLTLGQPLTILTSHPVEALVRQPPNKWLSNARMTHYQAMLLDAERVHFGPTVSLNPATLLPLPSGGNHHDCLQILAETHGTRPDLTDQPLPDADLTWYTDGSSFIRNGEREAGAAVTTESEVIWAAPLPPGTSAQRAELIALTQALKMAEGKKLTVYTDSRYAFATTHVHGEIYRRRGWLTSEGKEIKNKNEILALLEALFLPKRLSIIHCPGHQKGDSPQAKGNRLADDTAKKAATETHSSLTVLPAGKRTADGSEFEKRTADGSEFESPKKKAKVE

SEQ ID NO: 6803 - protein, 2125 aa, synthetic construct
MPAAKRVKLDGGDKKYSIGLDIGTNSVGWAVITDEYKVPSKKFKVLGNTDRHSIKKNLIGALLFDSGETAEATRLKRTARRRYTRRKNRICYLQEIFSNEMAKVDDSFFHRLEESFLVEEDKKHERHPIFGNIVDEVAYHEKYPTIYHLRKKLVDSTDKADLRLIYLALAHMIKFRGHFLIEGDLNPDNSDVDKLFIQLVQTYNQLFEENPINASGVDAKAILSARLSKSRRLENLIAQLPGEKKNGLFGNLIALSLGLTPNFKSNFDLAEDAKLQLSKDTYDDDLDNLLAQIGDQYADLFLAAKNLSDAILLSDILRVNTEITKAPLSASMIKRYDEHHQDLTLLKALVRQQLPEKYKEIFFDQSKNGYAGYIDGGASQEEFYKFIKPILEKMDGTEELLVKLNREDLLRKQRTFDNGSIPHQIHLGELHAILRRQEDFYPFLKDNREKIEKILTFRIPYYVGPLARGNSRFAWMTRKSEETITPWNFEEVVDKGASAQSFIERMTNFDKNLPNEKVLPKHSLLYEYFTVYNELTKVKYVTEGMRKPAFLSGEQKKAIVDLLFKTNRKVTVKQLKEDYFKKIECFDSVEISGVEDRFNASLGTYHDLLKIIKDKDFLDNEENEDILEDIVLTLTLFEDREMIEERLKTYAHLFDDKVMKQLKRRRYTGWGRLSRKLINGIRDKQSGKTILDFLKSDGFANRNFMQLIHDDSLTFKEDIQKAQVSGQGDSLHEHIANLAGSPAIKKGILQTVKVVDELVKVMGRHKPENIVIEMARENQTTQKGQKNSRERMKRIEEGIKELGSQILKEHPVENTQLQNEKLYLYYLQNGRDMYVDQELDINRLSDYDVDHIVPQSFLKDDSIDNKVLTRSDKARGKSDNVPSEEVVKKMKNYWRQLLNAKLITQRKFDNLTKAERGGLSELDKAGFIKRQLVETRQITKHVAQILDSRMNTKYDENDKLIREVKVITLKSKLVSDFRKDFQFYKVREINNYHHAHDAYLNAVVGTALIKKYPKLESEFVYGDYKVYDVRKMIAKSEQEIGKATAKYFFYSNIMNFFKTEITLANGEIRKRPLIETNGETGEIVWDKGRDFATVRKVLSMPQVNIVKKTEVQTGGFSKESILPKRNSDKLIARKKDWDPKKYGGFDSPTVAYSVLVVAKVEKGKSKKLKSVKELLGITIMERSSFEKNPIDFLEAKGYKEVKKDLIIKLPKYSLFELENGRKRMLASAGELQKGNELALPSKYVNFLYLASHYEKLKGSPEDNEQKQLFVEQHKHYLDEIIEQISEFSKRVILADANLDKVLSAYNKHRDKPIREQAENIIHLFTLTNLGAPAAFKYFDTTIDRKRYTSTKEVLDATLIHQSITGLYETRIDLSQLGGDGGGGSGGGGSSGGLLGRDLLTKLKAQIQFSTEGPQVTWEDRPAMCLVLNLEEEYRLHEKPVPPSIDPSWLQLFPMVWAEKAGMGLANQVPPVVVELKSDASPVAVRQYPMSKEAREGIRPHIQRFLDLGILVPCQSPWNTPLLPVKKPGTNDYRPVQDLREVNKRVQDIHPTVPNPYNLLSSLPPSHTWYSVLDLKDAFFCLKLHPNSQPLFAFEWRDPEKGNTGQLTWTRLPQGFKNSPTLFNEALHRDLASFRALNPQVVMLQYVDDLLVAAPTYRDCKEGTRRLLQELSKLGYRVSAKKAQLCREEVTYLGYLLKGGKRWLTPARKATVMKIPTPTTPRQVREFLGTAGFCRLWIPGFASLAAPLYPLTRPKVPFTWTEAHQEAFGRIKEALLSAPALALPDLTKPFALYVDEKEGVARGVLTQTLGPWRRPVAYLSKKLDPVASGWPTCLKAIAAVALLLKDADKLTLGQNVLVIAPHNLESIVRQPPDRWMTNARMTHYQSLLLNERVSFAPPAILNPATLLPVESDDTPIHICSEILAEETGTRPDLRDQPLPGVPAWYTDGSSFIMDGRRQAGAAIVDNKRTVWASNLPEGTSAQKAELIALTQALRLAEGKSINIYTDSRYAFATAHVHGAIYKQRGWLTSAGKDIKNKEEILALLEAIHLPKRVAIIHCPGHQRGTDPVATGNRKADEAAKQAAQSTRILTETTKNAGKRTADGSEFEKRTADGSEFESPKKKAKVE

SEQ ID NO: 6804 - protein, 2125 aa, synthetic construct
MPAAKRVKLDGGDKKYSIGLDIGTNSVGWAVITDEYKVPSKKFKVLGNTDRHSIKKNLIGALLFDSGETAEATRLKRTARRRYTRRKNRICYLQEIFSNEMAKVDDSFFHRLEESFLVEEDKKHERHPIFGNIVDEVAYHEKYPTIYHLRKKLVDSTDKADLRLIYLALAHMIKFRGHFLIEGDLNPDNSDVDKLFIQLVQTYNQLFEENPINASGVDAKAILSARLSKSRRLENLIAQLPGEKKNGLFGNLIALSLGLTPNFKSNFDLAEDAKLQLSKDTYDDDLDNLLAQIGDQYADLFLAAKNLSDAILLSDILRVNTEITKAPLSASMIKRYDEHHQDLTLLKALVRQQLPEKYKEIFFDQSKNGYAGYIDGGASQEEFYKFIKPILEKMDGTEELLVKLNREDLLRKQRTFDNGSIPHQIHLGELHAILRRQEDFYPFLKDNREKIEKILTFRIPYYVGPLARGNSRFAWMTRKSEETITPWNFEEVVDKGASAQSFIERMTNFDKNLPNEKVLPKHSLLYEYFTVYNELTKVKYVTEGMRKPAFLSGEQKKAIVDLLFKTNRKVTVKQLKEDYFKKIECFDSVEISGVEDRFNASLGTYHDLLKIIKDKDFLDNEENEDILEDIVLTLTLFEDREMIEERLKTYAHLFDDKVMKQLKRRRYTGWGRLSRKLINGIRDKQSGKTILDFLKSDGFANRNFMQLIHDDSLTFKEDIQKAQVSGQGDSLHEHIANLAGSPAIKKGILQTVKVVDELVKVMGRHKPENIVIEMARENQTTQKGQKNSRERMKRIEEGIKELGSQILKEHPVENTQLQNEKLYLYYLQNGRDMYVDQELDINRLSDYDVDHIVPQSFLKDDSIDNKVLTRSDKARGKSDNVPSEEVVKKMKNYWRQLLNAKLITQRKFDNLTKAERGGLSELDKAGFIKRQLVETRQITKHVAQILDSRMNTKYDENDKLIREVKVITLKSKLVSDFRKDFQFYKVREINNYHHAHDAYLNAVVGTALIKKYPKLESEFVYGDYKVYDVRKMIAKSEQEIGKATAKYFFYSNIMNFFKTEITLANGEIRKRPLIETNGETGEIVWDKGRDFATVRKVLSMPQVNIVKKTEVQTGGFSKESILPKRNSDKLIARKKDWDPKKYGGFDSPTVAYSVLVVAKVEKGKSKKLKSVKELLGITIMERSSFEKNPIDFLEAKGYKEVKKDLIIKLPKYSLFELENGRKRMLASAGELQKGNELALPSKYVNFLYLASHYEKLKGSPEDNEQKQLFVEQHKHYLDEIIEQISEFSKRVILADANLDKVLSAYNKHRDKPIREQAENIIHLFTLTNLGAPAAFKYFDTTIDRKRYTSTKEVLDATLIHQSITGLYETRIDLSQLGGDGGGGSGGGGSSGGLLGRDLLTKLKAQIQFSTEGPQVTWEDRPAMCLVLNLEEEYRLHEKPVPPSIDPSWLQLFPMVWAEKAGMGLANQVPPVVVELKSDASPVAVRQYPMSKEAREGIRPHIQRFLDLGILVPCQSPWNTPLLPVKKPGTNDYRPVQDLREVNKRVQDIHPTVPNPYNLLSSLPPSHTWYSVLDLKDAFFCLKLHPNSQPLFAFEWRDPEKGNTGQLTWTRLPQGFKNSPTLFNEALHRDLASFRALNPQVVMLQYVDDLLVAAPTYRDCKEGTRRLLQELSKLGYRVSAKKAQLCREEVTYLGYLLKGGKRWLTPARKATVMKIPTPTTPRQVREFLGKAGFCRLFIPGFASLAAPLYPLTRPKVPFTWTEAHQEAFGRIKEALLSAPALALPDLTKPFALYVDEKEGVARGVLTQTLGPWRRPVAYLSKKLDPVASGWPTCLKAIAAVALLLKDADKLTLGQNVLVIAPHNLESIVRQPPDRWMTNARMTHYQSLLLNERVSFAPPAILNPATLLPVESDDTPIHICSEILAEETGTRPDLRDQPLPGVPAWYTDGSSFIMDGRRQAGAAIVDNKRTVWASNLPEGTSAQKAELIALTQALRLAEGKSINIYTDSRYAFATAHVHGAIYKQRGWLTSAGKDIKNKEEILALLEAIHLPKRVAIIHCPGHQRGTDPVATGNRKADEAAKQAAQSTRILTETTKNAGKRTADGSEFEKRTADGSEFESPKKKAKVE

SEQ ID NO: 6805 - protein, 2094 aa, synthetic construct
MPAAKRVKLDGGDKKYSIGLDIGTNSVGWAVITDEYKVPSKKFKVLGNTDRHSIKKNLIGALLFDSGETAEATRLKRTARRRYTRRKNRICYLQEIFSNEMAKVDDSFFHRLEESFLVEEDKKHERHPIFGNIVDEVAYHEKYPTIYHLRKKLVDSTDKADLRLIYLALAHMIKFRGHFLIEGDLNPDNSDVDKLFIQLVQTYNQLFEENPINASGVDAKAILSARLSKSRRLENLIAQLPGEKKNGLFGNLIALSLGLTPNFKSNFDLAEDAKLQLSKDTYDDDLDNLLAQIGDQYADLFLAAKNLSDAILLSDILRVNTEITKAPLSASMIKRYDEHHQDLTLLKALVRQQLPEKYKEIFFDQSKNGYAGYIDGGASQEEFYKFIKPILEKMDGTEELLVKLNREDLLRKQRTFDNGSIPHQIHLGELHAILRRQEDFYPFLKDNREKIEKILTFRIPYYVGPLARGNSRFAWMTRKSEETITPWNFEEVVDKGASAQSFIERMTNFDKNLPNEKVLPKHSLLYEYFTVYNELTKVKYVTEGMRKPAFLSGEQKKAIVDLLFKTNRKVTVKQLKEDYFKKIECFDSVEISGVEDRFNASLGTYHDLLKIIKDKDFLDNEENEDILEDIVLTLTLFEDREMIEERLKTYAHLFDDKVMKQLKRRRYTGWGRLSRKLINGIRDKQSGKTILDFLKSDGFANRNFMQLIHDDSLTFKEDIQKAQVSGQGDSLHEHIANLAGSPAIKKGILQTVKVVDELVKVMGRHKPENIVIEMARENQTTQKGQKNSRERMKRIEEGIKELGSQILKEHPVENTQLQNEKLYLYYLQNGRDMYVDQELDINRLSDYDVDHIVPQSFLKDDSIDNKVLTRSDKARGKSDNVPSEEVVKKMKNYWRQLLNAKLITQRKFDNLTKAERGGLSELDKAGFIKRQLVETRQITKHVAQILDSRMNTKYDENDKLIREVKVITLKSKLVSDFRKDFQFYKVREINNYHHAHDAYLNAVVGTALIKKYPKLESEFVYGDYKVYDVRKMIAKSEQEIGKATAKYFFYSNIMNFFKTEITLANGEIRKRPLIETNGETGEIVWDKGRDFATVRKVLSMPQVNIVKKTEVQTGGFSKESILPKRNSDKLIARKKDWDPKKYGGFDSPTVAYSVLVVAKVEKGKSKKLKSVKELLGITIMERSSFEKNPIDFLEAKGYKEVKKDLIIKLPKYSLFELENGRKRMLASAGELQKGNELALPSKYVNFLYLASHYEKLKGSPEDNEQKQLFVEQHKHYLDEIIEQISEFSKRVILADANLDKVLSAYNKHRDKPIREQAENIIHLFTLTNLGAPAAFKYFDTTIDRKRYTSTKEVLDATLIHQSITGLYETRIDLSQLGGDGGGGSGGGGSSGGTLNLEDEYRLYETSAEPEVSPGSTWLSDFPQAWAETGGMGLAVRQAPLIIPLKATSTPVSIKQYPMSQEAKLGIKPHIQRLLDQGILVPCQSPWNTPLLPVKKPGTNDYRPVQDLREVNKRVEDIHPTVPNPYNLLSGLPPSHRWYTVLDLKDAFFCLRLHPTSQPLFAFEWRDPGMGISGQLTWTRLPQGFKNSPTLFNEALHRDLADFRIQHPDLILLQYVDDILLAATSELDCQQGTRALLLTLGNLGYRASAKKAQLCQKQVKYLGYLLKEGQRWLTEARKETVMGQPTPKTPRQLREFLGKAGFCRLFIPGFAEMAAPLYPLTKPGTLFNWGPDQQKAYQEIKQALLTAPALGLPDLTKPFELFVDEKQGYAKGVLTQKLGPWRRPVAYLSKKLDPVAAGWPPCLRMVAAIAVLRKDAGKLTMGQPLVILAPHAVEALVKQPPDRWLSNARMTHYQAMLLDTDRVQFGPVVALNPATLLPLPEEGAPHDCLEILAETHGTRPDLTDQPIPDADHTWYTDGSSFLQEGQRKAGAAVTTETEVIWARALPAGTSAQRAELIALTQALKMAEGKRLNVYTDSRYAFATAHIHGEIYRRRGWLTSEGREIKNKSEILALLKALFLPKRLSIIHCLGHQKGDSAEARGNRLADQAAREAAIKTPPDTSTLLAGKRTADGSEFEKRTADGSEFESPKKKAKVE

SEQ ID NO: 6806 - protein, 2094 aa, synthetic construct
MPAAKRVKLDGGDKKYSIGLDIGTNSVGWAVITDEYKVPSKKFKVLGNTDRHSIKKNLIGALLFDSGETAEATRLKRTARRRYTRRKNRICYLQEIFSNEMAKVDDSFFHRLEESFLVEEDKKHERHPIFGNIVDEVAYHEKYPTIYHLRKKLVDSTDKADLRLIYLALAHMIKFRGHFLIEGDLNPDNSDVDKLFIQLVQTYNQLFEENPINASGVDAKAILSARLSKSRRLENLIAQLPGEKKNGLFGNLIALSLGLTPNFKSNFDLAEDAKLQLSKDTYDDDLDNLLAQIGDQYADLFLAAKNLSDAILLSDILRVNTEITKAPLSASMIKRYDEHHQDLTLLKALVRQQLPEKYKEIFFDQSKNGYAGYIDGGASQEEFYKFIKPILEKMDGTEELLVKLNREDLLRKQRTFDNGSIPHQIHLGELHAILRRQEDFYPFLKDNREKIEKILTFRIPYYVGPLARGNSRFAWMTRKSEETITPWNFEEVVDKGASAQSFIERMTNFDKNLPNEKVLPKHSLLYEYFTVYNELTKVKYVTEGMRKPAFLSGEQKKAIVDLLFKTNRKVTVKQLKEDYFKKIECFDSVEISGVEDRFNASLGTYHDLLKIIKDKDFLDNEENEDILEDIVLTLTLFEDREMIEERLKTYAHLFDDKVMKQLKRRRYTGWGRLSRKLINGIRDKQSGKTILDFLKSDGFANRNFMQLIHDDSLTFKEDIQKAQVSGQGDSLHEHIANLAGSPAIKKGILQTVKVVDELVKVMGRHKPENIVIEMARENQTTQKGQKNSRERMKRIEEGIKELGSQILKEHPVENTQLQNEKLYLYYLQNGRDMYVDQELDINRLSDYDVDHIVPQSFLKDDSIDNKVLTRSDKARGKSDNVPSEEVVKKMKNYWRQLLNAKLITQRKFDNLTKAERGGLSELDKAGFIKRQLVETRQITKHVAQILDSRMNTKYDENDKLIREVKVITLKSKLVSDFRKDFQFYKVREINNYHHAHDAYLNAVVGTALIKKYPKLESEFVYGDYKVYDVRKMIAKSEQEIGKATAKYFFYSNIMNFFKTEITLANGEIRKRPLIETNGETGEIVWDKGRDFATVRKVLSMPQVNIVKKTEVQTGGFSKESILPKRNSDKLIARKKDWDPKKYGGFDSPTVAYSVLVVAKVEKGKSKKLKSVKELLGITIMERSSFEKNPIDFLEAKGYKEVKKDLIIKLPKYSLFELENGRKRMLASAGELQKGNELALPSKYVNFLYLASHYEKLKGSPEDNEQKQLFVEQHKHYLDEIIEQISEFSKRVILADANLDKVLSAYNKHRDKPIREQAENIIHLFTLTNLGAPAAFKYFDTTIDRKRYTSTKEVLDATLIHQSITGLYETRIDLSQLGGDGGGGSGGGGSSGGTLGIEDEYRLHETSTEPDVSLGSTWLSDFPQAWAETGGMGLAVRQAPLIIPLKATSTPVSIQQYPMSHEARLGIKPHIQRLLDQGILVPCQSPWNTPLLPVKKPGTNDYRPVQDLREVNKRVEDIHPTVPNPYNLLSGLPPSHQWYTVLDLKDAFFCLRLHPTSQPLFAFEWRDPGMGISGQLTWTRLPQGFKNSPTLFNEALHRDLADFRIQHPDLILLQYVDDILLAATSELDCQQGTRALLQTLGDLGYRASAKKAQICQKQVKYLGYLLREGQRWLTEARKETVMGQPVPKTPRQLREFLGTAGFCRLWIPGFAEMAAPLYPLTKPGTLFSWGPDQQKAYQEIKQALLTAPALGLPDLTKPFELFVDEKQGYAKGVLTQKLGPWRRPVAYLSKKLDPVAAGWPPCLRMVAAIAVLTKDAGKLTMGQPLVILAPHAVEALVKQPPDRWLSNARMTHYQAMLLDTDRVQFGPVVALNPATLLPLPEEGAPHDCLEILAETHGTRPDLTDQPIPDADHTWYTDGSSFLQEGQRKAGAAVTTETEVIWAGALPAGTSAQRAELIALTQALKMAEGKRLNVYTDSRYAFATAHIHGEIYRRRGWLTSEGREIKNKSEILALLKALFLPKRLSIIHCLGHQKGDSAEARGNRLADQAAREAAIKTPPDTSTLLAGKRTADGSEFEKRTADGSEFESPKKKAKVE

SEQ ID NO: 6807 - protein, 2094 aa, synthetic construct; identical to SEQ ID NO: 6806

SEQ ID NO: 6808 - protein, 2094 aa, synthetic construct
MPAAKRVKLDGGDKKYSIGLDIGTNSVGWAVITDEYKVPSKKFKVLGNTDRHSIKKNLIGALLFDSGETAEATRLKRTARRRYTRRKNRICYLQEIFSNEMAKVDDSFFHRLEESFLVEEDKKHERHPIFGNIVDEVAYHEKYPTIYHLRKKLVDSTDKADLRLIYLALAHMIKFRGHFLIEGDLNPDNSDVDKLFIQLVQTYNQLFEENPINASGVDAKAILSARLSKSRRLENLIAQLPGEKKNGLFGNLIALSLGLTPNFKSNFDLAEDAKLQLSKDTYDDDLDNLLAQIGDQYADLFLAAKNLSDAILLSDILRVNTEITKAPLSASMIKRYDEHHQDLTLLKALVRQQLPEKYKEIFFDQSKNGYAGYIDGGASQEEFYKFIKPILEKMDGTEELLVKLNREDLLRKQRTFDNGSIPHQIHLGELHAILRRQEDFYPFLKDNREKIEKILTFRIPYYVGPLARGNSRFAWMTRKSEETITPWNFEEVVDKGASAQSFIERMTNFDKNLPNEKVLPKHSLLYEYFTVYNELTKVKYVTEGMRKPAFLSGEQKKAIVDLLFKTNRKVTVKQLKEDYFKKIECFDSVEISGVEDRFNASLGTYHDLLKIIKDKDFLDNEENEDILEDIVLTLTLFEDREMIEERLKTYAHLFDDKVMKQLKRRRYTGWGRLSRKLINGIRDKQSGKTILDFLKSDGFANRNFMQLIHDDSLTFKEDIQKAQVSGQGDSLHEHIANLAGSPAIKKGILQTVKVVDELVKVMGRHKPENIVIEMARENQTTQKGQKNSRERMKRIEEGIKELGSQILKEHPVENTQLQNEKLYLYYLQNGRDMYVDQELDINRLSDYDVDHIVPQSFLKDDSIDNKVLTRSDKARGKSDNVPSEEVVKKMKNYWRQLLNAKLITQRKFDNLTKAERGGLSELDKAGFIKRQLVETRQITKHVAQILDSRMNTKYDENDKLIREVKVITLKSKLVSDFRKDFQFYKVREINNYHHAHDAYLNAVVGTALIKKYPKLESEFVYGDYKVYDVRKMIAKSEQEIGKATAKYFFYSNIMNFFKTEITLANGEIRKRPLIETNGETGEIVWDKGRDFATVRKVLSMPQVNIVKKTEVQTGGFSKESILPKRNSDKLIARKKDWDPKKYGGFDSPTVAYSVLVVAKVEKGKSKKLKSVKELLGITIMERSSFEKNPIDFLEAKGYKEVKKDLIIKLPKYSLFELENGRKRMLASAGELQKGNELALPSKYVNFLYLASHYEKLKGSPEDNEQKQLFVEQHKHYLDEIIEQISEFSKRVILADANLDKVLSAYNKHRDKPIREQAENIIHLFTLTNLGAPAAFKYFDTTIDRKRYTSTKEVLDATLIHQSITGLYETRIDLSQLGGDGGGGSGGGGSSGGTLNIEDEYRLHETSKEPDVSLGSTWLSDFPQAWAETGGMGLAVRQAPLIIPLKATSTPVSIKQYPMSQEARLGIKPHIQRLLDQGILVPCQSPWNTPLLPVKKPGTNDYRPVQDLREVNKRVEDIHPTVPNPYNLLSGLPPSHQWYTVLDLKDAFFCLRLHPTSQPLFAFEWRDPEMGISGQLTWTRLPQGFKNSPTLFNEALHRDLAGFRIQHPDLILLQYVDDLLLAATSELDCQQGTRALLQTLGDLGYRASAKKAQICQKQVKYLGYLLKEGQRWLTEARKETVMGQPIPKTPRQLREFLGTAGFCRLWIPGFAEMAAPLYPLTKPGTLFNWGPDQQKAFQEIKQALLTAPALGLPDLTKPFELFVDEKQGYAKGVLTQKLGPWRRPVAYLSKKLDPVAAGWPPCLRMVAAIAVLTKDAGKLTMGQPLVILAPHAVEALVKQPPDRWLSNARMTHYQALLLDTDRVQFGPVVALNPATLLPLPEEGLQHDCLDILAEAHGTRSDLMDQPLPDADHTWYTDGSSFLQEGQRKAGAAVTTETEVIWARALPAGTSAQRAELIALTQALKMAEGKKLNVYTDSRYAFATAHIHGEIYRRRGWLTSEGKEIKNKDEILALLKALFLPKRLSIIHCPGHQKGNSAEARGNRMADQAAREVATRETPETSTLLAGKRTADGSEFEKRTADGSEFESPKKKAKVE

SEQ ID NO: 6809 - protein, 2094 aa, synthetic construct
MPAAKRVKLDGGDKKYSIGLDIGTNSVGWAVITDEYKVPSKKFKVLGNTDRHSIKKNLIGALLFDSGETAEATRLKRTARRRYTRRKNRICYLQEIFSNEMAKVDDSFFHRLEESFLVEEDKKHERHPIFGNIVDEVAYHEKYPTIYHLRKKLVDSTDKADLRLIYLALAHMIKFRGHFLIEGDLNPDNSDVDKLFIQLVQTYNQLFEENPINASGVDAKAILSARLSKSRRLENLIAQLPGEKKNGLFGNLIALSLGLTPNFKSNFDLAEDAKLQLSKDTYDDDLDNLLAQIGDQYADLFLAAKNLSDAILLSDILRVNTEITKAPLSASMIKRYDEHHQDLTLLKALVRQQLPEKYKEIFFDQSKNGYAGYIDGGASQEEFYKFIKPILEKMDGTEELLVKLNREDLLRKQRTFDNGSIPHQIHLGELHAILRRQEDFYPFLKDNREKIEKILTFRIPYYVGPLARGNSRFAWMTRKSEETITPWNFEEVVDKGASAQSFIERMTNFDKNLPNEKVLPKHSLLYEYFTVYNELTKVKYVTEGMRKPAFLSGEQKKAIVDLLFKTNRKVTVKQLKEDYFKKIECFDSVEISGVEDRFNASLGTYHDLLKIIKDKDFLDNEENEDILEDIVLTLTLFEDREMIEERLKTYAHLFDDKVMKQLKRRRYTGWGRLSRKLINGIRDKQSGKTILDFLKSDGFANRNFMQLIHDDSLTFKEDIQKAQVSGQGDSLHEHIANLAGSPAIKKGILQTVKVVDELVKVMGRHKPENIVIEMARENQTTQKGQKNSRERMKRIEEGIKELGSQILKEHPVENTQLQNEKLYLYYLQNGRDMYVDQELDINRLSDYDVDHIVPQSFLKDDSIDNKVLTRSDKARGKSDNVPSEEVVKKMKNYWRQLLNAKLITQRKFDNLTKAERGGLSELDKAGFIKRQLVETRQITKHVAQILDSRMNTKYDENDKLIREVKVITLKSKLVSDFRKDFQFYKVREINNYHHAHDAYLNAVVGTALIKKYPKLESEFVYGDYKVYDVRKMIAKSEQEIGKATAKYFFYSNIMNFFKTEITLANGEIRKRPLIETNGETGEIVWDKGRDFATVRKVLSMPQVNIVKKTEVQTGGFSKESILPKRNSDKLIARKKDWDPKKYGGFDSPTVAYSVLVVAKVEKGKSKKLKSVKELLGITIMERSSFEKNPIDFLEAKGYKEVKKDLIIKLPKYSLFELENGRKRMLASAGELQKGNELALPSKYVNFLYLASHYEKLKGSPEDNEQKQLFVEQHKHYLDEIIEQISEFSKRVILADANLDKVLSAYNKHRDKPIREQAENIIHLFTLTNLGAPAAFKYFDTTIDRKRYTSTKEVLDATLIHQSITGLYETRIDLSQLGGDGGGGSGGGGSSGGTLNIEDEHRLHETSKEPDVSLGSTWLSDFPQAWAETGGMGLAVRQAPLIIPLKATSTPVSIKQYPMSQEARLGIKPHIQRLLDQGILVPCQSPWNTPLLPVKKPGTNDYRPVQDLREVNKRVEDIHPTVPNPYNLLSGLPPSHQWYTVLDLKDAFFCLRLHPTSQPLFAFEWRDPEMGISGQLTWTRLPQGFKNSPTLFNEALHRDLADFRIQHPDLILLQYVDDLLLAATSELDCQQGTRALLQTLGNLGYRASAKKAQICQKQVKYLGYLLKEGQRWLTEARKETVMGQPTPKTPRQLREFLGTAGFCRLWIPGFAEMAAPLYPLTKPGTLFNWGPDQQKAYQEIKQALLTAPALGLPDLTKPFELFVDEKQGYAKGVLTQKLGPWRRPVAYLSKKLDPVAAGWPPCLRMVAAIAVLTKDAGKLTMGQPLVILAPHAVEALVKQPPDRWLSNARMTHYQALLLDTDRVQFGPVVALNPATLLPLPEEGLQHNCLDILAEAHGTRPDLTDQPLPDADHTWYTDGSSLLQEGQRKAGAAVTTETEVIWAKALPAGTSAQRAELIALTQALKMAEGKKLNVYTDSRYAFATAHIHGEIYRRRGWLTSEGKEIKNKDEILALLKALFLPKRLSIIHCPGHQKGHSAEARGNRMADQAARKAAITETPDTSTLLAGKRTADGSEFEKRTADGSEFESPKKKAKVE

SEQ ID NO: 6810 - protein, 2088 aa, synthetic construct
MPAAKRVKLDGGDKKYSIGLDIGTNSVGWAVITDEYKVPSKKFKVLGNTDRHSIKKNLIGALLFDSGETAEATRLKRTARRRYTRRKNRICYLQEIFSNEMAKVDDSFFHRLEESFLVEEDKKHERHPIFGNIVDEVAYHEKYPTIYHLRKKLVDSTDKADLRLIYLALAHMIKFRGHFLIEGDLNPDNSDVDKLFIQLVQTYNQLFEENPINASGVDAKAILSARLSKSRRLENLIAQLPGEKKNGLFGNLIALSLGLTPNFKSNFDLAEDAKLQLSKDTYDDDLDNLLAQIGDQYADLFLAAKNLSDAILLSDILRVNTEITKAPLSASMIKRYDEHHQDLTLLKALVRQQLPEKYKEIFFDQSKNGYAGYIDGGASQEEFYKFIKPILEKMDGTEELLVKLNREDLLRKQRTFDNGSIPHQIHLGELHAILRRQEDFYPFLKDNREKIEKILTFRIPYYVGPLARGNSRFAWMTRKSEETITPWNFEEVVDKGASAQSFIERMTNFDKNLPNEKVLPKHSLLYEYFTVYNELTKVKYVTEGMRKPAFLSGEQKKAIVDLLFKTNRKVTVKQLKEDYFKKIECFDSVEISGVEDRFNASLGTYHDLLKIIKDKDFLDNEENEDILEDIVLTLTLFEDREMIEERLKTYAHLFDDKVMKQLKRRRYTGWGRLSRKLINGIRDKQSGKTILDFLKSDGFANRNFMQLIHDDSLTFKEDIQKAQVSGQGDSLHEHIANLAGSPAIKKGILQTVKVVDELVKVMGRHKPENIVIEMARENQTTQKGQKNSRERMKRIEEGIKELGSQILKEHPVENTQLQNEKLYLYYLQNGRDMYVDQELDINRLSDYDVDHIVPQSFLKDDSIDNKVLTRSDKARGKSDNVPSEEVVKKMKNYWRQLLNAKLITQRKFDNLTKAERGGLSELDKAGFIKRQLVETRQITKHVAQILDSRMNTKYDENDKLIREVKVITLKSKLVSDFRKDFQFYKVREINNYHHAHDAYLNAVVGTALIKKYPKLESEFVYGDYKVYDVRKMIAKSEQEIGKATAKYFFYSNIMNFFKTEITLANGEIRKRPLIETNGETGEIVWDKGRDFATVRKVLSMPQVNIVKKTEVQTGGFSKESILPKRNSDKLIARKKDWDPKKYGGFDSPTVAYSVLVVAKVEKGKSKKLKSVKELLGITIMERSSFEKNPIDFLEAKGYKEVKKDLIIKLPKYSLFELENGRKRMLASAGELQKGNELALPSKYVNFLYLASHYEKLKGSPEDNEQKQLFVEQHKHYLDEIIEQISEFSKRVILADANLDKVLSAYNKHRDKPIREQAENIIHLFTLTNLGAPAAFKYFDTTIDRKRYTSTKEVLDATLIHQSITGLYETRIDLSQLGGDGGGGSGGGGSSGGTLQLDDEYRLYSPLVKPDQNIQFWLEQFPQAWAETAGMGLAKQVPPQVIQLKASATPVSVRQYPLSKEAQEGIRPHVQRLIQQGILVPVQSPWNTPLLPVRKPGTNDYRPVQDLREVNKRVQDIHPTVPNPYNLLCALPPQRSWYTVLDLKDAFFCLRLHPTSQPLFAFEWRDPGTGRTGQLTWTRLPQGFKNSPTIFDEALHRDLANFRIQHPQVTLLQYVDDLLLAGATKQDCLEGTKALLLELSDLGYRASAKKAQICRREVTYLGYSLRDGQRWLTEARKKTVVQIPAPTTAKQVREFLGTAGFCRLWIPGFATLAAPLYPLTKEKGEFSWAPEHQKAFDAIKKALLSAPALALPDVTKPFTLYVDERKGVARGVLTQTLGPWRRPVAYLSKKLDPVASGWPVCLKAIAAVAILVKDADKLTLGQNITVIAPHALENIVRQPPDRWMTNARMTHYQSLLLTERVTFAPPAALNPATLLPEETDEPVTHDCHQLLIEETGVRKDLTDIPLTGEVLTWFTDGSSYVVEGKRMAGAAVVDGTRTIWASSLPEGTSAQKAELMALTQALRLAEGKSINIYTDSRYAFATAHVHGAIYKQRGLLTSAGREIKNKEEILSLLEALHLPKRLAIIHCPGHQKAKDPISRGNQMADRVAKQAAQGVNLLAGKRTADGSEFEKRTADGSEFESPKKKAKVE

SEQ ID NO: 6811 - protein, 2088 aa, synthetic construct; identical to SEQ ID NO: 6810

SEQ ID NO: 6812 - protein, 2174 aa, synthetic construct
MPAAKRVKLDGGDKKYSIGLDIGTNSVGWAVITDEYKVPSKKFKVLGNTDRHSIKKNLIGALLFDSGETAEATRLKRTARRRYTRRKNRICYLQEIFSNEMAKVDDSFFHRLEESFLVEEDKKHERHPIFGNIVDEVAYHEKYPTIYHLRKKLVDSTDKADLRLIYLALAHMIKFRGHFLIEGDLNPDNSDVDKLFIQLVQTYNQLFEENPINASGVDAKAILSARLSKSRRLENLIAQLPGEKKNGLFGNLIALSLGLTPNFKSNFDLAEDAKLQLSKDTYDDDLDNLLAQIGDQYADLFLAAKNLSDAILLSDILRVNTEITKAPLSASMIKRYDEHHQDLTLLKALVRQQLPEKYKEIFFDQSKNGYAGYIDGGASQEEFYKFIKPILEKMDGTEELLVKLNREDLLRKQRTFDNGSIPHQIHLGELHAILRRQEDFYPFLKDNREKIEKILTFRIPYYVGPLARGNSRFAWMTRKSEETITPWNFEEVVDKGASAQSFIERMTNFDKNLPNEKVLPKHSLLYEYFTVYNELTKVKYVTEGMRKPAFLSGEQKKAIVDLLFKTNRKVTVKQLKEDYFKKIECFDSVEISGVEDRFNASLGTYHDLLKIIKDKDFLDNEENEDILEDIVLTLTLFEDREMIEERLKTYAHLFDDKVMKQLKRRRYTGWGRLSRKLINGIRDKQSGKTILDFLKSDGFANRNFMQLIHDDSLTFKEDIQKAQVSGQGDSLHEHIANLAGSPAIKKGILQTVKVVDELVKVMGRHKPENIVIEMARENQTTQKGQKNSRERMKRIEEGIKELGSQILKEHPVENTQLQNEKLYLYYLQNGRDMYVDQELDINRLSDYDVDHIVPQSFLKDDSIDNKVLTRSDKARGKSDNVPSEEVVKKMKNYWRQLLNAKLITQRKFDNLTKAERGGLSELDKAGFIKRQLVETRQITKHVAQILDSRMNTKYDENDKLIREVKVITLKSKLVSDFRKDFQFYKVREINNYHHAHDAYLNAVVGTALIKKYPKLESEFVYGDYKVYDVRKMIAKSEQEIGKATAKYFFYSNIMNFFKTEITLANGEIRKRPLIETNGETGEIVWDKGRDFATVRKVLSMPQVNIVKKTEVQTGGFSKESILPKRNSDKLIARKKDWDPKKYGGFDSPTVAYSVLVVAKVEKGKSKKLKSVKELLGITIMERSSFEKNPIDFLEAKGYKEVKKDLIIKLPKYSLFELENGRKRMLASAGELQKGNELALPSKYVNFLYLASHYEKLKGSPEDNEQKQLFVEQHKHYLDEIIEQISEFSKRVILADANLDKVLSAYNKHRDKPIREQAENIIHLFTLTNLGAPAAFKYFDTTIDRKRYTSTKEVLDATLIHQSITGLYETRIDLSQLGGDGGGGSGGGGSSGGMDPLQLLQPLEAEIKGTKLKAHWNSGATITCVPEAFLEDERPIQTMLIKTIHGEKQQDVYYLTFKVQGRKVEAEVLASPYDYILLNPSDVPWLMKKPLQLTVLVPLHEYQERLLQQTALPKEQKELLQKLFLKYDALWQHWENQVGHRRIKPHNIATGTLAPRPQKQYPINPKAKPSIQIVIDDLLKQGVLIQQNSTMNTPVYPVPKPDGKWRMVLDYREVNKTIPLIAAQNQHSAGILSSIYRGKYKTTLDLTNGFWAHPITPESYWLTAFTWQGKQYCWTRLPQGFLNSPALFTADVVDLLKEIPNVQAYVDDIYISHDDPQEHLEQLEKIFSILLNAGYVVSLKKSEIAQREVEFLGFNITKEGRGLTDTFKQKLLNITPPKDLKQLQSILGLLNFARNFIPNYSELVKPLYTIVANANGKFISWTEDNSNQLQHIISVLNQADNLEERNPETRLIIKVNSSPSAGYIRYYNEGSKRPIMYVNYIFSKAEAKFTQTEKLLTTMHKGLIKAMDLAMGQEILVYSPIVSMTKIQRTPLPERKALPVRWITWMTYLEDPRIQFHYDKSLPELQQIPNVTEDVIAKTKHPSEFAMVFYTDGSAIKHPDVNKSHSAGMGIAQVQFIPEYKIVHQWSIPLGDHTAQLAEIAAVEFACKKALKISGPVLIVTDSFYVAESANKELPYWKSNGFLNNKKKPLRHVSKWKSIAECLQLKPDIIIMHEKGHQQPMTTLHTEGNNLADKLATQGSYVVHAGKRTADGSEFEKRTADGSEFESPKKKAKVE

SEQ ID NO: 6813 - protein, 2085 aa, synthetic construct
MPAAKRVKLDGGDKKYSIGLDIGTNSVGWAVITDEYKVPSKKFKVLGNTDRHSIKKNLIGALLFDSGETAEATRLKRTARRRYTRRKNRICYLQEIFSNEMAKVDDSFFHRLEESFLVEEDKKHERHPIFGNIVDEVAYHEKYPTIYHLRKKLVDSTDKADLRLIYLALAHMIKFRGHFLIEGDLNPDNSDVDKLFIQLVQTYNQLFEENPINASGVDAKAILSARLSKSRRLENLIAQLPGEKKNGLFGNLIALSLGLTPNFKSNFDLAEDAKLQLSKDTYDDDLDNLLAQIGDQYADLFLAAKNLSDAILLSDILRVNTEITKAPLSASMIKRYDEHHQDLTLLKALVRQQLPEKYKEIFFDQSKNGYAGYIDGGASQEEFYKFIKPILEKMDGTEELLVKLNREDLLRKQRTFDNGSIPHQIHLGELHAILRRQEDFYPFLKDNREKIEKILTFRIPYYVGPLARGNSRFAWMTRKSEETITPWNFEEVVDKGASAQSFIERMTNFDKNLPNEKVLPKHSLLYEYFTVYNELTKVKYVTEGMRKPAFLSGEQKKAIVDLLFKTNRKVTVKQLKEDYFKKIECFDSVEISGVEDRFNASLGTYHDLLKIIKDKDFLDNEENEDILEDIVLTLTLFEDREMIEERLKTYAHLFDDKVMKQLKRRRYTGWGRLSRKLINGIRDKQSGKTILDFLKSDGFANRNFMQLIHDDSLTFKEDIQKAQVSGQGDSLHEHIANLAGSPAIKKGILQTVKVVDELVKVMGRHKPENIVIEMARENQTTQKGQKNSRERMKRIEEGIKELGSQILKEHPVENTQLQNEKLYLYYLQNGRDMYVDQELDINRLSDYDVDHIVPQSFLKDDSIDNKVLTRSDKARGKSDNVPSEEVVKKMKNYWRQLLNAKLITQRKFDNLTKAERGGLSELDKAGFIKRQLVETRQITKHVAQILDSRMNTKYDENDKLIREVKVITLKSKLVSDFRKDFQFYKVREINNYHHAHDAYLNAVVGTALIKKYPKLESEFVYGDYKVYDVRKMIAKSEQEIGKATAKYFFYSNIMNFFKTEITLANGEIRKRPLIETNGETGEIVWDKGRDFATVRKVLSMPQVNIVKKTEVQTGGFSKESILPKRNSDKLIARKKDWDPKKYGGFDSPTVAYSVLVVAKVEKGKSKKLKSVKELLGITIMERSSFEKNPIDFLEAKGYKEVKKDLIIKLPKYSLFELENGRKRMLASAGELQKGNELALPSKYVNFLYLASHYEKLKGSPEDNEQKQLFVEQHKHYLDEIIEQISEFSKRVILADANLDKVLSAYNKHRDKPIREQAENIIHLFTLTNLGAPAAFKYFDTTIDRKRYTSTKEVLDATLIHQSITGLYETRIDLSQLGGDGGGGSGGGGSSGGVPWLMKKPLQLTVLVPLHEYQERLLQQTALPKEQKELLQKLFLKYDALWQHWENQVGHRRIKPHNIATGTLAPRPQKQYPINPKAKPSIQIVIDDLLKQGVLIQQNSTMNTPVYPVPKPDGKWRMVLDYREVNKTIPLIAAQNQHSAGILSSIYRGKYKTTLDLTNGFWAHPITPESYWLTAFTWQGKQYCWTRLPQGFLNSPALFTADVVDLLKEIPNVQAYVDDIYISHDDPQEHLEQLEKIFSILLNAGYVVSLKKSEIAQREVEFLGFNITKEGRGLTDTFKQKLLNITPPKDLKQLQSILGLLNFARNFIPNYSELVKPLYTIVANANGKFISWTEDNSNQLQHIISVLNQADNLEERNPETRLIIKVNSSPSAGYIRYYNEGSKRPIMYVNYIFSKAEAKFTQTEKLLTTMHKGLIKAMDLAMGQEILVYSPIVSMTKIQRTPLPERKALPVRWITWMTYLEDPRIQFHYDKSLPELQQIPNVTEDVIAKTKHPSEFAMVFYTDGSAIKHPDVNKSHSAGMGIAQVQFIPEYKIVHQWSIPLGDHTAQLAEIAAVEFACKKALKISGPVLIVTDSFYVAESANKELPYWKSNGFLNNKKKPLRHVSKWKSIAECLQLKPDIIIMHEKGHQQPMTTLHTEGNNLADKLATQGSYVVHAGKRTADGSEFEKRTADGSEFESPKKKAKVE

SEQ ID NO: 6814 - protein, 2085 aa, synthetic construct
MPAAKRVKLDGGDKKYSIGLDIGTNSVGWAVITDEYKVPSKKFKVLGNTDRHSIKKNLIGALLFDSGETAEATRLKRTARRRYTRRKNRICYLQEIFSNEMAKVDDSFFHRLEESFLVEEDKKHERHPIFGNIVDEVAYHEKYPTIYHLRKKLVDSTDKADLRLIYLALAHMIKFRGHFLIEGDLNPDNSDVDKLFIQLVQTYNQLFEENPINASGVDAKAILSARLSKSRRLENLIAQLPGEKKNGLFGNLIALSLGLTPNFKSNFDLAEDAKLQLSKDTYDDDLDNLLAQIGDQYADLFLAAKNLSDAILLSDILRVNTEITKAPLSASMIKRYDEHHQDLTLLKALVRQQLPEKYKEIFFDQSKNGYAGYIDGGASQEEFYKFIKPILEKMDGTEELLVKLNREDLLRKQRTFDNGSIPHQIHLGELHAILRRQEDFYPFLKDNREKIEKILTFRIPYYVGPLARGNSRFAWMTRKSEETITPWNFEEVVDKGASAQSFIERMTNFDKNLPNEKVLPKHSLLYEYFTVYNELTKVKYVTEGMRKPAFLSGEQKKAIVDLLFKTNRKVTVKQLKEDYFKKIECFDSVEISGVEDRFNASLGTYHDLLKIIKDKDFLDNEENEDILEDIVLTLTLFEDREMIEERLKTYAHLFDDKVMKQLKRRRYTGWGRLSRKLINGIRDKQSGKTILDFLKSDGFANRNFMQLIHDDSLTFKEDIQKAQVSGQGDSLHEHIANLAGSPAIKKGILQTVKVVDELVKVMGRHKPENIVIEMARENQTTQKGQKNSRERMKRIEEGIKELGSQILKEHPVENTQLQNEKLYLYYLQNGRDMYVDQELDINRLSDYDVDHIVPQSFLKDDSIDNKVLTRSDKARGKSDNVPSEEVVKKMKNYWRQLLNAKLITQRKFDNLTKAERGGLSELDKAGFIKRQLVETRQITKHVAQILDSRMNTKYDENDKLIREVKVITLKSKLVSDFRKDFQFYKVREINNYHHAHDAYLNAVVGTALIKKYPKLESEFVYGDYKVYDVRKMIAKSEQEIGKATAKYFFYSNIMNFFKTEITLANGEIRKRPLIETNGETGEIVWDKGRDFATVRKVLSMPQVNIVKKTEVQTGGFSKESILPKRNSDKLIARKKDWDPKKYGGFDSPTVAYSVLVVAKVEKGKSKKLKSVKELLGITIMERSSFEKNPIDFLEAKGYKEVKKDLIIKLPKYSLFELENGRKRMLASAGELQKGNELALPSKYVNFLYLASHYEKLKGSPEDNEQKQLFVEQHKHYLDEIIEQISEFSKRVILADANLDKVLSAYNKHRDKPIREQAENIIHLFTLTNLGAPAAFKYFDTTIDRKRYTSTKEVLDATLIHQSITGLYETRIDLSQLGGDGGGGSGGGGSSGGIPWLMKKPLQLTTLVPLQEYEERLLKQTMLTGSYKEKLQSLFLKYDALWQHWENQVGHRRIKPHHIATGTVNPRPQKQYPINPKAKASIQTVINDLLKQGVLIQQNSIMNTPVYPVPKPDGKWRMVLDYREVNKTIPLIAAQNQHSAGILSSIFRGKYKTTLDLSNGFWAHSITPESYWLTAFTWLGQQYCWTRLPQGFLNSPALFNADVVDLLKEVPNVQVYVDDIYISHDDPREHLEQLEKVFSLLLNAGYVVSLKKSEIAQHEVEFLGFNITKEGRGLTETFKQKLLNITPPRDLKQLQSILGKLNFARNFIPNFSELVKPLYNIIATAPGKYITWTTDNSQQLQNIISMLNSAENLEERNPEVRLIMKVNTSPSAGYIRFYNEFAKRPIMYLNYVYTKAEVKFTNTEKLLTTIHKGLIKALDLGMGQEILVYSPIVSMTKIQKTPLPERKALPIRWITWMSYLEDPRIQFHYDKTLPELQQVPTVTDDIIAKIKHPSEFSMVFYTDGSAIKHPNVNKSHNAGMGIAQVQFKPEFTVINTWSIPLGDHTAQLAEVAAVEFACKKALKIDGPVLIVTDSFYVAESVNKELPYWQSNGFFNNKKKPLKHVSKWKSIADCIQLKPDIIIIHEKGHQPTASTFHTEGNNLADKLATQGSYVVNAGKRTADGSEFEKRTADGSEFESPKKKAKVE

SEQ ID NO: 6815 - protein, 2094 aa, synthetic construct
MPAAKRVKLDGGDKKYSIGLDIGTNSVGWAVITDEYKVPSKKFKVLGNTDRHSIKKNLIGALLFDSGETAEATRLKRTARRRYTRRKNRICYLQEIFSNEMAKVDDSFFHRLEESFLVEEDKKHERHPIFGNIVDEVAYHEKYPTIYHLRKKLVDSTDKADLRLIYLALAHMIKFRGHFLIEGDLNPDNSDVDKLFIQLVQTYNQLFEENPINASGVDAKAILSARLSKSRRLENLIAQLPGEKKNGLFGNLIALSLGLTPNFKSNFDLAEDAKLQLSKDTYDDDLDNLLAQIGDQYADLFLAAKNLSDAILLSDILRVNTEITKAPLSASMIKRYDEHHQDLTLLKALVRQQLPEKYKEIFFDQSKNGYAGYIDGGASQEEFYKFIKPILEKMDGTEELLVKLNREDLLRKQRTFDNGSIPHQIHLGELHAILRRQEDFYPFLKDNREKIEKILTFRIPYYVGPLARGNSRFAWMTRKSEETITPWNFEEVVDKGASAQSFIERMTNFDKNLPNEKVLPKHSLLYEYFTVYNELTKVKYVTEGMRKPAFLSGEQKKAIVDLLFKTNRKVTVKQLKEDYFKKIECFDSVEISGVEDRFNASLGTYHDLLKIIKDKDFLDNEENEDILEDIVLTLTLFEDREMIEERLKTYAHLFDDKVMKQLKRRRYTGWGRLSRKLINGIRDKQSGKTILDFLKSDGFANRNFMQLIHDDSLTFKEDIQKAQVSGQGDSLHEHIANLAGSPAIKKGILQTVKVVDELVKVMGRHKPENIVIEMARENQTTQKGQKNSRERMKRIEEGIKELGSQILKEHPVENTQLQNEKLYLYYLQNGRDMYVDQELDINRLSDYDVDHIVPQSFLKDDSIDNKVLTRSDKARGKSDNVPSEEVVKKMKNYWRQLLNAKLITQRKFDNLTKAERGGLSELDKAGFIKRQLVETRQITKHVAQILDSRMNTKYDENDKLIREVKVITLKSKLVSDFRKDFQFYKVREINNYHHAHDAYLNAVVGTALIKKYPKLESEFVYGDYKVYDVRKMIAKSEQEIGKATAKYFFYSNIMNFFKTEITLANGEIRKRPLIETNGETGEIVWDKGRDFATVRKVLSMPQVNIVKKTEVQTGGFSKESILPKRNSDKLIARKKDWDPKKYGGFDSPTVAYSVLVVAKVEKGKSKKLKSVKELLGITIMERSSFEKNPIDFLEAKGYKEVKKDLIIKLPKYSLFELENGRKRMLASAGELQKGNELALPSKYVNFLYLASHYEKLKGSPEDNEQKQLFVEQHKHYLDEIIEQISEFSKRVILADANLDKVLSAYNKHRDKPIREQAENIIHLFTLTNLGAPAAFKYFDTTIDRKRYTSTKEVLDATLIHQSITGLYETRIDLSQLGGDGGGGSGGGGSSGGTLNIEDEYRLHETSKEPDVPLGSTWLSDFPQAWAETGGMGLAVRQAPLIIPLKATSTPVSIKQYPMSQEARLGIKPHIQRLLDQGILVPCQSPWNTPLLPVKKPGTNDYRPVQDLREVNKRVEDIHPTVPNPYNLLSGLPPSHQWYTVLDLKDAFFCLRLHPTSQPLFAFEWRDPEMGISGQLTWTRLPQGFKNSPTLFNEALHRDLADFRIQHPDLILLQYVDDLLLAATSEQDCQRGTRALLQTLGNLGYRASAKKAQICQKQVKYLGYLLKEGQRWLTEARKETVMGQPTPKTPRQLREFLGTAGFCRLWIPGFAEMAAPLYPLTKPGTLFNWGPDQQKAYQEIKQALLTAPALGLPDLTKPFELFVDEKQGYAKGVLTQKLGPWRRPVAYLSKKLDPVAAGWPPCLRMVAAIAVLTKDAGKLTMGQPLVILAPHAVEALVKQPPDRWLSNARMTHYQAMLLDTDRVQFGPVVALNPATLLPLPEKEAPHDCLEILAETHGTRPDLTDQPIPDADYTWYTDGSSFLQEGQRRAGAAVTTETEVIWARALPAGTSAQRAELIALTQALKMAEGKKLNVYTDSRYAFATAHVHGEIYRRRGWLTSEGREIKNKNEILALLKALFLPKRLSIIHCPGHQKGNSAEARGNRMADQAAREAAMKAVLETSTLLAGKRTADGSEFEKRTADGSEFESPKKKAKVE

SEQ ID NO: 6816 - protein, 2094 aa, synthetic construct
MPAAKRVKLDGGDKKYSIGLDIGTNSVGWAVITDEYKVPSKKFKVLGNTDRHSIKKNLIGALLFDSGETAEATRLKRTARRRYTRRKNRICYLQEIFSNEMAKVDDSFFHRLEESFLVEEDKKHERHPIFGNIVDEVAYHEKYPTIYHLRKKLVDSTDKADLRLIYLALAHMIKFRGHFLIEGDLNPDNSDVDKLFIQLVQTYNQLFEENPINASGVDAKAILSARLSKSRRLENLIAQLPGEKKNGLFGNLIALSLGLTPNFKSNFDLAEDAKLQLSKDTYDDDLDNLLAQIGDQYADLFLAAKNLSDAILLSDILRVNTEITKAPLSASMIKRYDEHHQDLTLLKALVRQQLPEKYKEIFFDQSKNGYAGYIDGGASQEEFYKFIKPILEKMDGTEELLVKLNREDLLRKQRTFDNGSIPHQIHLGELHAILRRQEDFYPFLKDNREKIEKILTFRIPYYVGPLARGNSRFAWMTRKSEETITPWNFEEVVDKGASAQSFIERMTNFDKNLPNEKVLPKHSLLYEYFTVYNELTKVKYVTEGMRKPAFLSGEQKKAIVDLLFKTNRKVTVKQLKEDYFKKIECFDSVEISGVEDRFNASLGTYHDLLKIIKDKDFLDNEENEDILEDIVLTLTLFEDREMIEERLKTYAHLFDDKVMKQLKRRRYTGWGRLSRKLINGIRDKQSGKTILDFLKSDGFANRNFMQLIHDDSLTFKEDIQKAQVSGQGDSLHEHIANLAGSPAIKKGILQTVKVVDELVKVMGRHKPENIVIEMARENQTTQKGQKNSRERMKRIEEGIKELGSQILKEHPVENTQLQNEKLYLYYLQNGRDMYVDQELDINRLSDYDVDHIVPQSFLKDDSIDNKVLTRSDKARGKSDNVPSEEVVKKMKNYWRQLLNAKLITQRKFDNLTKAERGGLSELDKAGFIKRQLVETRQITKHVAQILDSRMNTKYDENDKLIREVKVITLKSKLVSDFRKDFQFYKVREINNYHHAHDAYLNAVVGTALIKKYPKLESEFVYGDYKVYDVRKMIAKSEQEIGKATAKYFFYSNIMNFFKTEITLANGEIRKRPLIETNGETGEIVWDKGRDFATVRKVLSMPQVNIVKKTEVQTGGFSKESILPKRNSDKLIARKKDWDPKKYGGFDSPTVAYSVLVVAKVEKGKSKKLKSVKELLGITIMERSSFEKNPIDFLEAKGYKEVKKDLIIKLPKYSLFELENGRKRMLASAGELQKGNELALPSKYVNFLYLASHYEKLKGSPEDNEQKQLFVEQHKHYLDEIIEQISEFSKRVILADANLDKVLSAYNKHRDKPIREQAENIIHLFTLTNLGAPAAFKYFDTTIDRKRYTSTKEVLDATLIHQSITGLYETRIDLSQLGGDGGGGSGGGGSSGGTLNIEDEYRLHETSKEPDVPLGSTWLSDFPQAWAETGGMGLAVRQAPLIIPLKATSTPVSIKQYPMSQEARLGIKPHIQRLLDQGILVPCQSPWNTPLLPVKKPGTNDYRPVQDLREVNKRVEDIHPTVPNPYNLLSGLPPSHQWYTVLDLKDAFFCLRLHPTSQPLFAFEWRDPEMGISGQLTWTRLPQGFKNSPTLFNEALHRDLADFRIQHPDLILLQYVDDLLLAATSEQDCQRGTRALLQTLGNLGYRASAKKAQICQKQVKYLGYLLKEGQRWLTEARKETVMGQPTPKTPRQLREFLGKAGFCRLFIPGFAEMAAPLYPLTKPGTLFNWGPDQQKAYQEIKQALLTAPALGLPDLTKPFELFVDEKQGYAKGVLTQKLGPWRRPVAYLSKKLDPVAAGWPPCLRMVAAIAVLTKDAGKLTMGQPLVILAPHAVEALVKQPPDRWLSNARMTHYQAMLLDTDRVQFGPVVALNPATLLPLPEKEAPHDCLEILAETHGTRPDLTDQPIPDADYTWYTDGSSFLQEGQRRAGAAVTTETEVIWARALPAGTSAQRAELIALTQALKMAEGKKLNVYTDSRYAFATAHVHGEIYRRRGWLTSEGREIKNKNEILALLKALFLPKRLSIIHCPGHQKGNSAEARGNRMADQAAREAAMKAVLETSTLLAGKRTADGSEFEKRTADGSEFESPKKKAKVE

SEQ ID NO: 6817 - protein, 2096 aa, synthetic construct
MPAAKRVKLDGGDKKYSIGLDIGTNSVGWAVITDEYKVPSKKFKVLGNTDRHSIKKNLIGALLFDSGETAEATRLKRTARRRYTRRKNRICYLQEIFSNEMAKVDDSFFHRLEESFLVEEDKKHERHPIFGNIVDEVAYHEKYPTIYHLRKKLVDSTDKADLRLIYLALAHMIKFRGHFLIEGDLNPDNSDVDKLFIQLVQTYNQLFEENPINASGVDAKAILSARLSKSRRLENLIAQLPGEKKNGLFGNLIALSLGLTPNFKSNFDLAEDAKLQLSKDTYDDDLDNLLAQIGDQYADLFLAAKNLSDAILLSDILRVNTEITKAPLSASMIKRYDEHHQDLTLLKALVRQQLPEKYKEIFFDQSKNGYAGYIDGGASQEEFYKFIKPILEKMDGTEELLVKLNREDLLRKQRTFDNGSIPHQIHLGELHAILRRQEDFYPFLKDNREKIEKILTFRIPYYVGPLARGNSRFAWMTRKSEETITPWNFEEVVDKGASAQSFIERMTNFDKNLPNEKVLPKHSLLYEYFTVYNELTKVKYVTEGMRKPAFLSGEQKKAIVDLLFKTNRKVTVKQLKEDYFKKIECFDSVEISGVEDRFNASLGTYHDLLKIIKDKDFLDNEENEDILEDIVLTLTLFEDREMIEERLKTYAHLFDDKVMKQLKRRRYTGWGRLSRKLINGIRDKQSGKTILDFLKSDGFANRNFMQLIHDDSLTFKEDIQKAQVSGQGDSLHEHIANLAGSPAIKKGILQTVKVVDELVKVMGRHKPENIVIEMARENQTTQKGQKNSRERMKRIEEGIKELGSQILKEHPVENTQLQNEKLYLYYLQNGRDMYVDQELDINRLSDYDVDHIVPQSFLKDDSIDNKVLTRSDKARGKSDNVPSEEVVKKMKNYWRQLLNAKLITQRKFDNLTKAERGGLSELDKAGFIKRQLVETRQITKHVAQILDSRMNTKYDENDKLIREVKVITLKSKLVSDFRKDFQFYKVREINNYHHAHDAYLNAVVGTALIKKYPKLESEFVYGDYKVYDVRKMIAKSEQEIGKATAKYFFYSNIMNFFKTEITLANGEIRKRPLIETNGETGEIVWDKGRDFATVRKVLSMPQVNIVKKTEVQTGGFSKESILPKRNSDKLIARKKDWDPKKYGGFDSPTVAYSVLVVAKVEKGKSKKLKSVKELLGITIMERSSFEKNPIDFLEAKGYKEVKKDLIIKLPKYSLFELENGRKRMLASAGELQKGNELALPSKYVNFLYLASHYEKLKGSPEDNEQKQLFVEQHKHYLDEIIEQISEFSKRVILADANLDKVLSAYNKHRDKPIREQAENIIHLFTLTNLGAPAAFKYFDTTIDRKRYTSTKEVLDATLIHQSITGLYETRIDLSQLGGDGGGGSGSSGGGGGTAPLEEEYRLFLEAPIQNVTLLEQWKREIPKVWAEINPPGLASTQAPIHVQLLSTALPVRVRQYPITLEAKRSLRETIRKFRAAGILRPVHSPWNTPLLPVRKSGTSEYRMVQDLREVNKRVETIHPTVPNPYTLLSLLPPDRIWYSVLDLKDAFFCIPLAPESQLIFAFEWADAEEGESGQLTWTRLPQGFKNSPTLFNEALNRDLQGFRLDHPSVSLLQYVDDLLIAADTQAACLSATRDLLMTLAELGYRVSGKKAQLCQEEVTYLGFKIHKGSRSLSNSRTQAILQIPVPKTKRQVREFLGTIGYCRLWIPGFAELAQPLYAATRPGNDPLVWGEKEEEAFQSLKLALTQPPALALPSLDKPFQLFVEETSGAAKGVLTQALGPWKRPVAYLSKRLDPVAAGWPRCLRAIAAAALLTREASKLTFGQDIEITSSHNLESLLRSPPDKWLTNARITQYQVLLLDPPRVRFKQTAALNPATLLPETDDTLPIHHCLDTLDSLTSTRPDLTDQPLAQAEATLFTDGSSYIRDGKRYAGAAVVTLDSVIWAEPLPIGTSAQKAELIALTKALEWSKDKSVNIYTDSRYAFATLHVHGMIYRERGWLTAGGKAIKNAPEILALLTAVWLPKRVAVMHCKGHQKDDAPTSTGNRRADEVAREVAIRPLSTQATISAGKRTADGSEFEKRTADGSEFESPKKKAKVE

SEQ ID NO: 6818 - protein, 2100 aa, synthetic construct
MPAAKRVKLDGGDKKYSIGLDIGTNSVGWAVITDEYKVPSKKFKVLGNTDRHSIKKNLIGALLFDSGETAEATRLKRTARRRYTRRKNRICYLQEIFSNEMAKVDDSFFHRLEESFLVEEDKKHERHPIFGNIVDEVAYHEKYPTIYHLRKKLVDSTDKADLRLIYLALAHMIKFRGHFLIEGDLNPDNSDVDKLFIQLVQTYNQLFEENPINASGVDAKAILSARLSKSRRLENLIAQLPGEKKNGLFGNLIALSLGLTPNFKSNFDLAEDAKLQLSKDTYDDDLDNLLAQIGDQYADLFLAAKNLSDAILLSDILRVNTEITKAPLSASMIKRYDEHHQDLTLLKALVRQQLPEKYKEIFFDQSKNGYAGYIDGGASQEEFYKFIKPILEKMDGTEELLVKLNREDLLRKQRTFDNGSIPHQIHLGELHAILRRQEDFYPFLKDNREKIEKILTFRIPYYVGPLARGNSRFAWMTRKSEETITPWNFEEVVDKGASAQSFIERMTNFDKNLPNEKVLPKHSLLYEYFTVYNELTKVKYVTEGMRKPAFLSGEQKKAIVDLLFKTNRKVTVKQLKEDYFKKIECFDSVEISGVEDRFNASLGTYHDLLKIIKDKDFLDNEENEDILEDIVLTLTLFEDREMIEERLKTYAHLFDDKVMKQLKRRRYTGWGRLSRKLINGIRDKQSGKTILDFLKSDGFANRNFMQLIHDDSLTFKEDIQKAQVSGQGDSLHEHIANLAGSPAIKKGILQTVKVVDELVKVMGRHKPENIVIEMARENQTTQKGQKNSRERMKRIEEGIKELGSQILKEHPVENTQLQNEKLYLYYLQNGRDMYVDQELDINRLSDYDVDHIVPQSFLKDDSIDNKVLTRSDKARGKSDNVPSEEVVKKMKNYWRQLLNAKLITQRKFDNLTKAERGGLSELDKAGFIKRQLVETRQITKHVAQILDSRMNTKYDENDKLIREVKVITLKSKLVSDFRKDFQFYKVREINNYHHAHDAYLNAVVGTALIKKYPKLESEFVYGDYKVYDVRKMIAKSEQEIGKATAKYFFYSNIMNFFKTEITLANGEIRKRPLIETNGETGEIVWDKGRDFATVRKVLSMPQVNIVKKTEVQTGGFSKESILPKRNSDKLIARKKDWDPKKYGGFDSPTVAYSVLVVAKVEKGKSKKLKSVKELLGITIMERSSFEKNPIDFLEAKGYKEVKKDLIIKLPKYSLFELENGRKRMLASAGELQKGNELALPSKYVNFLYLASHYEKLKGSPEDNEQKQLFVEQHKHYLDEIIEQISEFSKRVILADANLDKVLSAYNKHRDKPIREQAENIIHLFTLTNLGAPAAFKYFDTTIDRKRYTSTKEVLDATLIHQSITGLYETRIDLSQLGGDGGGGSGSSGGGGGTVSLQDEHRLFDIPVTTSLPDVWLQDFPQAWAETGGLGRAKCQAPIIIDLKPTAVPVSIKQYPMSLEAHMGIRQHIIKFLELGVLRPCRSPWNTPLLPVKKPGTQDYRPVQDLREINKRTVDIHPTVPNPYNLLSTLKPDYSWYTVLDLKDAFFCLPLAPQSQELFAFEWKDPERGISGQLTWTRLPQGFKNSPTLFDEALHRDLTDFRTQHPEVTLLQYVDDLLLAAPTKKACTQGTRHLLQELGEKGYRASAKKAQICQTKVTYLGYILSEGKRWLTPGRIETVARIPPPRNPREVREFLGTAGFCRLWIPGFAELAAPLYALTKESTPFTWQTEHQLAFEALKKALLSAPALGLPDTSKPFTLFLDERQGIAKGVLTQKLGPWKRPVAYLSKKLDPVAAGWPPCLRIMAATAMLVKDSAKLTLGQPLTVITPHTLEAIVRQPPDRWITNARLTHYQALLLDTDRVQFGPPVTLNPATLLPVPENQPSPHDCRQVLAETHGTREDLKDQELPDADHTWYTDGSSYLDSGTRRAGAAVVDGHNTIWAQSLPPGTSAQKAELIALTKALELSKGKKANIYTDSRYAFATAHTHGSIYERRGLLTSEGKEIKNKAEIIALLKALFLPQEVAIIHCPGHQKGQDPVAVGNRQADRVARQAAMAEVLTLATEPDNTSHITAGKRTADGSEFEKRTADGSEFESPKKKAKVE

SEQ ID NO: 6819 - protein, 2094 aa, synthetic construct
MPAAKRVKLDGGDKKYSIGLDIGTNSVGWAVITDEYKVPSKKFKVLGNTDRHSIKKNLIGALLFDSGETAEATRLKRTARRRYTRRKNRICYLQEIFSNEMAKVDDSFFHRLEESFLVEEDKKHERHPIFGNIVDEVAYHEKYPTIYHLRKKLVDSTDKADLRLIYLALAHMIKFRGHFLIEGDLNPDNSDVDKLFIQLVQTYNQLFEENPINASGVDAKAILSARLSKSRRLENLIAQLPGEKKNGLFGNLIALSLGLTPNFKSNFDLAEDAKLQLSKDTYDDDLDNLLAQIGDQYADLFLAAKNLSDAILLSDILRVNTEITKAPLSASMIKRYDEHHQDLTLLKALVRQQLPEKYKEIFFDQSKNGYAGYIDGGASQEEFYKFIKPILEKMDGTEELLVKLNREDLLRKQRTFDNGSIPHQIHLGELHAILRRQEDFYPFLKDNREKIEKILTFRIPYYVGPLARGNSRFAWMTRKSEETITPWNFEEVVDKGASAQSFIERMTNFDKNLPNEKVLPKHSLLYEYFTVYNELTKVKYVTEGMRKPAFLSGEQKKAIVDLLFKTNRKVTVKQLKEDYFKKIECFDSVEISGVEDRFNASLGTYHDLLKIIKDKDFLDNEENEDILEDIVLTLTLFEDREMIEERLKTYAHLFDDKVMKQLKRRRYTGWGRLSRKLINGIRDKQSGKTILDFLKSDGFANRNFMQLIHDDSLTFKEDIQKAQVSGQGDSLHEHIANLAGSPAIKKGILQTVKVVDELVKVMGRHKPENIVIEMARENQTTQKGQKNSRERMKRIEEGIKELGSQILKEHPVENTQLQNEKLYLYYLQNGRDMYVDQELDINRLSDYDVDHIVPQSFLKDDSIDNKVLTRSDKARGKSDNVPSEEVVKKMKNYWRQLLNAKLITQRKFDNLTKAERGGLSELDKAGFIKRQLVETRQITKHVAQILDSRMNTKYDENDKLIREVKVITLKSKLVSDFRKDFQFYKVREINNYHHAHDAYLNAVVGTALIKKYPKLESEFVYGDYKVYDVRKMIAKSEQEIGKATAKYFFYSNIMNFFKTEITLANGEIRKRPLIETNGETGEIVWDKGRDFATVRKVLSMPQVNIVKKTEVQTGGFSKESILPKRNSDKLIARKKDWDPKKYGGFDSPTVAYSVLVVAKVEKGKSKKLKSVKELLGITIMERSSFEKNPIDFLEAKGYKEVKKDLIIKLPKYSLFELENGRKRMLASAGELQKGNELALPSKYVNFLYLASHYEKLKGSPEDNEQKQLFVEQHKHYLDEIIEQISEFSKRVILADANLDKVLSAYNKHRDKPIREQAENIIHLFTLTNLGAPAAFKYFDTTIDRKRYTSTKEVLDATLIHQSITGLYETRIDLSQLGGDGGGGSGSSGGGGGTLNLEDEYRLYETSAEPEVSPGSTWLSDFPQAWAETGGMGLAVRQAPLIIPLKATSTPVSIKQYPMSQEAKLGIKPHIQRLLDQGILVPCQSPWNTPLLPVKKPGTNDYRPVQDLREVNKRVEDIHPTVPNPYNLLSGLPPSHRWYTVLDLKDAFFCLRLHPTSQPLFAFEWRDPGMGISGQLTWTRLPQGFKNSPTLFNEALHRDLADFRIQHPDLILLQYVDDILLAATSELDCQQGTRALLLTLGNLGYRASAKKAQLCQKQVKYLGYLLKEGQRWLTEARKETVMGQPTPKTPRQLREFLGKAGFCRLFIPGFAEMAAPLYPLTKPGTLFNWGPDQQKAYQEIKQALLTAPALGLPDLTKPFELFVDEKQGYAKGVLTQKLGPWRRPVAYLSKKLDPVAAGWPPCLRMVAAIAVLRKDAGKLTMGQPLVILAPHAVEALVKQPPDRWLSNARMTHYQAMLLDTDRVQFGPVVALNPATLLPLPEEGAPHDCLEILAETHGTRPDLTDQPIPDADHTWYTDGSSFLQEGQRKAGAAVTTETEVIWARALPAGTSAQRAELIALTQALKMAEGKRLNVYTDSRYAFATAHIHGEIYRRRGWLTSEGREIKNKSEILALLKALFLPKRLSIIHCLGHQKGDSAEARGNRLADQAAREAAIKTPPDTSTLLAGKRTADGSEFEKRTADGSEFESPKKKAKVE

SEQ ID NO: 6820 - protein, 2094 aa, synthetic construct
MPAAKRVKLDGGDKKYSIGLDIGTNSVGWAVITDEYKVPSKKFKVLGNTDRHSIKKNLIGALLFDSGETAEATRLKRTARRRYTRRKNRICYLQEIFSNEMAKVDDSFFHRLEESFLVEEDKKHERHPIFGNIVDEVAYHEKYPTIYHLRKKLVDSTDKADLRLIYLALAHMIKFRGHFLIEGDLNPDNSDVDKLFIQLVQTYNQLFEENPINASGVDAKAILSARLSKSRRLENLIAQLPGEKKNGLFGNLIALSLGLTPNFKSNFDLAEDAKLQLSKDTYDDDLDNLLAQIGDQYADLFLAAKNLSDAILLSDILRVNTEITKAPLSASMIKRYDEHHQDLTLLKALVRQQLPEKYKEIFFDQSKNGYAGYIDGGASQEEFYKFIKPILEKMDGTEELLVKLNREDLLRKQRTFDNGSIPHQIHLGELHAILRRQEDFYPFLKDNREKIEKILTFRIPYYVGPLARGNSRFAWMTRKSEETITPWNFEEVVDKGASAQSFIERMTNFDKNLPNEKVLPKHSLLYEYFTVYNELTKVKYVTEGMRKPAFLSGEQKKAIVDLLFKTNRKVTVKQLKEDYFKKIECFDSVEISGVEDRFNASLGTYHDLLKIIKDKDFLDNEENEDILEDIVLTLTLFEDREMIEERLKTYAHLFDDKVMKQLKRRRYTGWGRLSRKLINGIRDKQSGKTILDFLKSDGFANRNFMQLIHDDSLTFKEDIQKAQVSGQGDSLHEHIANLAGSPAIKKGILQTVKVVDELVKVMGRHKPENIVIEMARENQTTQKGQKNSRERMKRIEEGIKELGSQILKEHPVENTQLQNEKLYLYYLQNGRDMYVDQELDINRLSDYDVDHIVPQSFLKDDSIDNKVLTRSDKARGKSDNVPSEEVVKKMKNYWRQLLNAKLITQRKFDNLTKAERGGLSELDKAGFIKRQLVETRQITKHVAQILDSRMNTKYDENDKLIREVKVITLKSKLVSDFRKDFQFYKVREINNYHHAHDAYLNAVVGTALIKKYPKLESEFVYGDYKVYDVRKMIAKSEQEIGKATAKYFFYSNIMNFFKTEITLANGEIRKRPLIETNGETGEIVWDKGRDFATVRKVLSMPQVNIVKKTEVQTGGFSKESILPKRNSDKLIARKKDWDPKKYGGFDSPTVAYSVLVVAKVEKGKSKKLKSVKELLGITIMERSSFEKNPIDFLEAKGYKEVKKDLIIKLPKYSLFELENGRKRMLASAGELQKGNELALPSKYVNFLYLASHYEKLKGSPEDNEQKQLFVEQHKHYLDEIIEQISEFSKRVILADANLDKVLSAYNKHRDKPIREQAENIIHLFTLTNLGAPAAFKYFDTTIDRKRYTSTKEVLDATLIHQSITGLYETRIDLSQLGGDGGGGSGSSGGGGGLGIEDEYRLHETSTEPDVSLGSTWLSDFPQAWAETGGMGLAVRQAPLIIPLKATSTPVSIQQYPMSHEARLGIKPHIQRLLDQGILVPCQSPWNTPLLPVKKPGTNDYRPVQDLREVNKRVEDIHPTVPNPYNLLSGLPPSHQWYTVLDLKDAFFCLRLHPTSQPLFAFEWRDPGMGISGQLTWTRLPQGFKNSPTLFNEALHRDLADFRIQHPDLILLQYVDDILLAATSELDCQQGTRALLQTLGDLGYRASAKKAQICQKQVKYLGYLLREGQRWLTEARKETVMGQPVPKTPRQLREFLGKAGFCRLFIPGFAEMAAPLYPLTKPGTLFSWGPDQQKAYQEIKQALLTAPALGLPDLTKPFELFVDEKQGYAKGVLTQKLGPWRRPVAYLSKKLDPVAAGWPPCLRMVAAIAVLTKDAGKLTMGQPLVILAPHAVEALVKQPPDRWLSNARMTHYQAMLLDTDRVQFGPVVALNPATLLPLPEEGAPHDCLEILAETHGTRPDLTDQPIPDADHTWYTDGSSFLQEGQRKAGAAVTTETEVIWAGALPAGTSAQRAELIALTQALKMAEGKRLNVYTDSRYAFATAHIHGEIYRRRGWLTSEGREIKNKSEILALLKALFLPKRLSIIHCLGHQKGDSAEARGNRLADQAAREAAIKTPPDTSTLLIAGKRTADGSEFEKRTADGSEFESPKKKAKVE

SEQ ID NO: 6821 - protein, 2174 aa, synthetic construct
MPAAKRVKLDGGDKKYSIGLDIGTNSVGWAVITDEYKVPSKKFKVLGNTDRHSIKKNLIGALLFDSGETAEATRLKRTARRRYTRRKNRICYLQEIFSNEMAKVDDSFFHRLEESFLVEEDKKHERHPIFGNIVDEVAYHEKYPTIYHLRKKLVDSTDKADLRLIYLALAHMIKFRGHFLIEGDLNPDNSDVDKLFIQLVQTYNQLFEENPINASGVDAKAILSARLSKSRRLENLIAQLPGEKKNGLFGNLIALSLGLTPNFKSNFDLAEDAKLQLSKDTYDDDLDNLLAQIGDQYADLFLAAKNLSDAILLSDILRVNTEITKAPLSASMIKRYDEHHQDLTLLKALVRQQLPEKYKEIFFDQSKNGYAGYIDGGASQEEFYKFIKPILEKMDGTEELLVKLNREDLLRKQRTFDNGSIPHQIHLGELHAILRRQEDFYPFLKDNREKIEKILTFRIPYYVGPLARGNSRFAWMTRKSEETITPWNFEEVVDKGASAQSFIERMTNFDKNLPNEKVLPKHSLLYEYFTVYNELTKVKYVTEGMRKPAFLSGEQKKAIVDLLFKTNRKVTVKQLKEDYFKKIECFDSVEISGVEDRFNASLGTYHDLLKIIKDKDFLDNEENEDILEDIVLTLTLFEDREMIEERLKTYAHLFDDKVMKQLKRRRYTGWGRLSRKLINGIRDKQSGKTILDFLKSDGFANRNFMQLIHDDSLTFKEDIQKAQVSGQGDSLHEHIANLAGSPAIKKGILQTVKVVDELVKVMGRHKPENIVIEMARENQTTQKGQKNSRERMKRIEEGIKELGSQILKEHPVENTQLQNEKLYLYYLQNGRDMYVDQELDINRLSDYDVDHIVPQSFLKDDSIDNKVLTRSDKARGKSDNVPSEEVVKKMKNYWRQLLNAKLITQRKFDNLTKAERGGLSELDKAGFIKRQLVETRQITKHVAQILDSRMNTKYDENDKLIREVKVITLKSKLVSDFRKDFQFYKVREINNYHHAHDAYLNAVVGTALIKKYPKLESEFVYGDYKVYDVRKMIAKSEQEIGKATAKYFFYSNIMNFFKTEITLANGEIRKRPLIETNGETGEIVWDKGRDFATVRKVLSMPQVNIVKKTEVQTGGFSKESILPKRNSDKLIARKKDWDPKKYGGFDSPTVAYSVLVVAKVEKGKSKKLKSVKELLGITIMERSSFEKNPIDFLEAKGYKEVKKDLIIKLPKYSLFELENGRKRMLASAGELQKGNELALPSKYVNFLYLASHYEKLKGSPEDNEQKQLFVEQHKHYLDEIIEQISEFSKRVILADANLDKVLSAYNKHRDKPIREQAENIIHLFTLTNLGAPAAFKYFDTTIDRKRYTSTKEVLDATLIHQSITGLYETRIDLSQLGGDGGGGSGSSGGGGGMDPLQLLQPLEAEIKGTKLKAHWNSGATITCVPEAFLEDERPIQTMLIKTIHGEKQQDVYYLTFKVQGRKVEAEVLASPYDYILLNPSDVPWLMKKPLQLTVLVPLHEYQERLLQQTALPKEQKELLQKLFLKYDALWQHWENQVGHRRIKPHNIATGTLAPRPQKQYPINPKAKPSIQIVIDDLLKQGVLIQQNSTMNTPVYPVPKPDGKWRMVLDYREVNKTIPLIAAQNQHSAGILSSIYRGKYKTTLDLTNGFWAHPITPESYWLTAFTWQGKQYCWTRLPQGFLNSPALFNADVVDLLKEIPNVQAYVDDIYISHDDPQEHLEQLEKIFSILLNAGYVVSLKKSEIAQREVEFLGFNITKEGRGLTDTFKQKLLNITPPKDLKQLQSILGLLNFARNFIPNYSELVKPLYTIVAPANGKFISWTEDNSNQLQHIISVLNQADNLEERNPETRLIIKVNSSPSAGYIRYYNEGSKRPIMYVNYIFSKAEAKFTQTEKLLTTMHKGLIKAMDLAMGQEILVYSPIVSMTKIQRTPLPERKALPVRWITWMTYLEDPRIQFHYDKSLPELQQIPNVTEDVIAKTKHPSEFAMVFYTDGSAIKHPDVNKSHSAGMGIAQVQFIPEYKIVHQWSIPLGDHTAQLAEIAAVEFACKKALKISGPVLIVTDSFYVAESANKELPYWKSNGFLNNKKKPLRHVSKWKSIAECLQLKPDIIIMHEKGHQQPMTTLHTEGNNLADKLATQGSYVVHAGKRTADGSEFEKRTADGSEFESPKKKAKVE

SEQ ID NO: 6822 - protein, 2096 aa, synthetic construct
MPAAKRVKLDGGDKKYSIGLDIGTNSVGWAVITDEYKVPSKKFKVLGNTDRHSIKKNLIGALLFDSGETAEATRLKRTARRRYTRRKNRICYLQEIFSNEMAKVDDSFFHRLEESFLVEEDKKHERHPIFGNIVDEVAYHEKYPTIYHLRKKLVDSTDKADLRLIYLALAHMIKFRGHFLIEGDLNPDNSDVDKLFIQLVQTYNQLFEENPINASGVDAKAILSARLSKSRRLENLIAQLPGEKKNGLFGNLIALSLGLTPNFKSNFDLAEDAKLQLSKDTYDDDLDNLLAQIGDQYADLFLAAKNLSDAILLSDILRVNTEITKAPLSASMIKRYDEHHQDLTLLKALVRQQLPEKYKEIFFDQSKNGYAGYIDGGASQEEFYKFIKPILEKMDGTEELLVKLNREDLLRKQRTFDNGSIPHQIHLGELHAILRRQEDFYPFLKDNREKIEKILTFRIPYYVGPLARGNSRFAWMTRKSEETITPWNFEEVVDKGASAQSFIERMTNFDKNLPNEKVLPKHSLLYEYFTVYNELTKVKYVTEGMRKPAFLSGEQKKAIVDLLFKTNRKVTVKQLKEDYFKKIECFDSVEISGVEDRFNASLGTYHDLLKIIKDKDFLDNEENEDILEDIVLTLTLFEDREMIEERLKTYAHLFDDKVMKQLKRRRYTGWGRLSRKLINGIRDKQSGKTILDFLKSDGFANRNFMQLIHDDSLTFKEDIQKAQVSGQGDSLHEHIANLAGSPAIKKGILQTVKVVDELVKVMGRHKPENIVIEMARENQTTQKGQKNSRERMKRIEEGIKELGSQILKEHPVENTQLQNEKLYLYYLQNGRDMYVDQELDINRLSDYDVDHIVPQSFLKDDSIDNKVLTRSDKARGKSDNVPSEEVVKKMKNYWRQLLNAKLITQRKFDNLTKAERGGLSELDKAGFIKRQLVETRQITKHVAQILDSRMNTKYDENDKLIREVKVITLKSKLVSDFRKDFQFYKVREINNYHHAHDAYLNAVVGTALIKKYPKLESEFVYGDYKVYDVRKMIAKSEQEIGKATAKYFFYSNIMNFFKTEITLANGEIRKRPLIETNGETGEIVWDKGRDFATVRKVLSMPQVNIVKKTEVQTGGFSKESILPKRNSDKLIARKKDWDPKKYGGFDSPTVAYSVLVVAKVEKGKSKKLKSVKELLGITIMERSSFEKNPIDFLEAKGYKEVKKDLIIKLPKYSLFELENGRKRMLASAGELQKGNELALPSKYVNFLYLASHYEKLKGSPEDNEQKQLFVEQHKHYLDEIIEQISEFSKRVILADANLDKVLSAYNKHRDKPIREQAENIIHLFTLTNLGAPAAFKYFDTTIDRKRYTSTKEVLDATLIHQSITGLYETRIDLSQLGGDGGGGGGGSGSSGGTAPLEEEYRLFLEAPIQNVTLLEQWKREIPKVWAEINPPGLASTQAPIHVQLLSTALPVRVRQYPITLEAKRSLRETIRKFRAAGILRPVHSPWNTPLLPVRKSGTSEYRMVQDLREVNKRVETIHPTVPNPYTLLSLLPPDRIWYSVLDLKDAFFCIPLAPESQLIFAFEWADAEEGESGQLTWTRLPQGFKNSPTLFDEALNRDLQGFRLDHPSVSLLQYVDDLLIAADTQAACLSATRDLLMTLAELGYRVSGKKAQLCQEEVTYLGFKIHKGSRSLSNSRTQAILQIPVPKTKRQVREFLGTIGYCRLWIPGFAELAQPLYAATRGGNDPLVWGEKEEEAFQSLKLALTQPPALALPSLDKPFQLFVEETSGAAKGVLTQALGPWKRPVAYLSKRLDPVAAGWPRCLRAIAAAALLTREASKLTFGQDIEITSSHNLESLLRSPPDKWLTNARITQYQVLLLDPPRVRFKQTAALNPATLLPETDDTLPIHHCLDTLDSLTSTRPDLTDQPLAQAEATLFTDGSSYIRDGKRYAGAAVVTLDSVIWAEPLPIGTSAQKAELIALTKALEWSKDKSVNIYTDSRYAFATLHVHGMIYRERGLLTAGGKAIKNAPEILALLTAVWLPKRVAVMHCKGHQKDDAPTSTGNRRADEVAREVAIRPLSTQATISAGKRTADGSEFEKRTADGSEFESPKKKAKVE

SEQ ID NO: 6823 - protein, 2096 aa, synthetic construct
MPAAKRVKLDGGDKKYSIGLDIGTNSVGWAVITDEYKVPSKKFKVLGNTDRHSIKKNLIGALLFDSGETAEATRLKRTARRRYTRRKNRICYLQEIFSNEMAKVDDSFFHRLEESFLVEEDKKHERHPIFGNIVDEVAYHEKYPTIYHLRKKLVDSTDKADLRLIYLALAHMIKFRGHFLIEGDLNPDNSDVDKLFIQLVQTYNQLFEENPINASGVDAKAILSARLSKSRRLENLIAQLPGEKKNGLFGNLIALSLGLTPNFKSNFDLAEDAKLQLSKDTYDDDLDNLLAQIGDQYADLFLAAKNLSDAILLSDILRVNTEITKAPLSASMIKRYDEHHQDLTLLKALVRQQLPEKYKEIFFDQSKNGYAGYIDGGASQEEFYKFIKPILEKMDGTEELLVKLNREDLLRKQRTFDNGSIPHQIHLGELHAILRRQEDFYPFLKDNREKIEKILTFRIPYYVGPLARGNSRFAWMTRKSEETITPWNFEEVVDKGASAQSFIERMTNFDKNLPNEKVLPKHSLLYEYFTVYNELTKVKYVTEGMRKPAFLSGEQKKAIVDLLFKTNRKVTVKQLKEDYFKKIECFDSVEISGVEDRFNASLGTYHDLLKIIKDKDFLDNEENEDILEDIVLTLTLFEDREMIEERLKTYAHLFDDKVMKQLKRRRYTGWGRLSRKLINGIRDKQSGKTILDFLKSDGFANRNFMQLIHDDSLTFKEDIQKAQVSGQGDSLHEHIANLAGSPAIKKGILQTVKVVDELVKVMGRHKPENIVIEMARENQTTQKGQKNSRERMKRIEEGIKELGSQILKEHPVENTQLQNEKLYLYYLQNGRDMYVDQELDINRLSDYDVDHIVPQSFLKDDSIDNKVLTRSDKARGKSDNVPSEEVVKKMKNYWRQLLNAKLITQRKFDNLTKAERGGLSELDKAGFIKRQLVETRQITKHVAQILDSRMNTKYDENDKLIREVKVITLKSKLVSDFRKDFQFYKVREINNYHHAHDAYLNAVVGTALIKKYPKLESEFVYGDYKVYDVRKMIAKSEQEIGKATAKYFFYSNIMNFFKTEITLANGEIRKRPLIETNGETGEIVWDKGRDFATVRKVLSMPQVNIVKKTEVQTGGFSKESILPKRNSDKLIARKKDWDPKKYGGFDSPTVAYSVLVVAKVEKGKSKKLKSVKELLGITIMERSSFEKNPIDFLEAKGYKEVKKDLIIKLPKYSLFELENGRKRMLASAGELQKGNELALPSKYVNFLYLASHYEKLKGSPEDNEQKQLFVEQHKHYLDEIIEQISEFSKRVILADANLDKVLSAYNKHRDKPIREQAENIIHLFTLTNLGAPAAFKYFDTTIDRKRYTSTKEVLDATLIHQSITGLYETRIDLSQLGGDGGGGGGGSGSSGGTAPLEEEYRLFLEAPIQNVTLLEQWKREIPKVWAEINPPGLASTQAPIHVQLLSTALPVRVRQYPITLEAKRSLRETIRKFRAAGILRPVHSPWNTPLLPVRKSGTSEYRMVQDLREVNKRVETIHPTVPNPYTLLSLLPPDRIWYSVLDLKDAFFCIPLAPESQLIFAFEWADAEEGESGQLTWTRLPQGFKNSPTLFNEALNRDLQGFRLDHPSVSLLQYVDDLLIAADTQAACLSATRDLLMTLAELGYRVSGKKAQLCQEEVTYLGFKIHKGSRSLSNSRTQAILQIPVPKTKRQVREFLGTIGYCRLWIPGFAELAQPLYAATRPGNDPLVWGEKEEEAFQSLKLALTQPPALALPSLDKPFQLFVEETSGAAKGVLTQALGPWKRPVAYLSKRLDPVAAGWPRCLRAIAAAALLTREASKLTFGQDIEITSSHNLESLLRSPPDKWLTNARITQYQVLLLDPPRVRFKQTAALNPATLLPETDDTLPIHHCLDTLDSLTSTRPDLTDQPLAQAEATLFTDGSSYIRDGKRYAGAAVVTLDSVIWAEPLPIGTSAQKAELIALTKALEWSKDKSVNIYTDSRYAFATLHVHGMIYRERGWLTAGGKAIKNAPEILALLTAVWLPKRVAVMHCKGHQKDDAPTSTGNRRADEVAREVAIRPLSTQATISAGKRTADGSEFEKRTADGSEFESPKKKAKVE

SEQ ID NO: 6824 - protein, 2096 aa, synthetic construct
MPAAKRVKLDGGDKKYSIGLDIGTNSVGWAVITDEYKVPSKKFKVLGNTDRHSIKKNLIGALLFDSGETAEATRLKRTARRRYTRRKNRICYLQEIFSNEMAKVDDSFFHRLEESFLVEEDKKHERHPIFGNIVDEVAYHEKYPTIYHLRKKLVDSTDKADLRLIYLALAHMIKFRGHFLIEGDLNPDNSDVDKLFIQLVQTYNQLFEENPINASGVDAKAILSARLSKSRRLENLIAQLPGEKKNGLFGNLIALSLGLTPNFKSNFDLAEDAKLQLSKDTYDDDLDNLLAQIGDQYADLFLAAKNLSDAILLSDILRVNTEITKAPLSASMIKRYDEHHQDLTLLKALVRQQLPEKYKEIFFDQSKNGYAGYIDGGASQEEFYKFIKPILEKMDGTEELLVKLNREDLLRKQRTFDNGSIPHQIHLGELHAILRRQEDFYPFLKDNREKIEKILTFRIPYYVGPLARGNSRFAWMTRKSEETITPWNFEEVVDKGASAQSFIERMTNFDKNLPNEKVLPKHSLLYEYFTVYNELTKVKYVTEGMRKPAFLSGEQKKAIVDLLFKTNRKVTVKQLKEDYFKKIECFDSVEISGVEDRFNASLGTYHDLLKIIKDKDFLDNEENEDILEDIVLTLTLFEDREMIEERLKTYAHLFDDKVMKQLKRRRYTGWGRLSRKLINGIRDKQSGKTILDFLKSDGFANRNFMQLIHDDSLTFKEDIQKAQVSGQGDSLHEHIANLAGSPAIKKGILQTVKVVDELVKVMGRHKPENIVIEMARENQTTQKGQKNSRERMKRIEEGIKELGSQILKEHPVENTQLQNEKLYLYYLQNGRDMYVDQELDINRLSDYDVDHIVPQSFLKDDSIDNKVLTRSDKARGKSDNVPSEEVVKKMKNYWRQLLNAKLITQRKFDNLTKAERGGLSELDKAGFIKRQLVETRQITKHVAQILDSRMNTKYDENDKLIREVKVITLKSKLVSDFRKDFQFYKVREINNYHHAHDAYLNAVVGTALIKKYPKLESEFVYGDYKVYDVRKMIAKSEQEIGKATAKYFFYSNIMNFFKTEITLANGEIRKRPLIETNGETGEIVWDKGRDFATVRKVLSMPQVNIVKKTEVQTGGFSKESILPKRNSDKLIARKKDWDPKKYGGFDSPTVAYSVLVVAKVEKGKSKKLKSVKELLGITIMERSSFEKNPIDFLEAKGYKEVKKDLIIKLPKYSLFELENGRKRMLASAGELQKGNELALPSKYVNFLYLASHYEKLKGSPEDNEQKQLFVEQHKHYLDEIIEQISEFSKRVILADANLDKVLSAYNKHRDKPIREQAENIIHLFTLTNLGAPAAFKYFDTTIDRKRYTSTKEVLDATLIHQSITGLYETRIDLSQLGGDGGGGGGGSGSSGGTAPLEEEYRLFLEAPIQNVTLLEQWKREIPKVWAEINPPGLASTQAPIHVQLLSTALPVRVRQYPITLEAKRSLRETIRKFRAAGILRPVHSPWNTPLLPVRKSGTSEYRMVQDLREVNKRVETIHPTVPNPYTLLSLLPPDRIWYSVLDLKDAFFCIPLAPESQLIFAFEWADAEEGESGQLTWTRLPQGFKNSPTLFNEALNRDLQGFRLDHPSVSLLQYVDDLLIAADTQAACLSATRDLLMTLAELGYRVSGKKAQLCQEEVTYLGFKIHKGSRSLSNSRTQAILQIPVPKTKRQVREFLGKIGYCRLFIPGFAELAQPLYAATRPGNDPLVWGEKEEEAFQSLKLALTQPPALALPSLDKPFQLFVEETSGAAKGVLTQALGPWKRPVAYLSKRLDPVAAGWPRCLRAIAAAALLTREASKLTFGQDIEITSSHNLESLLRSPPDKWLTNARITQYQVLLLDPPRVRFKQTAALNPATLLPETDDTLPIHHCLDTLDSLTSTRPDLTDQPLAQAEATLFTDGSSYIRDGKRYAGAAVVTLDSVIWAEPLPIGTSAQKAELIALTKALEWSKDKSVNIYTDSRYAFATLHVHGMIYRERGWLTAGGKAIKNAPEILALLTAVWLPKRVAVMHCKGHQKDDAPTSTGNRRADEVAREVAIRPLSTQATISAGKRTADGSEFEKRTADGSEFESPKKKAKVE

SEQ ID NO: 6825 - protein, 2100 aa, synthetic construct
MPAAKRVKLDGGDKKYSIGLDIGTNSVGWAVITDEYKVPSKKFKVLGNTDRHSIKKNLIGALLFDSGETAEATRLKRTARRRYTRRKNRICYLQEIFSNEMAKVDDSFFHRLEESFLVEEDKKHERHPIFGNIVDEVAYHEKYPTIYHLRKKLVDSTDKADLRLIYLALAHMIKFRGHFLIEGDLNPDNSDVDKLFIQLVQTYNQLFEENPINASGVDAKAILSARLSKSRRLENLIAQLPGEKKNGLFGNLIALSLGLTPNFKSNFDLAEDAKLQLSKDTYDDDLDNLLAQIGDQYADLFLAAKNLSDAILLSDILRVNTEITKAPLSASMIKRYDEHHQDLTLLKALVRQQLPEKYKEIFFDQSKNGYAGYIDGGASQEEFYKFIKPILEKMDGTEELLVKLNREDLLRKQRTFDNGSIPHQIHLGELHAILRRQEDFYPFLKDNREKIEKILTFRIPYYVGPLARGNSRFAWMTRKSEETITPWNFEEVVDKGASAQSFIERMTNFDKNLPNEKVLPKHSLLYEYFTVYNELTKVKYVTEGMRKPAFLSGEQKKAIVDLLFKTNRKVTVKQLKEDYFKKIECFDSVEISGVEDRFNASLGTYHDLLKIIKDKDFLDNEENEDILEDIVLTLTLFEDREMIEERLKTYAHLFDDKVMKQLKRRRYTGWGRLSRKLINGIRDKQSGKTILDFLKSDGFANRNFMQLIHDDSLTFKEDIQKAQVSGQGDSLHEHIANLAGSPAIKKGILQTVKVVDELVKVMGRHKPENIVIEMARENQTTQKGQKNSRERMKRIEEGIKELGSQILKEHPVENTQLQNEKLYLYYLQNGRDMYVDQELDINRLSDYDVDHIVPQSFLKDDSIDNKVLTRSDKARGKSDNVPSEEVVKKMKNYWRQLLNAKLITQRKFDNLTKAERGGLSELDKAGFIKRQLVETRQITKHVAQILDSRMNTKYDENDKLIREVKVITLKSKLVSDFRKDFQFYKVREINNYHHAHDAYLNAVVGTALIKKYPKLESEFVYGDYKVYDVRKMIAKSEQEIGKATAKYFFYSNIMNFFKTEITLANGEIRKRPLIETNGETGEIVWDKGRDFATVRKVLSMPQVNIVKKTEVQTGGFSKESILPKRNSDKLIARKKDWDPKKYGGFDSPTVAYSVLVVAKVEKGKSKKLKSVKELLGITIMERSSFEKNPIDFLEAKGYKEVKKDLIIKLPKYSLFELENGRKRMLASAGELQKGNELALPSKYVNFLYLASHYEKLKGSPEDNEQKQLFVEQHKHYLDEIIEQISEFSKRVILADANLDKVLSAYNKHRDKPIREQAENIIHLFTLTNLGAPAAFKYFDTTIDRKRYTSTKEVLDATLIHQSITGLYETRIDLSQLGGDGGGGGGGSGSSGGTVSLQDEHRLFDIPVTTSLPDVWLQDFPQAWAETGGLGRAKCQAPIIIDLKPTAVPVSIKQYPMSLEAHMGIRQHIIKFLELGVLRPCRSPWNTPLLPVKKPGTQDYRPVQDLREINKRTVDIHPTVPNPYNLLSTLKPDYSWYTVLDLKDAFFCLPLAPQSQELFAFEWKDPERGISGQLTWTRLPQGFKNSPTLFNEALHRDLTDFRTQHPEVTLLQYVDDLLLAAPTKKACTQGTRHLLQELGEKGYRASAKKAQICQTKVTYLGYILSEGKRWLTPGRIETVARIPPPRNPREVREFLGTAGFCRLWIPGFAELAAPLYALTKPSTPFTWQTEHQLAFEALKKALLSAPALGLPDTSKPFTLFLDERQGIAKGVLTQKLGPWKRPVAYLSKKLDPVAAGWPPCLRIMAATAMLVKDSAKLTLGQPLTVITPHTLEAIVRQPPDRWITNARLTHYQALLLDTDRVQFGPPVTLNPATLLPVPENQPSPHDCRQVLAETHGTREDLKDQELPDADHTWYTDGSSYLDSGTRRAGAAVVDGHNTIWAQSLPPGTSAQKAELIALTKALELSKGKKANIYTDSRYAFATAHTHGSIYERRGWLTSEGKEIKNKAEIIALLKALFLPQEVAIIHCPGHQKGQDPVAVGNRQADRVARQAAMAEVLTLATEPDNTSHITAGKRTADGSEFEKRTADGSEFESPKKKAKVE

SEQ ID NO: 6826 - protein, 2093 aa, synthetic construct
MPAAKRVKLDGGDKKYSIGLDIGTNSVGWAVITDEYKVPSKKFKVLGNTDRHSIKKNLIGALLFDSGETAEATRLKRTARRRYTRRKNRICYLQEIFSNEMAKVDDSFFHRLEESFLVEEDKKHERHPIFGNIVDEVAYHEKYPTIYHLRKKLVDSTDKADLRLIYLALAHMIKFRGHFLIEGDLNPDNSDVDKLFIQLVQTYNQLFEENPINASGVDAKAILSARLSKSRRLENLIAQLPGEKKNGLFGNLIALSLGLTPNFKSNFDLAEDAKLQLSKDTYDDDLDNLLAQIGDQYADLFLAAKNLSDAILLSDILRVNTEITKAPLSASMIKRYDEHHQDLTLLKALVRQQLPEKYKEIFFDQSKNGYAGYIDGGASQEEFYKFIKPILEKMDGTEELLVKLNREDLLRKQRTFDNGSIPHQIHLGELHAILRRQEDFYPFLKDNREKIEKILTFRIPYYVGPLARGNSRFAWMTRKSEETITPWNFEEVVDKGASAQSFIERMTNFDKNLPNEKVLPKHSLLYEYFTVYNELTKVKYVTEGMRKPAFLSGEQKKAIVDLLFKTNRKVTVKQLKEDYFKKIECFDSVEISGVEDRFNASLGTYHDLLKIIKDKDFLDNEENEDILEDIVLTLTLFEDREMIEERLKTYAHLFDDKVMKQLKRRRYTGWGRLSRKLINGIRDKQSGKTILDFLKSDGFANRNFMQLIHDDSLTFKEDIQKAQVSGQGDSLHEHIANLAGSPAIKKGILQTVKVVDELVKVMGRHKPENIVIEMARENQTTQKGQKNSRERMKRIEEGIKELGSQILKEHPVENTQLQNEKLYLYYLQNGRDMYVDQELDINRLSDYDVDHIVPQSFLKDDSIDNKVLTRSDKARGKSDNVPSEEVVKKMKNYWRQLLNAKLITQRKFDNLTKAERGGLSELDKAGFIKRQLVETRQITKHVAQILDSRMNTKYDENDKLIREVKVITLKSKLVSDFRKDFQFYKVREINNYHHAHDAYLNAVVGTALIKKYPKLESEFVYGDYKVYDVRKMIAKSEQEIGKATAKYFFYSNIMNFFKTEITLANGEIRKRPLIETNGETGEIVWDKGRDFATVRKVLSMPQVNIVKKTEVQTGGFSKESILPKRNSDKLIARKKDWDPKKYGGFDSPTVAYSVLVVAKVEKGKSKKLKSVKELLGITIMERSSFEKNPIDFLEAKGYKEVKKDLIIKLPKYSLFELENGRKRMLASAGELQKGNELALPSKYVNFLYLASHYEKLKGSPEDNEQKQLFVEQHKHYLDEIIEQISEFSKRVILADANLDKVLSAYNKHRDKPIREQAENIIHLFTLTNLGAPAAFKYFDTTIDRKRYTSTKEVLDATLIHQSITGLYETRIDLSQLGGDGGGGGGGSGSSGGTLQLEEEYRLFEPESTQKQEMDIWLKNFPQAWAETGGMGTAHCQAPVLIQLKATATPISIRQYPMPHEAYQGIKPHIRRMLDQGILKPCQSPWNTPLLPVKKPGTEDYRPVQDLREVNKRVEDIHPTVPNPYNLLSTLPPSHPWYTVLDLKDAFFCLRLHSESQLLFAFEWRDPEIGLSGQLTWTRLPQGFKNSPTLFNEALHSDLADFRVRYPALVLLQYVDDLLLAAATRTECLEGTKALLETLGNKGYRASAKKAQICLQEVTYLGYSLKDGQRWLTKARKEAILSIPVPKNSRQVREFLGKAGYCRLFIPGFAELAAPLYPLTRPGTLFQWGTEQQLAFEDIKKALLSSPALGLPDITKPFELFIDENSGFAKGVLVQKLGPWKRPVAYLSKKLDTVASGWPPCLRMVAAIAILVKDAGKLTLGQPLTILTSHPVEALVRQPPNKWLSNARMTHYQAMLLDAERVHFGPTVSLNPATLLPLPSGGNHHDCLQILAETHGTRPDLTDQPLPDADLTWYTDGSSFIRNGEREAGAAVTTESEVIWAAPLPPGTSAQRAELIALTQALKMAEGKKLTVYTDSRYAFATTHVHGEIYRRRGWLTSEGKEIKNKNEILALLEALFLPKRLSIIHCPGHQKGDSPQAKGNRLADDTAKKAATETHSSLTVLPAGKRTADGSEFEKRTADGSEFESPKKKAKVE

SEQ ID NO: 6827 - protein, 2174 aa, synthetic construct
MPAAKRVKLDGGDKKYSIGLDIGTNSVGWAVITDEYKVPSKKFKVLGNTDRHSIKKNLIGALLFDSGETAEATRLKRTARRRYTRRKNRICYLQEIFSNEMAKVDDSFFHRLEESFLVEEDKKHERHPIFGNIVDEVAYHEKYPTIYHLRKKLVDSTDKADLRLIYLALAHMIKFRGHFLIEGDLNPDNSDVDKLFIQLVQTYNQLFEENPINASGVDAKAILSARLSKSRRLENLIAQLPGEKKNGLFGNLIALSLGLTPNFKSNFDLAEDAKLQLSKDTYDDDLDNLLAQIGDQYADLFLAAKNLSDAILLSDILRVNTEITKAPLSASMIKRYDEHHQDLTLLKALVRQQLPEKYKEIFFDQSKNGYAGYIDGGASQEEFYKFIKPILEKMDGTEELLVKLNREDLLRKQRTFDNGSIPHQIHLGELHAILRRQEDFYPFLKDNREKIEKILTFRIPYYVGPLARGNSRFAWMTRKSEETITPWNFEEVVDKGASAQSFIERMTNFDKNLPNEKVLPKHSLLYEYFTVYNELTKVKYVTEGMRKPAFLSGEQKKAIVDLLFKTNRKVTVKQLKEDYFKKIECFDSVEISGVEDRFNASLGTYHDLLKIIKDKDFLDNEENEDILEDIVLTLTLFEDREMIEERLKTYAHLFDDKVMKQLKRRRYTGWGRLSRKLINGIRDKQSGKTILDFLKSDGFANRNFMQLIHDDSLTFKEDIQKAQVSGQGDSLHEHIANLAGSPAIKKGILQTVKVVDELVKVMGRHKPENIVIEMARENQTTQKGQKNSRERMKRIEEGIKELGSQILKEHPVENTQLQNEKLYLYYLQNGRDMYVDQELDINRLSDYDVDHIVPQSFLKDDSIDNKVLTRSDKARGKSDNVPSEEVVKKMKNYWRQLLNAKLITQRKFDNLTKAERGGLSELDKAGFIKRQLVETRQITKHVAQILDSRMNTKYDENDKLIREVKVITLKSKLVSDFRKDFQFYKVREINNYHHAHDAYLNAVVGTALIKKYPKLESEFVYGDYKVYDVRKMIAKSEQEIGKATAKYFFYSNIMNFFKTEITLANGEIRKRPLIETNGETGEIVWDKGRDFATVRKVLSMPQVNIVKKTEVQTGGFSKESILPKRNSDKLIARKKDWDPKKYGGFDSPTVAYSVLVVAKVEKGKSKKLKSVKELLGITIMERSSFEKNPIDFLEAKGYKEVKKDLIIKLPKYSLFELENGRKRMLASAGELQKGNELALPSKYVNFLYLASHYEKLKGSPEDNEQKQLFVEQHKHYLDEIIEQISEFSKRVILADANLDKVLSAYNKHRDKPIREQAENIIHLFTLTNLGAPAAFKYFDTTIDRKRYTSTKEVLDATLIHQSITGLYETRIDLSQLGGDGGGGGGGSGSSGGMNPLQLLQPLPAEIKGTKLLAHWNSGATITCIPESFLEDEQPIKKTLIKTIHGEKQQNVYYVTFKVKGRKVEAEVIASPYEYILLSPTDVPWLTQQPLQLTILVPLQEYQEKILSKTALPEDQKQQLKTLFVKYDNLWQHWENQVGHRKIRPHNIATGDYPPRPQKQYPINPKAKPSIQIVIDDLLKQGVLTPQNSTMNTPVYPVPKPDGRWRMVLDYREVNKTIPLTAAQNQHSAGILATIVRQKYKTTLDLANGFWAHPITPESYWLTAFTWQGKQYCWTRLPQGFLNSPALFNADVVDLLKEIPNVQVYVDDIYLSHDDPKEHVQQLEKVFQILLQAGYVVSLKKSEIGQKTVEFLGFNITKEGRGLTDTFKTKLLNITPPKDLKQLQSILGKLNFARNFIPNFAELVQPLYNLIAPAKGKYIEWSEENTKQLNMVIEALNTASNLEERLPEQRLVIKVNTSPSAGYVRYYNETGKKPIMYLNYVFSKAELKFSMLEKLLTTMHKALIKAMDLAMGQEILVYSPIVSMTKIQKTPLPERKALPIRWITWMTYLEDPRIQFHYDKTLPELKHIPDVYTSSQSPVKHPSQYEGVFYTDGSAIKSPDPTKSNNAGMGIVHATYKPEYQVLNQWSIPLGNHTAQMAEIAAVEFACKKALKIPGPVLVITDSFYVAESANKELPYWKSNGFVNNKKKPLKHISKWKSIAECLSMKPDITIQHEKGISLQIPVFILKGNALADKLATQGSYVVNAGKRTADGSEFEKRTADGSEFESPKKKAKVE

SEQ ID NO: 6828 - protein, 2125 aa, synthetic construct
MPAAKRVKLDGGDKKYSIGLDIGTNSVGWAVITDEYKVPSKKFKVLGNTDRHSIKKNLIGALLFDSGETAEATRLKRTARRRYTRRKNRICYLQEIFSNEMAKVDDSFFHRLEESFLVEEDKKHERHPIFGNIVDEVAYHEKYPTIYHLRKKLVDSTDKADLRLIYLALAHMIKFRGHFLIEGDLNPDNSDVDKLFIQLVQTYNQLFEENPINASGVDAKAILSARLSKSRRLENLIAQLPGEKKNGLFGNLIALSLGLTPNFKSNFDLAEDAKLQLSKDTYDDDLDNLLAQIGDQYADLFLAAKNLSDAILLSDILRVNTEITKAPLSASMIKRYDEHHQDLTLLKALVRQQLPEKYKEIFFDQSKNGYAGYIDGGASQEEFYKFIKPILEKMDGTEELLVKLNREDLLRKQRTFDNGSIPHQIHLGELHAILRRQEDFYPFLKDNREKIEKILTFRIPYYVGPLARGNSRFAWMTRKSEETITPWNFEEVVDKGASAQSFIERMTNFDKNLPNEKVLPKHSLLYEYFTVYNELTKVKYVTEGMRKPAFLSGEQKKAIVDLLFKTNRKVTVKQLKEDYFKKIECFDSVEISGVEDRFNASLGTYHDLLKIIKDKDFLDNEENEDILEDIVLTLTLFEDREMIEERLKTYAHLFDDKVMKQLKRRRYTGWGRLSRKLINGIRDKQSGKTILDFLKSDGFANRNFMQLIHDDSLTFKEDIQKAQVSGQGDSLHEHIANLAGSPAIKKGILQTVKVVDELVKVMGRHKPENIVIEMARENQTTQKGQKNSRERMKRIEEGIKELGSQILKEHPVENTQLQNEKLYLYYLQNGRDMYVDQELDINRLSDYDVDHIVPQSFLKDDSIDNKVLTRSDKARGKSDNVPSEEVVKKMKNYWRQLLNAKLITQRKFDNLTKAERGGLSELDKAGFIKRQLVETRQITKHVAQILDSRMNTKYDENDKLIREVKVITLKSKLVSDFRKDFQFYKVREINNYHHAHDAYLNAVVGTALIKKYPKLESEFVYGDYKVYDVRKMIAKSEQEIGKATAKYFFYSNIMNFFKTEITLANGEIRKRPLIETNGETGEIVWDKGRDFATVRKVLSMPQVNIVKKTEVQTGGFSKESILPKRNSDKLIARKKDWDPKKYGGFDSPTVAYSVLVVAKVEKGKSKKLKSVKELLGITIMERSSFEKNPIDFLEAKGYKEVKKDLIIKLPKYSLFELENGRKRMLASAGELQKGNELALPSKYVNFLYLASHYEKLKGSPEDNEQKQLFVEQHKHYLDEIIEQISEFSKRVILADANLDKVLSAYNKHRDKPIREQAENIIHLFTLTNLGAPAAFKYFDTTIDRKRYTSTKEVLDATLIHQSITGLYETRIDLSQLGGDGGGGGGGSGSSGGLLGRDLLTKLKAQIQFSTEGPQVTWEDRPAMCLVLNLEEEYRLHEKPVPPSIDPSWLQLFPMVWAEKAGMGLANQVPPVVVELKSDASPVAVRQYPMSKEAREGIRPHIQRFLDLGILVPCQSPWNTPLLPVKKPGTNDYRPVQDLREVNKRVQDIHPTVPNPYNLLSSLPPSHTWYSVLDLKDAFFCLKLHPNSQPLFAFEWRDPEKGNTGQLTWTRLPQGFKNSPTLFNEALHRDLASFRALNPQVVMLQYVDDLLVAAPTYRDCKEGTRRLLQELSKLGYRVSAKKAQLCREEVTYLGYLLKGGKRWLTPARKATVMKIPTPTTPRQVREFLGTAGFCRLWIPGFASLAAPLYPLTRPKVPFTWTEAHQEAFGRIKEALLSAPALALPDLTKPFALYVDEKEGVARGVLTQTLGPWRRPVAYLSKKLDPVASGWPTCLKAIAAVALLLKDADKLTLGQNVLVIAPHNLESIVRQPPDRWMTNARMTHYQSLLLNERVSFAPPAILNPATLLPVESDDTPIHICSEILAEETGTRPDLRDQPLPGVPAWYTDGSSFIMDGRRQAGAAIVDNKRTVWASNLPEGTSAQKAELIALTQALRLAEGKSINIYTDSRYAFATAHVHGAIYKQRGWLTSAGKDIKNKEEILALLEAIHLPKRVAIIHCPGHQRGTDPVATGNRKADEAAKQAAQSTRILTETTKNAGKRTADGSEFEKRTADGSEFESPKKKAKVE

SEQ ID NO: 6829 - protein, 2125 aa, synthetic construct
MPAAKRVKLDGGDKKYSIGLDIGTNSVGWAVITDEYKVPSKKFKVLGNTDRHSIKKNLIGALLFDSGETAEATRLKRTARRRYTRRKNRICYLQEIFSNEMAKVDDSFFHRLEESFLVEEDKKHERHPIFGNIVDEVAYHEKYPTIYHLRKKLVDSTDKADLRLIYLALAHMIKFRGHFLIEGDLNPDNSDVDKLFIQLVQTYNQLFEENPINASGVDAKAILSARLSKSRRLENLIAQLPGEKKNGLFGNLIALSLGLTPNFKSNFDLAEDAKLQLSKDTYDDDLDNLLAQIGDQYADLFLAAKNLSDAILLSDILRVNTEITKAPLSASMIKRYDEHHQDLTLLKALVRQQLPEKYKEIFFDQSKNGYAGYIDGGASQEEFYKFIKPILEKMDGTEELLVKLNREDLLRKQRTFDNGSIPHQIHLGELHAILRRQEDFYPFLKDNREKIEKILTFRIPYYVGPLARGNSRFAWMTRKSEETITPWNFEEVVDKGASAQSFIERMTNFDKNLPNEKVLPKHSLLYEYFTVYNELTKVKYVTEGMRKPAFLSGEQKKAIVDLLFKTNRKVTVKQLKEDYFKKIECFDSVEISGVEDRFNASLGTYHDLLKIIKDKDFLDNEENEDILEDIVLTLTLFEDREMIEERLKTYAHLFDDKVMKQLKRRRYTGWGRLSRKLINGIRDKQSGKTILDFLKSDGFANRNFMQLIHDDSLTFKEDIQKAQVSGQGDSLHEHIANLAGSPAIKKGILQTVKVVDELVKVMGRHKPENIVIEMARENQTTQKGQKNSRERMKRIEEGIKELGSQILKEHPVENTQLQNEKLYLYYLQNGRDMYVDQELDINRLSDYDVDHIVPQSFLKDDSIDNKVLTRSDKARGKSDNVPSEEVVKKMKNYWRQLLNAKLITQRKFDNLTKAERGGLSELDKAGFIKRQLVETRQITKHVAQILDSRMNTKYDENDKLIREVKVITLKSKLVSDFRKDFQFYKVREINNYHHAHDAYLNAVVGTALIKKYPKLESEFVYGDYKVYDVRKMIAKSEQEIGKATAKYFFYSNIMNFFKTEITLANGEIRKRPLIETNGETGEIVWDKGRDFATVRKVLSMPQVNIVKKTEVQTGGFSKESILPKRNSDKLIARKKDWDPKKYGGFDSPTVAYSVLVVAKVEKGKSKKLKSVKELLGITIMERSSFEKNPIDFLEAKGYKEVKKDLIIKLPKYSLFELENGRKRMLASAGELQKGNELALPSKYVNFLYLASHYEKLKGSPEDNEQKQLFVEQHKHYLDEIIEQISEFSKRVILADANLDKVLSAYNKHRDKPIREQAENIIHLFTLTNLGAPAAFKYFDTTIDRKRYTSTKEVLDATLIHQSITGLYETRIDLSQLGGDGGGGGGGSGSSGGLLGRDLLTKLKAQIQFSTEGPQVTWEDRPAMCLVLNLEEEYRLHEKPVPPSIDPSWLQLFPMVWAEKAGMGLANQVPPVVVELKSDASPVAVRQYPMSKEAREGIRPHIQRFLDLGILVPCQSPWNTPLLPVKKPGTNDYRPVQDLREVNKRVQDIHPTVPNPYNLLSSLPPSHTWYSVLDLKDAFFCLKLHPNSQPLFAFEWRDPEKGNTGQLTWTRLPQGFKNSPTLFNEALHRDLASFRALNPQVVMLQYVDDLLVAAPTYRDCKEGTRRLLQELSKLGYRVSAKKAQLCREEVTYLGYLLKGGKRWLTPARKATVMKIPTPTTPRQVREFLGKAGFCRLFIPGFASLAAPLYPLTRPKVPFTWTEAHQEAFGRIKEALLSAPALALPDLTKPFALYVDEKEGVARGVLTQTLGPWRRPVAYLSKKLDPVASGWPTCLKAIAAVALLLKDADKLTLGQNVLVIAPHNLESIVRQPPDRWMTNARMTHYQSLLLNERVSFAPPAILNPATLLPVESDDTPIHICSEILAEETGTRPDLRDQPLPGVPAWYTDGSSFIMDGRRQAGAAIVDNKRTVWASNLPEGTSAQKAELIALTQALRLAEGKSINIYTDSRYAFATAHVHGAIYKQRGWLTSAGKDIKNKEEILALLEAIHLPKRVAIIHCPGHQRGTDPVATGNRKADEAAKQAAQSTRILTETTKNAGKRTADGSEFEKRTADGSEFESPKKKAKVE

SEQ ID NO: 6830 - protein, 2094 aa, synthetic construct
MPAAKRVKLDGGDKKYSIGLDIGTNSVGWAVITDEYKVPSKKFKVLGNTDRHSIKKNLIGALLFDSGETAEATRLKRTARRRYTRRKNRICYLQEIFSNEMAKVDDSFFHRLEESFLVEEDKKHERHPIFGNIVDEVAYHEKYPTIYHLRKKLVDSTDKADLRLIYLALAHMIKFRGHFLIEGDLNPDNSDVDKLFIQLVQTYNQLFEENPINASGVDAKAILSARLSKSRRLENLIAQLPGEKKNGLFGNLIALSLGLTPNFKSNFDLAEDAKLQLSKDTYDDDLDNLLAQIGDQYADLFLAAKNLSDAILLSDILRVNTEITKAPLSASMIKRYDEHHQDLTLLKALVRQQLPEKYKEIFFDQSKNGYAGYIDGGASQEEFYKFIKPILEKMDGTEELLVKLNREDLLRKQRTFDNGSIPHQIHLGELHAILRRQEDFYPFLKDNREKIEKILTFRIPYYVGPLARGNSRFAWMTRKSEETITPWNFEEVVDKGASAQSFIERMTNFDKNLPNEKVLPKHSLLYEYFTVYNELTKVKYVTEGMRKPAFLSGEQKKAIVDLLFKTNRKVTVKQLKEDYFKKIECFDSVEISGVEDRFNASLGTYHDLLKIIKDKDFLDNEENEDILEDIVLTLTLFEDREMIEERLKTYAHLFDDKVMKQLKRRRYTGWGRLSRKLINGIRDKQSGKTILDFLKSDGFANRNFMQLIHDDSLTFKEDIQKAQVSGQGDSLHEHIANLAGSPAIKKGILQTVKVVDELVKVMGRHKPENIVIEMARENQTTQKGQKNSRERMKRIEEGIKELGSQILKEHPVENTQLQNEKLYLYYLQNGRDMYVDQELDINRLSDYDVDHIVPQSFLKDDSIDNKVLTRSDKARGKSDNVPSEEVVKKMKNYWRQLLNAKLITQRKFDNLTKAERGGLSELDKAGFIKRQLVETRQITKHVAQILDSRMNTKYDENDKLIREVKVITLKSKLVSDFRKDFQFYKVREINNYHHAHDAYLNAVVGTALIKKYPKLESEFVYGDYKVYDVRKMIAKSEQEIGKATAKYFFYSNIMNFFKTEITLANGEIRKRPLIETNGETGEIVWDKGRDFATVRKVLSMPQVNIVKKTEVQTGGFSKESILPKRNSDKLIARKKDWDPKKYGGFDSPTVAYSVLVVAKVEKGKSKKLKSVKELLGITIMERSSFEKNPIDFLEAKGYKEVKKDLIIKLPKYSLFELENGRKRMLASAGELQKGNELALPSKYVNFLYLASHYEKLKGSPEDNEQKQLFVEQHKHYLDEIIEQISEFSKRVILADANLDKVLSAYNKHRDKPIREQAENIIHLFTLTNLGAPAAFKYFDTTIDRKRYTSTKEVLDATLIHQSITGLYETRIDLSQLGGDGGGGGGGSGSSGGTLNIEDEYRLHETSKGPDVPLGSTWLSDFPQAWAETGGMGLAVRQAPLIIPLKATSTPVSIKQYPMSQEARLGIKPHIQRLLDQGILVPCQSPWNTPLLPVKKPGTNDYRPVQDLREVNKRVEDIHPTVPNPYNLLSGLPPSHQWYTVLDLKDAFFCLRLHPTSQSLFAFEWRDPEMGISGQLTWTRLPQGFKNSPTLFNEALHRDLADFRIQHPDLILLQYVDDLLLAATSELDCQQGTRALLQTLGDLGYRASAKKAQICQKQVKYLGYLLKEGQRWLTEARKETVMGQPTPKTPRQLREFLGTAGFCRLWIPGFAEMAAPLYPLTKPGTLFEWGPDQQKAYQEIKQALLTAPALGLPDLTKPFELFVDEKQGYAKGVLTQKLGPWRRPVAYLSKKLDPVAAGWPPCLRMVAAIAVLTKDAGKLTMGQPLVILAPHAVEALVKQPPDRWLSNARMTHYQALLLDTDRVQFGPIVALNPATLLPLPEEGLQHDCLDILAEAHGTRPDLTDQPLPDADHTWYTDGSSFLQEGQRKAGAAVTTETEVVWAKALPAGTSAQRAELIALTQALKMAEGKKLNVYTDSRYAFATAHIHGEIYRRRGWLTSEGKEIKNKDEILALLKALFLPKRLSIIHCPGHQKGNRAEARGNRMADQAAREVATRETPETSTLLAGKRTADGSEFEKRTADGSEFESPKKKAKVE

SEQ ID NO: 6831 - protein, 2094 aa, synthetic construct
MPAAKRVKLDGGDKKYSIGLDIGTNSVGWAVITDEYKVPSKKFKVLGNTDRHSIKKNLIGALLFDSGETAEATRLKRTARRRYTRRKNRICYLQEIFSNEMAKVDDSFFHRLEESFLVEEDKKHERHPIFGNIVDEVAYHEKYPTIYHLRKKLVDSTDKADLRLIYLALAHMIKFRGHFLIEGDLNPDNSDVDKLFIQLVQTYNQLFEENPINASGVDAKAILSARLSKSRRLENLIAQLPGEKKNGLFGNLIALSLGLTPNFKSNFDLAEDAKLQLSKDTYDDDLDNLLAQIGDQYADLFLAAKNLSDAILLSDILRVNTEITKAPLSASMIKRYDEHHQDLTLLKALVRQQLPEKYKEIFFDQSKNGYAGYIDGGASQEEFYKFIKPILEKMDGTEELLVKLNREDLLRKQRTFDNGSIPHQIHLGELHAILRRQEDFYPFLKDNREKIEKILTFRIPYYVGPLARGNSRFAWMTRKSEETITPWNFEEVVDKGASAQSFIERMTNFDKNLPNEKVLPKHSLLYEYFTVYNELTKVKYVTEGMRKPAFLSGEQKKAIVDLLFKTNRKVTVKQLKEDYFKKIECFDSVEISGVEDRFNASLGTYHDLLKIIKDKDFLDNEENEDILEDIVLTLTLFEDREMIEERLKTYAHLFDDKVMKQLKRRRYTGWGRLSRKLINGIRDKQSGKTILDFLKSDGFANRNFMQLIHDDSLTFKEDIQKAQVSGQGDSLHEHIANLAGSPAIKKGILQTVKVVDELVKVMGRHKPENIVIEMARENQTTQKGQKNSRERMKRIEEGIKELGSQILKEHPVENTQLQNEKLYLYYLQNGRDMYVDQELDINRLSDYDVDHIVPQSFLKDDSIDNKVLTRSDKARGKSDNVPSEEVVKKMKNYWRQLLNAKLITQRKFDNLTKAERGGLSELDKAGFIKRQLVETRQITKHVAQILDSRMNTKYDENDKLIREVKVITLKSKLVSDFRKDFQFYKVREINNYHHAHDAYLNAVVGTALIKKYPKLESEFVYGDYKVYDVRKMIAKSEQEIGKATAKYFFYSNIMNFFKTEITLANGEIRKRPLIETNGETGEIVWDKGRDFATVRKVLSMPQVNIVKKTEVQTGGFSKESILPKRNSDKLIARKKDWDPKKYGGFDSPTVAYSVLVVAKVEKGKSKKLKSVKELLGITIMERSSFEKNPIDFLEAKGYKEVKKDLIIKLPKYSLFELENGRKRMLASAGELQKGNELALPSKYVNFLYLASHYEKLKGSPEDNEQKQLFVEQHKHYLDEIIEQISEFSKRVILADANLDKVLSAYNKHRDKPIREQAENIIHLFTLTNLGAPAAFKYFDTTIDRKRYTSTKEVLDATLIHQSITGLYETRIDLSQLGGDGGGGGGGSGSSGGTLNIEDEHRLHETSKEPDVSLGSTWLSDFPQAWAETGGMGLAVRQAPLIIPLKATSTPVSIKQYPMSQEARLGIKPHIQRLLDQGILVPCQSPWNTPLLPVKKPGTNDYRPVQDLREVNKRVEDIHPTVPNPYNLLSGLPPSHQWYTVLDLKDAFFCLRLHPTSQPLFAFEWRDPEMGISGQLTWTRLPQGFKNSPTLFNEALHRDLADFRIQHPDLILLQYVDDLLLAATSELDCQQGTRALLQTLGNLGYRASAKKAQICQKQVKYLGYLLKEGQRWLTEARKETVMGQPTPKTPRQLREFLGTAGFCRLWIPGFAEMAAPLYPLTKPGTLFNWGPDQQKAYQEIKQALLTAPALGLPDLTKPFELFVDEKQGYAKGVLTQKLGPWRRPVAYLSKKLDPVAAGWPPCLRMVAAIAVLTKDAGKLTMGQPLVILAPHAVEALVKQPPDRWLSNARMTHYQALLLDTDRVQFGPVVALNPATLLPLPEEGLQHNCLDILAEAHGTRPDLTDQPLPDADHTWYTDGSSLLQEGQRKAGAAVTTETEVIWAKALPAGTSAQRAELIALTQALKMAEGKKLNVYTDSRYAFATAHIHGEIYRRRGWLTSEGKEIKNKDEILALLKALFLPKRLSIIHCPGHQKGHSAEARGNRMADQAARKAAITETPDTSTLLAGKRTADGSEFEKRTADGSEFESPKKKAKVE

SEQ ID NO: 6832 - protein, 2094 aa, synthetic construct; identical to SEQ ID NO: 6831

SEQ ID NO: 6833 - protein, 2086 aa, synthetic construct
MPAAKRVKLDGGDKKYSIGLDIGTNSVGWAVITDEYKVPSKKFKVLGNTDRHSIKKNLIGALLFDSGETAEATRLKRTARRRYTRRKNRICYLQEIFSNEMAKVDDSFFHRLEESFLVEEDKKHERHPIFGNIVDEVAYHEKYPTIYHLRKKLVDSTDKADLRLIYLALAHMIKFRGHFLIEGDLNPDNSDVDKLFIQLVQTYNQLFEENPINASGVDAKAILSARLSKSRRLENLIAQLPGEKKNGLFGNLIALSLGLTPNFKSNFDLAEDAKLQLSKDTYDDDLDNLLAQIGDQYADLFLAAKNLSDAILLSDILRVNTEITKAPLSASMIKRYDEHHQDLTLLKALVRQQLPEKYKEIFFDQSKNGYAGYIDGGASQEEFYKFIKPILEKMDGTEELLVKLNREDLLRKQRTFDNGSIPHQIHLGELHAILRRQEDFYPFLKDNREKIEKILTFRIPYYVGPLARGNSRFAWMTRKSEETITPWNFEEVVDKGASAQSFIERMTNFDKNLPNEKVLPKHSLLYEYFTVYNELTKVKYVTEGMRKPAFLSGEQKKAIVDLLFKTNRKVTVKQLKEDYFKKIECFDSVEISGVEDRFNASLGTYHDLLKIIKDKDFLDNEENEDILEDIVLTLTLFEDREMIEERLKTYAHLFDDKVMKQLKRRRYTGWGRLSRKLINGIRDKQSGKTILDFLKSDGFANRNFMQLIHDDSLTFKEDIQKAQVSGQGDSLHEHIANLAGSPAIKKGILQTVKVVDELVKVMGRHKPENIVIEMARENQTTQKGQKNSRERMKRIEEGIKELGSQILKEHPVENTQLQNEKLYLYYLQNGRDMYVDQELDINRLSDYDVDHIVPQSFLKDDSIDNKVLTRSDKARGKSDNVPSEEVVKKMKNYWRQLLNAKLITQRKFDNLTKAERGGLSELDKAGFIKRQLVETRQITKHVAQILDSRMNTKYDENDKLIREVKVITLKSKLVSDFRKDFQFYKVREINNYHHAHDAYLNAVVGTALIKKYPKLESEFVYGDYKVYDVRKMIAKSEQEIGKATAKYFFYSNIMNFFKTEITLANGEIRKRPLIETNGETGEIVWDKGRDFATVRKVLSMPQVNIVKKTEVQTGGFSKESILPKRNSDKLIARKKDWDPKKYGGFDSPTVAYSVLVVAKVEKGKSKKLKSVKELLGITIMERSSFEKNPIDFLEAKGYKEVKKDLIIKLPKYSLFELENGRKRMLASAGELQKGNELALPSKYVNFLYLASHYEKLKGSPEDNEQKQLFVEQHKHYLDEIIEQISEFSKRVILADANLDKVLSAYNKHRDKPIREQAENIIHLFTLTNLGAPAAFKYFDTTIDRKRYTSTKEVLDATLIHQSITGLYETRIDLSQLGGDGGGGGGGSGSSGGLDDEYRLYSPLVKPDQNIQFWLEQFPQAWAETAGMGLAKQVPPQVIQLKASATPVSVRQYPLSKEAQEGIRPHVQRLIQQGILVPVQSPWNTPLLPVRKPGTNDYRPVQDLREVNKRVQDIHPTVPNPYNLLCALPPQRSWYTVLDLKDAFFCLRLHPTSQPLFAFEWRDPGTGRTGQLTWTRLPQGFKNSPTIFNEALHRDLANFRIQHPQVTLLQYVDDLLLAGATKQDCLEGTKALLLELSDLGYRASAKKAQICRREVTYLGYSLRDGQRWLTEARKKTVVQIPAPTTAKQVREFLGKAGFCRLFIPGFATLAAPLYPLTKPKGEFSWAPEHQKAFDAIKKALLSAPALALPDVTKPFTLYVDERKGVARGVLTQTLGPWRRPVAYLSKKLDPVASGWPVCLKAIAAVAILVKDADKLTLGQNITVIAPHALENIVRQPPDRWMTNARMTHYQSLLLTERVTFAPPAALNPATLLPEETDEPVTHDCHQLLIEETGVRKDLTDIPLTGEVLTWFTDGSSYVVEGKRMAGAAVVDGTRTIWASSLPEGTSAQKAELMALTQALRLAEGKSINIYTDSRYAFATAHVHGAIYKQRGWLTSAGREIKNKEEILSLLEALHLPKRLAIIHCPGHQKAKDPISRGNQMADRVAKQAAQGVNLLPAGKRTADGSEFEKRTADGSEFESPKKKAKVE

SEQ ID NO: 6834 - protein, 2086 aa, synthetic construct; identical to SEQ ID NO: 6833

SEQ ID NO: 6835 - protein, 2088 aa, synthetic construct
MPAAKRVKLDGGDKKYSIGLDIGTNSVGWAVITDEYKVPSKKFKVLGNTDRHSIKKNLIGALLFDSGETAEATRLKRTARRRYTRRKNRICYLQEIFSNEMAKVDDSFFHRLEESFLVEEDKKHERHPIFGNIVDEVAYHEKYPTIYHLRKKLVDSTDKADLRLIYLALAHMIKFRGHFLIEGDLNPDNSDVDKLFIQLVQTYNQLFEENPINASGVDAKAILSARLSKSRRLENLIAQLPGEKKNGLFGNLIALSLGLTPNFKSNFDLAEDAKLQLSKDTYDDDLDNLLAQIGDQYADLFLAAKNLSDAILLSDILRVNTEITKAPLSASMIKRYDEHHQDLTLLKALVRQQLPEKYKEIFFDQSKNGYAGYIDGGASQEEFYKFIKPILEKMDGTEELLVKLNREDLLRKQRTFDNGSIPHQIHLGELHAILRRQEDFYPFLKDNREKIEKILTFRIPYYVGPLARGNSRFAWMTRKSEETITPWNFEEVVDKGASAQSFIERMTNFDKNLPNEKVLPKHSLLYEYFTVYNELTKVKYVTEGMRKPAFLSGEQKKAIVDLLFKTNRKVTVKQLKEDYFKKIECFDSVEISGVEDRFNASLGTYHDLLKIIKDKDFLDNEENEDILEDIVLTLTLFEDREMIEERLKTYAHLFDDKVMKQLKRRRYTGWGRLSRKLINGIRDKQSGKTILDFLKSDGFANRNFMQLIHDDSLTFKEDIQKAQVSGQGDSLHEHIANLAGSPAIKKGILQTVKVVDELVKVMGRHKPENIVIEMARENQTTQKGQKNSRERMKRIEEGIKELGSQILKEHPVENTQLQNEKLYLYYLQNGRDMYVDQELDINRLSDYDVDHIVPQSFLKDDSIDNKVLTRSDKARGKSDNVPSEEVVKKMKNYWRQLLNAKLITQRKFDNLTKAERGGLSELDKAGFIKRQLVETRQITKHVAQILDSRMNTKYDENDKLIREVKVITLKSKLVSDFRKDFQFYKVREINNYHHAHDAYLNAVVGTALIKKYPKLESEFVYGDYKVYDVRKMIAKSEQEIGKATAKYFFYSNIMNFFKTEITLANGEIRKRPLIETNGETGEIVWDKGRDFATVRKVLSMPQVNIVKKTEVQTGGFSKESILPKRNSDKLIARKKDWDPKKYGGFDSPTVAYSVLVVAKVEKGKSKKLKSVKELLGITIMERSSFEKNPIDFLEAKGYKEVKKDLIIKLPKYSLFELENGRKRMLASAGELQKGNELALPSKYVNFLYLASHYEKLKGSPEDNEQKQLFVEQHKHYLDEIIEQISEFSKRVILADANLDKVLSAYNKHRDKPIREQAENIIHLFTLTNLGAPAAFKYFDTTIDRKRYTSTKEVLDATLIHQSITGLYETRIDLSQLGGDGGGGGGGSGSSGGTLQLDDEYRLYSPLVKPDQNIQFWLEQFPQAWAETAGMGLAKQVPPQVIQLKASATPVSVRQYPLSKEAQEGIRPHVQRLIQQGILVPVQSPWNTPLLPVRKPGTNDYRPVQDLREVNKRVQDIHPTVPNPYNLLCALPPQRSWYTVLDLKDAFFCLRLHPTSQPLFAFEWRDPGTGRTGQLTWTRLPQGFKNSPTIFDEALHRDLANFRIQHPQVTLLQYVDDLLLAGATKQDCLEGTKALLLELSDLGYRASAKKAQICRREVTYLGYSLRDGQRWLTEARKKTVVQIPAPTTAKQVREFLGTAGFCRLWIPGFATLAAPLYPLTKEKGEFSWAPEHQKAFDAIKKALLSAPALALPDVTKPFTLYVDERKGVARGVLTQTLGPWRRPVAYLSKKLDPVASGWPVCLKAIAAVAILVKDADKLTLGQNITVIAPHALENIVRQPPDRWMTNARMTHYQSLLLTERVTFAPPAALNPATLLPEETDEPVTHDCHQLLIEETGVRKDLTDIPLTGEVLTWFTDGSSYVVEGKRMAGAAVVDGTRTIWASSLPEGTSAQKAELMALTQALRLAEGKSINIYTDSRYAFATAHVHGAIYKQRGLLTSAGREIKNKEEILSLLEALHLPKRLAIIHCPGHQKAKDPISRGNQMADRVAKQAAQGVNLLAGKRTADGSEFEKRTADGSEFESPKKKAKVE

SEQ ID NO: 6836 - protein, 2085 aa, synthetic construct
MPAAKRVKLDGGDKKYSIGLDIGTNSVGWAVITDEYKVPSKKFKVLGNTDRHSIKKNLIGALLFDSGETAEATRLKRTARRRYTRRKNRICYLQEIFSNEMAKVDDSFFHRLEESFLVEEDKKHERHPIFGNIVDEVAYHEKYPTIYHLRKKLVDSTDKADLRLIYLALAHMIKFRGHFLIEGDLNPDNSDVDKLFIQLVQTYNQLFEENPINASGVDAKAILSARLSKSRRLENLIAQLPGEKKNGLFGNLIALSLGLTPNFKSNFDLAEDAKLQLSKDTYDDDLDNLLAQIGDQYADLFLAAKNLSDAILLSDILRVNTEITKAPLSASMIKRYDEHHQDLTLLKALVRQQLPEKYKEIFFDQSKNGYAGYIDGGASQEEFYKFIKPILEKMDGTEELLVKLNREDLLRKQRTFDNGSIPHQIHLGELHAILRRQEDFYPFLKDNREKIEKILTFRIPYYVGPLARGNSRFAWMTRKSEETITPWNFEEVVDKGASAQSFIERMTNFDKNLPNEKVLPKHSLLYEYFTVYNELTKVKYVTEGMRKPAFLSGEQKKAIVDLLFKTNRKVTVKQLKEDYFKKIECFDSVEISGVEDRFNASLGTYHDLLKIIKDKDFLDNEENEDILEDIVLTLTLFEDREMIEERLKTYAHLFDDKVMKQLKRRRYTGWGRLSRKLINGIRDKQSGKTILDFLKSDGFANRNFMQLIHDDSLTFKEDIQKAQVSGQGDSLHEHIANLAGSPAIKKGILQTVKVVDELVKVMGRHKPENIVIEMARENQTTQKGQKNSRERMKRIEEGIKELGSQILKEHPVENTQLQNEKLYLYYLQNGRDMYVDQELDINRLSDYDVDHIVPQSFLKDDSIDNKVLTRSDKARGKSDNVPSEEVVKKMKNYWRQLLNAKLITQRKFDNLTKAERGGLSELDKAGFIKRQLVETRQITKHVAQILDSRMNTKYDENDKLIREVKVITLKSKLVSDFRKDFQFYKVREINNYHHAHDAYLNAVVGTALIKKYPKLESEFVYGDYKVYDVRKMIAKSEQEIGKATAKYFFYSNIMNFFKTEITLANGEIRKRPLIETNGETGEIVWDKGRDFATVRKVLSMPQVNIVKKTEVQTGGFSKESILPKRNSDKLIARKKDWDPKKYGGFDSPTVAYSVLVVAKVEKGKSKKLKSVKELLGITIMERSSFEKNPIDFLEAKGYKEVKKDLIIKLPKYSLFELENGRKRMLASAGELQKGNELALPSKYVNFLYLASHYEKLKGSPEDNEQKQLFVEQHKHYLDEIIEQISEFSKRVILADANLDKVLSAYNKHRDKPIREQAENIIHLFTLTNLGAPAAFKYFDTTIDRKRYTSTKEVLDATLIHQSITGLYETRIDLSQLGGDGGGGGGGSGSSGGVPWLMKKPLQLTVLVPLHEYQERLLQQTALPKEQKELLQKLFLKYDALWQHWENQVGHRRIKPHNIATGTLAPRPQKQYPINPKAKPSIQIVIDDLLKQGVLIQQNSTMNTPVYPVPKPDGKWRMVLDYREVNKTIPLIAAQNQHSAGILSSIYRGKYKTTLDLTNGFWAHPITPESYWLTAFTWQGKQYCWTRLPQGFLNSPALFTADVVDLLKEIPNVQAYVDDIYISHDDPQEHLEQLEKIFSILLNAGYVVSLKKSEIAQREVEFLGFNITKEGRGLTDTFKQKLLNITPPKDLKQLQSILGLLNFARNFIPNYSELVKPLYTIVANANGKFISWTEDNSNQLQHIISVLNQADNLEERNPETRLIIKVNSSPSAGYIRYYNEGSKRPIMYVNYIFSKAEAKFTQTEKLLTTMHKGLIKAMDLAMGQEILVYSPIVSMTKIQRTPLPERKALPVRWITWMTYLEDPRIQFHYDKSLPELQQIPNVTEDVIAKTKHPSEFAMVFYTDGSAIKHPDVNKSHSAGMGIAQVQFIPEYKIVHQWSIPLGDHTAQLAEIAAVEFACKKALKISGPVLIVTDSFYVAESANKELPYWKSNGFLNNKKKPLRHVSKWKSIAECLQLKPDIIIMHEKGHQQPMTTLHTEGNNLADKLATQGSYVVHAGKRTADGSEFEKRTADGSEFESPKKKAKVE

SEQ ID NO: 6837 - protein, 2085 aa, synthetic construct
MPAAKRVKLDGGDKKYSIGLDIGTNSVGWAVITDEYKVPSKKFKVLGNTDRHSIKKNLIGALLFDSGETAEATRLKRTARRRYTRRKNRICYLQEIFSNEMAKVDDSFFHRLEESFLVEEDKKHERHPIFGNIVDEVAYHEKYPTIYHLRKKLVDSTDKADLRLIYLALAHMIKFRGHFLIEGDLNPDNSDVDKLFIQLVQTYNQLFEENPINASGVDAKAILSARLSKSRRLENLIAQLPGEKKNGLFGNLIALSLGLTPNFKSNFDLAEDAKLQLSKDTYDDDLDNLLAQIGDQYADLFLAAKNLSDAILLSDILRVNTEITKAPLSASMIKRYDEHHQDLTLLKALVRQQLPEKYKEIFFDQSKNGYAGYIDGGASQEEFYKFIKPILEKMDGTEELLVKLNREDLLRKQRTFDNGSIPHQIHLGELHAILRRQEDFYPFLKDNREKIEKILTFRIPYYVGPLARGNSRFAWMTRKSEETITPWNFEEVVDKGASAQSFIERMTNFDKNLPNEKVLPKHSLLYEYFTVYNELTKVKYVTEGMRKPAFLSGEQKKAIVDLLFKTNRKVTVKQLKEDYFKKIECFDSVEISGVEDRFNASLGTYHDLLKIIKDKDFLDNEENEDILEDIVLTLTLFEDREMIEERLKTYAHLFDDKVMKQLKRRRYTGWGRLSRKLINGIRDKQSGKTILDFLKSDGFANRNFMQLIHDDSLTFKEDIQKAQVSGQGDSLHEHIANLAGSPAIKKGILQTVKVVDELVKVMGRHKPENIVIEMARENQTTQKGQKNSRERMKRIEEGIKELGSQILKEHPVENTQLQNEKLYLYYLQNGRDMYVDQELDINRLSDYDVDHIVPQSFLKDDSIDNKVLTRSDKARGKSDNVPSEEVVKKMKNYWRQLLNAKLITQRKFDNLTKAERGGLSELDKAGFIKRQLVETRQITKHVAQILDSRMNTKYDENDKLIREVKVITLKSKLVSDFRKDFQFYKVREINNYHHAHDAYLNAVVGTALIKKYPKLESEFVYGDYKVYDVRKMIAKSEQEIGKATAKYFFYSNIMNFFKTEITLANGEIRKRPLIETNGETGEIVWDKGRDFATVRKVLSMPQVNIVKKTEVQTGGFSKESILPKRNSDKLIARKKDWDPKKYGGFDSPTVAYSVLVVAKVEKGKSKKLKSVKELLGITIMERSSFEKNPIDFLEAKGYKEVKKDLIIKLPKYSLFELENGRKRMLASAGELQKGNELALPSKYVNFLYLASHYEKLKGSPEDNEQKQLFVEQHKHYLDEIIEQISEFSKRVILADANLDKVLSAYNKHRDKPIREQAENIIHLFTLTNLGAPAAFKYFDTTIDRKRYTSTKEVLDATLIHQSITGLYETRIDLSQLGGDGGGGGGGSGSSGGVPWLMKKPLQLTVLVPLHEYQERLLQQTALPKEQKELLQKLFLKYDALWQHWENQVGHRRIKPHNIATGTLAPRPQKQYPINPKAKPSIQIVIDDLLKQGVLIQQNSTMNTPVYPVPKPDGKWRMVLDYREVNKTIPLIAAQNQHSAGILSSIYRGKYKTTLDLTNGFWAHPITPESYWLTAFTWQGKQYCWTRLPQGFLNSPALFNADVVDLLKEIPNVQAYVDDIYISHDDPQEHLEQLEKIFSILLNAGYVVSLKKSEIAQREVEFLGFNITKEGRGLTDTFKQKLLNITPPKDLKQLQSILGLLNFARNFIPNYSELVKPLYTIVAPANGKFISWTEDNSNQLQHIISVLNQADNLEERNPETRLIIKVNSSPSAGYIRYYNEGSKRPIMYVNYIFSKAEAKFTQTEKLLTTMHKGLIKAMDLAMGQEILVYSPIVSMTKIQRTPLPERKALPVRWITWMTYLEDPRIQFHYDKSLPELQQIPNVTEDVIAKTKHPSEFAMVFYTDGSAIKHPDVNKSHSAGMGIAQVQFIPEYKIVHQWSIPLGDHTAQLAEIAAVEFACKKALKISGPVLIVTDSFYVAESANKELPYWKSNGFLNNKKKPLRHVSKWKSIAECLQLKPDIIIMHEKGHQQPMTTLHTEGNNLADKLATQGSYVVHAGKRTADGSEFEKRTADGSEFESPKKKAKVE

SEQ ID NO: 6838 - protein, 2174 aa, synthetic construct
MPAAKRVKLDGGDKKYSIGLDIGTNSVGWAVITDEYKVPSKKFKVLGNTDRHSIKKNLIGALLFDSGETAEATRLKRTARRRYTRRKNRICYLQEIFSNEMAKVDDSFFHRLEESFLVEEDKKHERHPIFGNIVDEVAYHEKYPTIYHLRKKLVDSTDKADLRLIYLALAHMIKFRGHFLIEGDLNPDNSDVDKLFIQLVQTYNQLFEENPINASGVDAKAILSARLSKSRRLENLIAQLPGEKKNGLFGNLIALSLGLTPNFKSNFDLAEDAKLQLSKDTYDDDLDNLLAQIGDQYADLFLAAKNLSDAILLSDILRVNTEITKAPLSASMIKRYDEHHQDLTLLKALVRQQLPEKYKEIFFDQSKNGYAGYIDGGASQEEFYKFIKPILEKMDGTEELLVKLNREDLLRKQRTFDNGSIPHQIHLGELHAILRRQEDFYPFLKDNREKIEKILTFRIPYYVGPLARGNSRFAWMTRKSEETITPWNFEEVVDKGASAQSFIERMTNFDKNLPNEKVLPKHSLLYEYFTVYNELTKVKYVTEGMRKPAFLSGEQKKAIVDLLFKTNRKVTVKQLKEDYFKKIECFDSVEISGVEDRFNASLGTYHDLLKIIKDKDFLDNEENEDILEDIVLTLTLFEDREMIEERLKTYAHLFDDKVMKQLKRRRYTGWGRLSRKLINGIRDKQSGKTILDFLKSDGFANRNFMQLIHDDSLTFKEDIQKAQVSGQGDSLHEHIANLAGSPAIKKGILQTVKVVDELVKVMGRHKPENIVIEMARENQTTQKGQKNSRERMKRIEEGIKELGSQILKEHPVENTQLQNEKLYLYYLQNGRDMYVDQELDINRLSDYDVDHIVPQSFLKDDSIDNKVLTRSDKARGKSDNVPSEEVVKKMKNYWRQLLNAKLITQRKFDNLTKAERGGLSELDKAGFIKRQLVETRQITKHVAQILDSRMNTKYDENDKLIREVKVITLKSKLVSDFRKDFQFYKVREINNYHHAHDAYLNAVVGTALIKKYPKLESEFVYGDYKVYDVRKMIAKSEQEIGKATAKYFFYSNIMNFFKTEITLANGEIRKRPLIETNGETGEIVWDKGRDFATVRKVLSMPQVNIVKKTEVQTGGFSKESILPKRNSDKLIARKKDWDPKKYGGFDSPTVAYSVLVVAKVEKGKSKKLKSVKELLGITIMERSSFEKNPIDFLEAKGYKEVKKDLIIKLPKYSLFELENGRKRMLASAGELQKGNELALPSKYVNFLYLASHYEKLKGSPEDNEQKQLFVEQHKHYLDEIIEQISEFSKRVILADANLDKVLSAYNKHRDKPIREQAENIIHLFTLTNLGAPAAFKYFDTTIDRKRYTSTKEVLDATLIHQSITGLYETRIDLSQLGGDGGGGGGGSGSSGGMDPLQLLQPLEAEIKGTKLKAHWNSGATITCVPQAFLEEEVPIKNIWIKTIHGEKEQPVYYLTFKIQGRKVEAEVISSPYDYILVSPSDIPWLMKKPLQLTTLVPLQEYEERLLKQTMLTGSYKEKLQSLFLKYDALWQHWENQVGHRRIKPHHIATGTVNPRPQKQYPINPKAKASIQTVINDLLKQGVLIQQNSIMNTPVYPVPKPDGKWRMVLDYREVNKTIPLIAAQNQHSAGILSSIFRGKYKTTLDLSNGFWAHSITPESYWLTAFTWLGQQYCWTRLPQGFLNSPALFNADVVDLLKEVPNVQVYVDDIYISHDDPREHLEQLEKVFSLLLNAGYVVSLKKSEIAQHEVEFLGFNITKEGRGLTETFKQKLLNITPPRDLKQLQSILGLLNFARNFIPNFSELVKPLYNIIATAPGKYITWTTDNSQQLQNIISMLNSAENLEERNPEVRLIMKVNTSPSAGYIRFYNEFAKRPIMYLNYVYTKAEVKFTNTEKLLTTIHKGLIKALDLGMGQEILVYSPIVSMTKIQKTPLPERKALPIRWITWMSYLEDPRIQFHYDKTLPELQQVPTVTDDIIAKIKHPSEFSMVFYTDGSAIKHPNVNKSHNAGMGIAQVQFKPEFTVINTWSIPLGDHTAQLAEVAAVEFACKKALKIDGPVLIVTDSFYVAESVNKELPYWQSNGFFNNKKKPLKHVSKWKSIADCIQLKPDIIIIHEKGHQPTASTFHTEGNNLADKLATQGSYVVNAGKRTADGSEFEKRTADGSEFESPKKKAKVE

SEQ ID NO: 6839 - protein, 2092 aa, synthetic construct
MPAAKRVKLDGGDKKYSIGLDIGTNSVGWAVITDEYKVPSKKFKVLGNTDRHSIKKNLIGALLFDSGETAEATRLKRTARRRYTRRKNRICYLQEIFSNEMAKVDDSFFHRLEESFLVEEDKKHERHPIFGNIVDEVAYHEKYPTIYHLRKKLVDSTDKADLRLIYLALAHMIKFRGHFLIEGDLNPDNSDVDKLFIQLVQTYNQLFEENPINASGVDAKAILSARLSKSRRLENLIAQLPGEKKNGLFGNLIALSLGLTPNFKSNFDLAEDAKLQLSKDTYDDDLDNLLAQIGDQYADLFLAAKNLSDAILLSDILRVNTEITKAPLSASMIKRYDEHHQDLTLLKALVRQQLPEKYKEIFFDQSKNGYAGYIDGGASQEEFYKFIKPILEKMDGTEELLVKLNREDLLRKQRTFDNGSIPHQIHLGELHAILRRQEDFYPFLKDNREKIEKILTFRIPYYVGPLARGNSRFAWMTRKSEETITPWNFEEVVDKGASAQSFIERMTNFDKNLPNEKVLPKHSLLYEYFTVYNELTKVKYVTEGMRKPAFLSGEQKKAIVDLLFKTNRKVTVKQLKEDYFKKIECFDSVEISGVEDRFNASLGTYHDLLKIIKDKDFLDNEENEDILEDIVLTLTLFEDREMIEERLKTYAHLFDDKVMKQLKRRRYTGWGRLSRKLINGIRDKQSGKTILDFLKSDGFANRNFMQLIHDDSLTFKEDIQKAQVSGQGDSLHEHIANLAGSPAIKKGILQTVKVVDELVKVMGRHKPENIVIEMARENQTTQKGQKNSRERMKRIEEGIKELGSQILKEHPVENTQLQNEKLYLYYLQNGRDMYVDQELDINRLSDYDVDHIVPQSFLKDDSIDNKVLTRSDKARGKSDNVPSEEVVKKMKNYWRQLLNAKLITQRKFDNLTKAERGGLSELDKAGFIKRQLVETRQITKHVAQILDSRMNTKYDENDKLIREVKVITLKSKLVSDFRKDFQFYKVREINNYHHAHDAYLNAVVGTALIKKYPKLESEFVYGDYKVYDVRKMIAKSEQEIGKATAKYFFYSNIMNFFKTEITLANGEIRKRPLIETNGETGEIVWDKGRDFATVRKVLSMPQVNIVKKTEVQTGGFSKESILPKRNSDKLIARKKDWDPKKYGGFDSPTVAYSVLVVAKVEKGKSKKLKSVKELLGITIMERSSFEKNPIDFLEAKGYKEVKKDLIIKLPKYSLFELENGRKRMLASAGELQKGNELALPSKYVNFLYLASHYEKLKGSPEDNEQKQLFVEQHKHYLDEIIEQISEFSKRVILADANLDKVLSAYNKHRDKPIREQAENIIHLFTLTNLGAPAAFKYFDTTIDRKRYTSTKEVLDATLIHQSITGLYETRIDLSQLGGDGGGGGGGSGSSGGVLNLEEEYRLHEKPVPSSIDPSWLQLFPTVWAERAGMGLANQVPPVVVELRSGASPVAVRQYPMSKEAREGIRPHIQRFLDLGVLVPCQSPWNTPLLPVKKPGTNDYRPVQDLREINKRVQDIHPTVPNPYNLLSSLPPSHTWYSVLDLKDAFFCLKLHPNSQPLFAFEWRDPEKGNTGQLTWTRLPQGFKNSPTLFNEALHRDLAPFRALNPQVVLLQYVDDLLVAAPTYRDCKEGTQKLLQELSKLGYRVSAKKAQLCQKEVTYLGYLLKEGKRWLTPARKATVMKIPPPTTPRQVREFLGTAGFCRLWIPGFASLAAPLYPLTKPSIPFIWTEEHQKAFDRIKEALLSAPALALPDLTKPFTLYVDERAGVARGVLTQTLGPWRRPVAYLSKKLDPVASGWPTCLKAVAAVALLLKDADKLTLGQNVTVIASHSLESIVRQPPDRWMTNARMTHYQSLLLNERVSFAPPAVLNPATLLPVESEATPVHRCSEILAEETGTRRDLKDQPLPGVPAWYTDGSSFIAEGKRRAGAAIVDGKRTVWASSLPEGTSAQKAELVALTQALRLAEGKDINIYTDSRYAFATAHIHGAIYKQRGWLTSAGKDIKNKEEILALLEAIHLPKRVAIIHCPGHQKGNDPVATGNRRADEAAKQAALSTRVLAETTKPAGKRTADGSEFEKRTADGSEFESPKKKAKVE

SEQ ID NO: 6840 - protein, 2096 aa, synthetic construct
MPAAKRVKLDGGDKKYSIGLDIGTNSVGWAVITDEYKVPSKKFKVLGNTDRHSIKKNLIGALLFDSGETAEATRLKRTARRRYTRRKNRICYLQEIFSNEMAKVDDSFFHRLEESFLVEEDKKHERHPIFGNIVDEVAYHEKYPTIYHLRKKLVDSTDKADLRLIYLALAHMIKFRGHFLIEGDLNPDNSDVDKLFIQLVQTYNQLFEENPINASGVDAKAILSARLSKSRRLENLIAQLPGEKKNGLFGNLIALSLGLTPNFKSNFDLAEDAKLQLSKDTYDDDLDNLLAQIGDQYADLFLAAKNLSDAILLSDILRVNTEITKAPLSASMIKRYDEHHQDLTLLKALVRQQLPEKYKEIFFDQSKNGYAGYIDGGASQEEFYKFIKPILEKMDGTEELLVKLNREDLLRKQRTFDNGSIPHQIHLGELHAILRRQEDFYPFLKDNREKIEKILTFRIPYYVGPLARGNSRFAWMTRKSEETITPWNFEEVVDKGASAQSFIERMTNFDKNLPNEKVLPKHSLLYEYFTVYNELTKVKYVTEGMRKPAFLSGEQKKAIVDLLFKTNRKVTVKQLKEDYFKKIECFDSVEISGVEDRFNASLGTYHDLLKIIKDKDFLDNEENEDILEDIVLTLTLFEDREMIEERLKTYAHLFDDKVMKQLKRRRYTGWGRLSRKLINGIRDKQSGKTILDFLKSDGFANRNFMQLIHDDSLTFKEDIQKAQVSGQGDSLHEHIANLAGSPAIKKGILQTVKVVDELVKVMGRHKPENIVIEMARENQTTQKGQKNSRERMKRIEEGIKELGSQILKEHPVENTQLQNEKLYLYYLQNGRDMYVDQELDINRLSDYDVDHIVPQSFLKDDSIDNKVLTRSDKARGKSDNVPSEEVVKKMKNYWRQLLNAKLITQRKFDNLTKAERGGLSELDKAGFIKRQLVETRQITKHVAQILDSRMNTKYDENDKLIREVKVITLKSKLVSDFRKDFQFYKVREINNYHHAHDAYLNAVVGTALIKKYPKLESEFVYGDYKVYDVRKMIAKSEQEIGKATAKYFFYSNIMNFFKTEITLANGEIRKRPLIETNGETGEIVWDKGRDFATVRKVLSMPQVNIVKKTEVQTGGFSKESILPKRNSDKLIARKKDWDPKKYGGFDSPTVAYSVLVVAKVEKGKSKKLKSVKELLGITIMERSSFEKNPIDFLEAKGYKEVKKDLIIKLPKYSLFELENGRKRMLASAGELQKGNELALPSKYVNFLYLASHYEKLKGSPEDNEQKQLFVEQHKHYLDEIIEQISEFSKRVILADANLDKVLSAYNKHRDKPIREQAENIIHLFTLTNLGAPAAFKYFDTTIDRKRYTSTKEVLDATLIHQSITGLYETRIDLSQLGGDGGGGGGSSGGSGGTAPLEEEYRLFLEAPIQNVTLLEQWKREIPKVWAEINPPGLASTQAPIHVQLLSTALPVRVRQYPITLEAKRSLRETIRKFRAAGILRPVHSPWNTPLLPVRKSGTSEYRMVQDLREVNKRVETIHPTVPNPYTLLSLLPPDRIWYSVLDLKDAFFCIPLAPESQLIFAFEWADAEEGESGQLTWTRLPQGFKNSPTLFDEALNRDLQGFRLDHPSVSLLQYVDDLLIAADTQAACLSATRDLLMTLAELGYRVSGKKAQLCQEEVTYLGFKIHKGSRSLSNSRTQAILQIPVPKTKRQVREFLGTIGYCRLWIPGFAELAQPLYAATRGGNDPLVWGEKEEEAFQSLKLALTQPPALALPSLDKPFQLFVEETSGAAKGVLTQALGPWKRPVAYLSKRLDPVAAGWPRCLRAIAAAALLTREASKLTFGQDIEITSSHNLESLLRSPPDKWLTNARITQYQVLLLDPPRVRFKQTAALNPATLLPETDDTLPIHHCLDTLDSLTSTRPDLTDQPLAQAEATLFTDGSSYIRDGKRYAGAAVVTLDSVIWAEPLPIGTSAQKAELIALTKALEWSKDKSVNIYTDSRYAFATLHVHGMIYRERGLLTAGGKAIKNAPEILALLTAVWLPKRVAVMHCKGHQKDDAPTSTGNRRADEVAREVAIRPLSTQATISAGKRTADGSEFEKRTADGSEFESPKKKAKVE

SEQ ID NO: 6841 - protein, 2096 aa, synthetic construct
MPAAKRVKLDGGDKKYSIGLDIGTNSVGWAVITDEYKVPSKKFKVLGNTDRHSIKKNLIGALLFDSGETAEATRLKRTARRRYTRRKNRICYLQEIFSNEMAKVDDSFFHRLEESFLVEEDKKHERHPIFGNIVDEVAYHEKYPTIYHLRKKLVDSTDKADLRLIYLALAHMIKFRGHFLIEGDLNPDNSDVDKLFIQLVQTYNQLFEENPINASGVDAKAILSARLSKSRRLENLIAQLPGEKKNGLFGNLIALSLGLTPNFKSNFDLAEDAKLQLSKDTYDDDLDNLLAQIGDQYADLFLAAKNLSDAILLSDILRVNTEITKAPLSASMIKRYDEHHQDLTLLKALVRQQLPEKYKEIFFDQSKNGYAGYIDGGASQEEFYKFIKPILEKMDGTEELLVKLNREDLLRKQRTFDNGSIPHQIHLGELHAILRRQEDFYPFLKDNREKIEKILTFRIPYYVGPLARGNSRFAWMTRKSEETITPWNFEEVVDKGASAQSFIERMTNFDKNLPNEKVLPKHSLLYEYFTVYNELTKVKYVTEGMRKPAFLSGEQKKAIVDLLFKTNRKVTVKQLKEDYFKKIECFDSVEISGVEDRFNASLGTYHDLLKIIKDKDFLDNEENEDILEDIVLTLTLFEDREMIEERLKTYAHLFDDKVMKQLKRRRYTGWGRLSRKLINGIRDKQSGKTILDFLKSDGFANRNFMQLIHDDSLTFKEDIQKAQVSGQGDSLHEHIANLAGSPAIKKGILQTVKVVDELVKVMGRHKPENIVIEMARENQTTQKGQKNSRERMKRIEEGIKELGSQILKEHPVENTQLQNEKLYLYYLQNGRDMYVDQELDINRLSDYDVDHIVPQSFLKDDSIDNKVLTRSDKARGKSDNVPSEEVVKKMKNYWRQLLNAKLITQRKFDNLTKAERGGLSELDKAGFIKRQLVETRQITKHVAQILDSRMNTKYDENDKLIREVKVITLKSKLVSDFRKDFQFYKVREINNYHHAHDAYLNAVVGTALIKKYPKLESEFVYGDYKVYDVRKMIAKSEQEIGKATAKYFFYSNIMNFFKTEITLANGEIRKRPLIETNGETGEIVWDKGRDFATVRKVLSMPQVNIVKKTEVQTGGFSKESILPKRNSDKLIARKKDWDPKKYGGFDSPTVAYSVLVVAKVEKGKSKKLKSVKELLGITIMERSSFEKNPIDFLEAKGYKEVKKDLIIKLPKYSLFELENGRKRMLASAGELQKGNELALPSKYVNFLYLASHYEKLKGSPEDNEQKQLFVEQHKHYLDEIIEQISEFSKRVILADANLDKVLSAYNKHRDKPIREQAENIIHLFTLTNLGAPAAFKYFDTTIDRKRYTSTKEVLDATLIHQSITGLYETRIDLSQLGGDGGGGGGSSGGSGGTAPLEEEYRLFLEAPIQNVTLLEQWKREIPKVWAEINPPGLASTQAPIHVQLLSTALPVRVRQYPITLEAKRSLRETIRKFRAAGILRPVHSPWNTPLLPVRKSGTSEYRMVQDLREVNKRVETIHPTVPNPYTLLSLLPPDRIWYSVLDLKDAFFCIPLAPESQLIFAFEWADAEEGESGQLTWTRLPQGFKNSPTLFNEALNRDLQGFRLDHPSVSLLQYVDDLLIAADTQAACLSATRDLLMTLAELGYRVSGKKAQLCQEEVTYLGFKIHKGSRSLSNSRTQAILQIPVPKTKRQVREFLGTIGYCRLWIPGFAELAQPLYAATRPGNDPLVWGEKEEEAFQSLKLALTQPPALALPSLDKPFQLFVEETSGAAKGVLTQALGPWKRPVAYLSKRLDPVAAGWPRCLRAIAAAALLTREASKLTFGQDIEITSSHNLESLLRSPPDKWLTNARITQYQVLLLDPPRVRFKQTAALNPATLLPETDDTLPIHHCLDTLDSLTSTRPDLTDQPLAQAEATLFTDGSSYIRDGKRYAGAAVVTLDSVIWAEPLPIGTSAQKAELIALTKALEWSKDKSVNIYTDSRYAFATLHVHGMIYRERGWLTAGGKAIKNAPEILALLTAVWLPKRVAVMHCKGHQKDDAPTSTGNRRADEVAREVAIRPLSTQATISAGKRTADGSEFEKRTADGSEFESPKKKAKVE

SEQ ID NO: 6842 - protein, 2100 aa, synthetic construct
MPAAKRVKLDGGDKKYSIGLDIGTNSVGWAVITDEYKVPSKKFKVLGNTDRHSIKKNLIGALLFDSGETAEATRLKRTARRRYTRRKNRICYLQEIFSNEMAKVDDSFFHRLEESFLVEEDKKHERHPIFGNIVDEVAYHEKYPTIYHLRKKLVDSTDKADLRLIYLALAHMIKFRGHFLIEGDLNPDNSDVDKLFIQLVQTYNQLFEENPINASGVDAKAILSARLSKSRRLENLIAQLPGEKKNGLFGNLIALSLGLTPNFKSNFDLAEDAKLQLSKDTYDDDLDNLLAQIGDQYADLFLAAKNLSDAILLSDILRVNTEITKAPLSASMIKRYDEHHQDLTLLKALVRQQLPEKYKEIFFDQSKNGYAGYIDGGASQEEFYKFIKPILEKMDGTEELLVKLNREDLLRKQRTFDNGSIPHQIHLGELHAILRRQEDFYPFLKDNREKIEKILTFRIPYYVGPLARGNSRFAWMTRKSEETITPWNFEEVVDKGASAQSFIERMTNFDKNLPNEKVLPKHSLLYEYFTVYNELTKVKYVTEGMRKPAFLSGEQKKAIVDLLFKTNRKVTVKQLKEDYFKKIECFDSVEISGVEDRFNASLGTYHDLLKIIKDKDFLDNEENEDILEDIVLTLTLFEDREMIEERLKTYAHLFDDKVMKQLKRRRYTGWGRLSRKLINGIRDKQSGKTILDFLKSDGFANRNFMQLIHDDSLTFKEDIQKAQVSGQGDSLHEHIANLAGSPAIKKGILQTVKVVDELVKVMGRHKPENIVIEMARENQTTQKGQKNSRERMKRIEEGIKELGSQILKEHPVENTQLQNEKLYLYYLQNGRDMYVDQELDINRLSDYDVDHIVPQSFLKDDSIDNKVLTRSDKARGKSDNVPSEEVVKKMKNYWRQLLNAKLITQRKFDNLTKAERGGLSELDKAGFIKRQLVETRQITKHVAQILDSRMNTKYDENDKLIREVKVITLKSKLVSDFRKDFQFYKVREINNYHHAHDAYLNAVVGTALIKKYPKLESEFVYGDYKVYDVRKMIAKSEQEIGKATAKYFFYSNIMNFFKTEITLANGEIRKRPLIETNGETGEIVWDKGRDFATVRKVLSMPQVNIVKKTEVQTGGFSKESILPKRNSDKLIARKKDWDPKKYGGFDSPTVAYSVLVVAKVEKGKSKKLKSVKELLGITIMERSSFEKNPIDFLEAKGYKEVKKDLIIKLPKYSLFELENGRKRMLASAGELQKGNELALPSKYVNFLYLASHYEKLKGSPEDNEQKQLFVEQHKHYLDEIIEQISEFSKRVILADANLDKVLSAYNKHRDKPIREQAENIIHLFTLTNLGAPAAFKYFDTTIDRKRYTSTKEVLDATLIHQSITGLYETRIDLSQLGGDGGGGGGSSGGSGGTVSLQDEHRLFDIPVTTSLPDVWLQDFPQAWAETGGLGRAKCQAPIIIDLKPTAVPVSIKQYPMSLEAHMGIRQHIIKFLELGVLRPCRSPWNTPLLPVKKPGTQDYRPVQDLREINKRTVDIHPTVPNPYNLLSTLKPDYSWYTVLDLKDAFFCLPLAPQSQELFAFEWKDPERGISGQLTWTRLPQGFKNSPTLFNEALHRDLTDFRTQHPEVTLLQYVDDLLLAAPTKKACTQGTRHLLQELGEKGYRASAKKAQICQTKVTYLGYILSEGKRWLTPGRIETVARIPPPRNPREVREFLGTAGFCRLWIPGFAELAAPLYALTKPSTPFTWQTEHQLAFEALKKALLSAPALGLPDTSKPFTLFLDERQGIAKGVLTQKLGPWKRPVAYLSKKLDPVAAGWPPCLRIMAATAMLVKDSAKLTLGQPLTVITPHTLEAIVRQPPDRWITNARLTHYQALLLDTDRVQFGPPVTLNPATLLPVPENQPSPHDCRQVLAETHGTREDLKDQELPDADHTWYTDGSSYLDSGTRRAGAAVVDGHNTIWAQSLPPGTSAQKAELIALTKALELSKGKKANIYTDSRYAFATAHTHGSIYERRGWLTSEGKEIKNKAEIIALLKALFLPQEVAIIHCPGHQKGQDPVAVGNRQADRVARQAAMAEVLTLATEPDNTSHITAGKRTADGSEFEKRTADGSEFESPKKKAKVE

SEQ ID NO: 6843 - protein, 2085 aa, synthetic construct
MPAAKRVKLDGGDKKYSIGLDIGTNSVGWAVITDEYKVPSKKFKVLGNTDRHSIKKNLIGALLFDSGETAEATRLKRTARRRYTRRKNRICYLQEIFSNEMAKVDDSFFHRLEESFLVEEDKKHERHPIFGNIVDEVAYHEKYPTIYHLRKKLVDSTDKADLRLIYLALAHMIKFRGHFLIEGDLNPDNSDVDKLFIQLVQTYNQLFEENPINASGVDAKAILSARLSKSRRLENLIAQLPGEKKNGLFGNLIALSLGLTPNFKSNFDLAEDAKLQLSKDTYDDDLDNLLAQIGDQYADLFLAAKNLSDAILLSDILRVNTEITKAPLSASMIKRYDEHHQDLTLLKALVRQQLPEKYKEIFFDQSKNGYAGYIDGGASQEEFYKFIKPILEKMDGTEELLVKLNREDLLRKQRTFDNGSIPHQIHLGELHAILRRQEDFYPFLKDNREKIEKILTFRIPYYVGPLARGNSRFAWMTRKSEETITPWNFEEVVDKGASAQSFIERMTNFDKNLPNEKVLPKHSLLYEYFTVYNELTKVKYVTEGMRKPAFLSGEQKKAIVDLLFKTNRKVTVKQLKEDYFKKIECFDSVEISGVEDRFNASLGTYHDLLKIIKDKDFLDNEENEDILEDIVLTLTLFEDREMIEERLKTYAHLFDDKVMKQLKRRRYTGWGRLSRKLINGIRDKQSGKTILDFLKSDGFANRNFMQLIHDDSLTFKEDIQKAQVSGQGDSLHEHIANLAGSPAIKKGILQTVKVVDELVKVMGRHKPENIVIEMARENQTTQKGQKNSRERMKRIEEGIKELGSQILKEHPVENTQLQNEKLYLYYLQNGRDMYVDQELDINRLSDYDVDHIVPQSFLKDDSIDNKVLTRSDKARGKSDNVPSEEVVKKMKNYWRQLLNAKLITQRKFDNLTKAERGGLSELDKAGFIKRQLVETRQITKHVAQILDSRMNTKYDENDKLIREVKVITLKSKLVSDFRKDFQFYKVREINNYHHAHDAYLNAVVGTALIKKYPKLESEFVYGDYKVYDVRKMIAKSEQEIGKATAKYFFYSNIMNFFKTEITLANGEIRKRPLIETNGETGEIVWDKGRDFATVRKVLSMPQVNIVKKTEVQTGGFSKESILPKRNSDKLIARKKDWDPKKYGGFDSPTVAYSVLVVAKVEKGKSKKLKSVKELLGITIMERSSFEKNPIDFLEAKGYKEVKKDLIIKLPKYSLFELENGRKRMLASAGELQKGNELALPSKYVNFLYLASHYEKLKGSPEDNEQKQLFVEQHKHYLDEIIEQISEFSKRVILADANLDKVLSAYNKHRDKPIREQAENIIHLFTLTNLGAPAAFKYFDTTIDRKRYTSTKEVLDATLIHQSITGLYETRIDLSQLGGDGGGGGGSSGGSGGVPWILKKPLELTIKLDLEEQQGTLLNNSILSKKGKEELKQLFEKYSALWQSWENQVGHRRIRPHKIATGTVKPTPQKQYHINPKAKPDIQIVINDLLKQGVLIQKESTMNTPVYPVPKPNGRWRMVLDYRAVNKVTPLIAVQNQHSYGILGSLFKGRYKTTIDLSNGFWAHPIVPEDYWITAFTWQGKQYCWTVLPQGFLNSPGLFTGDVVDLLQGIPNVEVYVDDVYISHDSEKEHLEYLDILFNRLKEAGYIISLKKSNIANSIVDFLGFQITNEGRGLTDTFKEKLENITAPTTLKQLQSILGLLNFARNFIPDFTELIAPLYALIPKSTKNYVPWQIEHSTTLETLITKLNGAEYLQGRKGDKTLIMKVNASYTTGYIRYYNEGEKKPISYVSIVFSKTELKFTELEKLLTTVHKGLLKALDLSMGQNIHVYSPIVSMQNIQKTPQTAKKALASRWLSWLSYLEDPRIRFFYDPQMPALKDLPAVDTGKDNKKHPSNFQHIFYTDGSAITSPTKEGHLNAGMGIVYFINKDGNLQKQQEWSISLGNHTAQFAEIAAFEFALKKCLPLGGNILVVTDSNYVAKAYNEELDVWASNGFVNNRKKPLKHISKWKSVADLKRLRPDVVVTHEPGHQKLDSSPHAYGNNLADQLATQASFKVHAGKRTADGSEFEKRTADGSEFESPKKKAKVE

SEQ ID NO: 6844 - protein, 2093 aa, synthetic construct
MPAAKRVKLDGGDKKYSIGLDIGTNSVGWAVITDEYKVPSKKFKVLGNTDRHSIKKNLIGALLFDSGETAEATRLKRTARRRYTRRKNRICYLQEIFSNEMAKVDDSFFHRLEESFLVEEDKKHERHPIFGNIVDEVAYHEKYPTIYHLRKKLVDSTDKADLRLIYLALAHMIKFRGHFLIEGDLNPDNSDVDKLFIQLVQTYNQLFEENPINASGVDAKAILSARLSKSRRLENLIAQLPGEKKNGLFGNLIALSLGLTPNFKSNFDLAEDAKLQLSKDTYDDDLDNLLAQIGDQYADLFLAAKNLSDAILLSDILRVNTEITKAPLSASMIKRYDEHHQDLTLLKALVRQQLPEKYKEIFFDQSKNGYAGYIDGGASQEEFYKFIKPILEKMDGTEELLVKLNREDLLRKQRTFDNGSIPHQIHLGELHAILRRQEDFYPFLKDNREKIEKILTFRIPYYVGPLARGNSRFAWMTRKSEETITPWNFEEVVDKGASAQSFIERMTNFDKNLPNEKVLPKHSLLYEYFTVYNELTKVKYVTEGMRKPAFLSGEQKKAIVDLLFKTNRKVTVKQLKEDYFKKIECFDSVEISGVEDRFNASLGTYHDLLKIIKDKDFLDNEENEDILEDIVLTLTLFEDREMIEERLKTYAHLFDDKVMKQLKRRRYTGWGRLSRKLINGIRDKQSGKTILDFLKSDGFANRNFMQLIHDDSLTFKEDIQKAQVSGQGDSLHEHIANLAGSPAIKKGILQTVKVVDELVKVMGRHKPENIVIEMARENQTTQKGQKNSRERMKRIEEGIKELGSQILKEHPVENTQLQNEKLYLYYLQNGRDMYVDQELDINRLSDYDVDHIVPQSFLKDDSIDNKVLTRSDKARGKSDNVPSEEVVKKMKNYWRQLLNAKLITQRKFDNLTKAERGGLSELDKAGFIKRQLVETRQITKHVAQILDSRMNTKYDENDKLIREVKVITLKSKLVSDFRKDFQFYKVREINNYHHAHDAYLNAVVGTALIKKYPKLESEFVYGDYKVYDVRKMIAKSEQEIGKATAKYFFYSNIMNFFKTEITLANGEIRKRPLIETNGETGEIVWDKGRDFATVRKVLSMPQVNIVKKTEVQTGGFSKESILPKRNSDKLIARKKDWDPKKYGGFDSPTVAYSVLVVAKVEKGKSKKLKSVKELLGITIMERSSFEKNPIDFLEAKGYKEVKKDLIIKLPKYSLFELENGRKRMLASAGELQKGNELALPSKYVNFLYLASHYEKLKGSPEDNEQKQLFVEQHKHYLDEIIEQISEFSKRVILADANLDKVLSAYNKHRDKPIREQAENIIHLFTLTNLGAPAAFKYFDTTIDRKRYTSTKEVLDATLIHQSITGLYETRIDLSQLGGDGGGGGGSSGGSGGTLQLEEEYRLFEPESTQKQEMDIWLKNFPQAWAETGGMGTAHCQAPVLIQLKATATPISIRQYPMPHEAYQGIKPHIRRMLDQGILKPCQSPWNTPLLPVKKPGTEDYRPVQDLREVNKRVEDIHPTVPNPYNLLSTLPPSHPWYTVLDLKDAFFCLRLHSESQLLFAFEWRDPEIGLSGQLTWTRLPQGFKNSPTLFNEALHSDLADFRVRYPALVLLQYVDDLLLAAATRTECLEGTKALLETLGNKGYRASAKKAQICLQEVTYLGYSLKDGQRWLTKARKEAILSIPVPKNSRQVREFLGTAGYCRLWIPGFAELAAPLYPLTRPGTLFQWGTEQQLAFEDIKKALLSSPALGLPDITKPFELFIDENSGFAKGVLVQKLGPWKRPVAYLSKKLDTVASGWPPCLRMVAAIAILVKDAGKLTLGQPLTILTSHPVEALVRQPPNKWLSNARMTHYQAMLLDAERVHFGPTVSLNPATLLPLPSGGNHHDCLQILAETHGTRPDLTDQPLPDADLTWYTDGSSFIRNGEREAGAAVTTESEVIWAAPLPPGTSAQRAELIALTQALKMAEGKKLTVYTDSRYAFATTHVHGEIYRRRGWLTSEGKEIKNKNEILALLEALFLPKRLSIIHCPGHQKGDSPQAKGNRLADDTAKKAATETHSSLTVLPAGKRTADGSEFEKRTADGSEFESPKKKAKVE

SEQ ID NO: 6845 - protein, 2125 aa, synthetic construct
MPAAKRVKLDGGDKKYSIGLDIGTNSVGWAVITDEYKVPSKKFKVLGNTDRHSIKKNLIGALLFDSGETAEATRLKRTARRRYTRRKNRICYLQEIFSNEMAKVDDSFFHRLEESFLVEEDKKHERHPIFGNIVDEVAYHEKYPTIYHLRKKLVDSTDKADLRLIYLALAHMIKFRGHFLIEGDLNPDNSDVDKLFIQLVQTYNQLFEENPINASGVDAKAILSARLSKSRRLENLIAQLPGEKKNGLFGNLIALSLGLTPNFKSNFDLAEDAKLQLSKDTYDDDLDNLLAQIGDQYADLFLAAKNLSDAILLSDILRVNTEITKAPLSASMIKRYDEHHQDLTLLKALVRQQLPEKYKEIFFDQSKNGYAGYIDGGASQEEFYKFIKPILEKMDGTEELLVKLNREDLLRKQRTFDNGSIPHQIHLGELHAILRRQEDFYPFLKDNREKIEKILTFRIPYYVGPLARGNSRFAWMTRKSEETITPWNFEEVVDKGASAQSFIERMTNFDKNLPNEKVLPKHSLLYEYFTVYNELTKVKYVTEGMRKPAFLSGEQKKAIVDLLFKTNRKVTVKQLKEDYFKKIECFDSVEISGVEDRFNASLGTYHDLLKIIKDKDFLDNEENEDILEDIVLTLTLFEDREMIEERLKTYAHLFDDKVMKQLKRRRYTGWGRLSRKLINGIRDKQSGKTILDFLKSDGFANRNFMQLIHDDSLTFKEDIQKAQVSGQGDSLHEHIANLAGSPAIKKGILQTVKVVDELVKVMGRHKPENIVIEMARENQTTQKGQKNSRERMKRIEEGIKELGSQILKEHPVENTQLQNEKLYLYYLQNGRDMYVDQELDINRLSDYDVDHIVPQSFLKDDSIDNKVLTRSDKARGKSDNVPSEEVVKKMKNYWRQLLNAKLITQRKFDNLTKAERGGLSELDKAGFIKRQLVETRQITKHVAQILDSRMNTKYDENDKLIREVKVITLKSKLVSDFRKDFQFYKVREINNYHHAHDAYLNAVVGTALIKKYPKLESEFVYGDYKVYDVRKMIAKSEQEIGKATAKYFFYSNIMNFFKTEITLANGEIRKRPLIETNGETGEIVWDKGRDFATVRKVLSMPQVNIVKKTEVQTGGFSKESILPKRNSDKLIARKKDWDPKKYGGFDSPTVAYSVLVVAKVEKGKSKKLKSVKELLGITIMERSSFEKNPIDFLEAKGYKEVKKDLIIKLPKYSLFELENGRKRMLASAGELQKGNELALPSKYVNFLYLASHYEKLKGSPEDNEQKQLFVEQHKHYLDEIIEQISEFSKRVILADANLDKVLSAYNKHRDKPIREQAENIIHLFTLTNLGAPAAFKYFDTTIDRKRYTSTKEVLDATLIHQSITGLYETRIDLSQLGGDGGGGGGSSGGSGGLLGRDLLTKLKAQIQFSTEGPQVTWEDRPAMCLVLNLEEEYRLHEKPVPPSIDPSWLQLFPMVWAEKAGMGLANQVPPVVVELKSDASPVAVRQYPMSKEAREGIRPHIQRFLDLGILVPCQSPWNTPLLPVKKPGTNDYRPVQDLREVNKRVQDIHPTVPNPYNLLSSLPPSHTWYSVLDLKDAFFCLKLHPNSQPLFAFEWRDPEKGNTGQLTWTRLPQGFKNSPTLFNEALHRDLASFRALNPQVVMLQYVDDLLVAAPTYRDCKEGTRRLLQELSKLGYRVSAKKAQLCREEVTYLGYLLKGGKRWLTPARKATVMKIPTPTTPRQVREFLGTAGFCRLWIPGFASLAAPLYPLTRPKVPFTWTEAHQEAFGRIKEALLSAPALALPDLTKPFALYVDEKEGVARGVLTQTLGPWRRPVAYLSKKLDPVASGWPTCLKAIAAVALLLKDADKLTLGQNVLVIAPHNLESIVRQPPDRWMTNARMTHYQSLLLNERVSFAPPAILNPATLLPVESDDTPIHICSEILAEETGTRPDLRDQPLPGVPAWYTDGSSFIMDGRRQAGAAIVDNKRTVWASNLPEGTSAQKAELIALTQALRLAEGKSINIYTDSRYAFATAHVHGAIYKQRGWLTSAGKDIKNKEEILALLEAIHLPKRVAIIHCPGHQRGTDPVATGNRKADEAAKQAAQSTRILTETTKNAGKRTADGSEFEKRTADGSEFESPKKKAKVE

SEQ ID NO: 6846 - protein, 2125 aa, synthetic construct
MPAAKRVKLDGGDKKYSIGLDIGTNSVGWAVITDEYKVPSKKFKVLGNTDRHSIKKNLIGALLFDSGETAEATRLKRTARRRYTRRKNRICYLQEIFSNEMAKVDDSFFHRLEESFLVEEDKKHERHPIFGNIVDEVAYHEKYPTIYHLRKKLVDSTDKADLRLIYLALAHMIKFRGHFLIEGDLNPDNSDVDKLFIQLVQTYNQLFEENPINASGVDAKAILSARLSKSRRLENLIAQLPGEKKNGLFGNLIALSLGLTPNFKSNFDLAEDAKLQLSKDTYDDDLDNLLAQIGDQYADLFLAAKNLSDAILLSDILRVNTEITKAPLSASMIKRYDEHHQDLTLLKALVRQQLPEKYKEIFFDQSKNGYAGYIDGGASQEEFYKFIKPILEKMDGTEELLVKLNREDLLRKQRTFDNGSIPHQIHLGELHAILRRQEDFYPFLKDNREKIEKILTFRIPYYVGPLARGNSRFAWMTRKSEETITPWNFEEVVDKGASAQSFIERMTNFDKNLPNEKVLPKHSLLYEYFTVYNELTKVKYVTEGMRKPAFLSGEQKKAIVDLLFKTNRKVTVKQLKEDYFKKIECFDSVEISGVEDRFNASLGTYHDLLKIIKDKDFLDNEENEDILEDIVLTLTLFEDREMIEERLKTYAHLFDDKVMKQLKRRRYTGWGRLSRKLINGIRDKQSGKTILDFLKSDGFANRNFMQLIHDDSLTFKEDIQKAQVSGQGDSLHEHIANLAGSPAIKKGILQTVKVVDELVKVMGRHKPENIVIEMARENQTTQKGQKNSRERMKRIEEGIKELGSQILKEHPVENTQLQNEKLYLYYLQNGRDMYVDQELDINRLSDYDVDHIVPQSFLKDDSIDNKVLTRSDKARGKSDNVPSEEVVKKMKNYWRQLLNAKLITQRKFDNLTKAERGGLSELDKAGFIKRQLVETRQITKHVAQILDSRMNTKYDENDKLIREVKVITLKSKLVSDFRKDFQFYKVREINNYHHAHDAYLNAVVGTALIKKYPKLESEFVYGDYKVYDVRKMIAKSEQEIGKATAKYFFYSNIMNFFKTEITLANGEIRKRPLIETNGETGEIVWDKGRDFATVRKVLSMPQVNIVKKTEVQTGGFSKESILPKRNSDKLIARKKDWDPKKYGGFDSPTVAYSVLVVAKVEKGKSKKLKSVKELLGITIMERSSFEKNPIDFLEAKGYKEVKKDLIIKLPKYSLFELENGRKRMLASAGELQKGNELALPSKYVNFLYLASHYEKLKGSPEDNEQKQLFVEQHKHYLDEIIEQISEFSKRVILADANLDKVLSAYNKHRDKPIREQAENIIHLFTLTNLGAPAAFKYFDTTIDRKRYTSTKEVLDATLIHQSITGLYETRIDLSQLGGDGGGGGGSSGGSGGLLGRDLLTKLKAQIQFSTEGPQVTWEDRPAMCLVLNLEEEYRLHEKPVPPSIDPSWLQLFPMVWAEKAGMGLANQVPPVVVELKSDASPVAVRQYPMSKEAREGIRPHIQRFLDLGILVPCQSPWNTPLLPVKKPGTNDYRPVQDLREVNKRVQDIHPTVPNPYNLLSSLPPSHTWYSVLDLKDAFFCLKLHPNSQPLFAFEWRDPEKGNTGQLTWTRLPQGFKNSPTLFNEALHRDLASFRALNPQVVMLQYVDDLLVAAPTYRDCKEGTRRLLQELSKLGYRVSAKKAQLCREEVTYLGYLLKGGKRWLTPARKATVMKIPTPTTPRQVREFLGKAGFCRLFIPGFASLAAPLYPLTRPKVPFTWTEAHQEAFGRIKEALLSAPALALPDLTKPFALYVDEKEGVARGVLTQTLGPWRRPVAYLSKKLDPVASGWPTCLKAIAAVALLLKDADKLTLGQNVLVIAPHNLESIVRQPPDRWMTNARMTHYQSLLLNERVSFAPPAILNPATLLPVESDDTPIHICSEILAEETGTRPDLRDQPLPGVPAWYTDGSSFIMDGRRQAGAAIVDNKRTVWASNLPEGTSAQKAELIALTQALRLAEGKSINIYTDSRYAFATAHVHGAIYKQRGWLTSAGKDIKNKEEILALLEAIHLPKRVAIIHCPGHQRGTDPVATGNRKADEAAKQAAQSTRILTETTKNAGKRTADGSEFEKRTADGSEFESPKKKAKVE

SEQ ID NO: 6847 - protein, 2216 aa, synthetic construct
MPAAKRVKLDGGDKKYSIGLDIGTNSVGWAVITDEYKVPSKKFKVLGNTDRHSIKKNLIGALLFDSGETAEATRLKRTARRRYTRRKNRICYLQEIFSNEMAKVDDSFFHRLEESFLVEEDKKHERHPIFGNIVDEVAYHEKYPTIYHLRKKLVDSTDKADLRLIYLALAHMIKFRGHFLIEGDLNPDNSDVDKLFIQLVQTYNQLFEENPINASGVDAKAILSARLSKSRRLENLIAQLPGEKKNGLFGNLIALSLGLTPNFKSNFDLAEDAKLQLSKDTYDDDLDNLLAQIGDQYADLFLAAKNLSDAILLSDILRVNTEITKAPLSASMIKRYDEHHQDLTLLKALVRQQLPEKYKEIFFDQSKNGYAGYIDGGASQEEFYKFIKPILEKMDGTEELLVKLNREDLLRKQRTFDNGSIPHQIHLGELHAILRRQEDFYPFLKDNREKIEKILTFRIPYYVGPLARGNSRFAWMTRKSEETITPWNFEEVVDKGASAQSFIERMTNFDKNLPNEKVLPKHSLLYEYFTVYNELTKVKYVTEGMRKPAFLSGEQKKAIVDLLFKTNRKVTVKQLKEDYFKKIECFDSVEISGVEDRFNASLGTYHDLLKIIKDKDFLDNEENEDILEDIVLTLTLFEDREMIEERLKTYAHLFDDKVMKQLKRRRYTGWGRLSRKLINGIRDKQSGKTILDFLKSDGFANRNFMQLIHDDSLTFKEDIQKAQVSGQGDSLHEHIANLAGSPAIKKGILQTVKVVDELVKVMGRHKPENIVIEMARENQTTQKGQKNSRERMKRIEEGIKELGSQILKEHPVENTQLQNEKLYLYYLQNGRDMYVDQELDINRLSDYDVDHIVPQSFLKDDSIDNKVLTRSDKARGKSDNVPSEEVVKKMKNYWRQLLNAKLITQRKFDNLTKAERGGLSELDKAGFIKRQLVETRQITKHVAQILDSRMNTKYDENDKLIREVKVITLKSKLVSDFRKDFQFYKVREINNYHHAHDAYLNAVVGTALIKKYPKLESEFVYGDYKVYDVRKMIAKSEQEIGKATAKYFFYSNIMNFFKTEITLANGEIRKRPLIETNGETGEIVWDKGRDFATVRKVLSMPQVNIVKKTEVQTGGFSKESILPKRNSDKLIARKKDWDPKKYGGFDSPTVAYSVLVVAKVEKGKSKKLKSVKELLGITIMERSSFEKNPIDFLEAKGYKEVKKDLIIKLPKYSLFELENGRKRMLASAGELQKGNELALPSKYVNFLYLASHYEKLKGSPEDNEQKQLFVEQHKHYLDEIIEQISEFSKRVILADANLDKVLSAYNKHRDKPIREQAENIIHLFTLTNLGAPAAFKYFDTTIDRKRYTSTKEVLDATLIHQSITGLYETRIDLSQLGGDGGGGGGSSGGSGGTLGDQGSRGSDPLPEPRVTLTVEGIPTEFLVNTGAEHSVLTKPMGKMGSKRTVVAGATGSKVYPWTTKRLLKIGQKQVTHSFLVIPECPAPLLGRDLLTKLKAQIQFSTEGPQVTWEDRPAMCLVLNLEEEYRLHEKPVPPSIDPSWLQLFPMVWAEKAGMGLANQVPPVVVELKSDASPVAVRQYPMSKEAREGIRPHIQRFLDLGILVPCQSPWNTPLLPVKKPGTNDYRPVQDLREVNKRVQDIHPTVPNPYNLLSSLPPSHTWYSVLDLKDAFFCLKLHPNSQPLFAFEWRDPEKGNTGQLTWTRLPQGFKNSPTLFNEALHRDLASFRALNPQVVMLQYVDDLLVAAPTYRDCKEGTRRLLQELSKLGYRVSAKKAQLCREEVTYLGYLLKGGKRWLTPARKATVMKIPTPTTPRQVREFLGKAGFCRLFIPGFASLAAPLYPLTRPKVPFTWTEAHQEAFGRIKEALLSAPALALPDLTKPFALYVDEKEGVARGVLTQTLGPWRRPVAYLSKKLDPVASGWPTCLKAIAAVALLLKDADKLTLGQNVLVIAPHNLESIVRQPPDRWMTNARMTHYQSLLLNERVSFAPPAILNPATLLPVESDDTPIHICSEILAEETGTRPDLRDQPLPGVPAWYTDGSSFIMDGRRQAGAAIVDNKRTVWASNLPEGTSAQKAELIALTQALRLAEGKSINIYTDSRYAFATAHVHGAIYKQRGWLTSAGKDIKNKEEILALLEAIHLPKRVAIIHCPGHQRGTDPVATGNRKADEAAKQAAQSTRILTETTKNAGKRTADGSEFEKRTADGSEFESPKKKAKVE

SEQ ID NO: 6848 - protein, 2094 aa, synthetic construct
MPAAKRVKLDGGDKKYSIGLDIGTNSVGWAVITDEYKVPSKKFKVLGNTDRHSIKKNLIGALLFDSGETAEATRLKRTARRRYTRRKNRICYLQEIFSNEMAKVDDSFFHRLEESFLVEEDKKHERHPIFGNIVDEVAYHEKYPTIYHLRKKLVDSTDKADLRLIYLALAHMIKFRGHFLIEGDLNPDNSDVDKLFIQLVQTYNQLFEENPINASGVDAKAILSARLSKSRRLENLIAQLPGEKKNGLFGNLIALSLGLTPNFKSNFDLAEDAKLQLSKDTYDDDLDNLLAQIGDQYADLFLAAKNLSDAILLSDILRVNTEITKAPLSASMIKRYDEHHQDLTLLKALVRQQLPEKYKEIFFDQSKNGYAGYIDGGASQEEFYKFIKPILEKMDGTEELLVKLNREDLLRKQRTFDNGSIPHQIHLGELHAILRRQEDFYPFLKDNREKIEKILTFRIPYYVGPLARGNSRFAWMTRKSEETITPWNFEEVVDKGASAQSFIERMTNFDKNLPNEKVLPKHSLLYEYFTVYNELTKVKYVTEGMRKPAFLSGEQKKAIVDLLFKTNRKVTVKQLKEDYFKKIECFDSVEISGVEDRFNASLGTYHDLLKIIKDKDFLDNEENEDILEDIVLTLTLFEDREMIEERLKTYAHLFDDKVMKQLKRRRYTGWGRLSRKLINGIRDKQSGKTILDFLKSDGFANRNFMQLIHDDSLTFKEDIQKAQVSGQGDSLHEHIANLAGSPAIKKGILQTVKVVDELVKVMGRHKPENIVIEMARENQTTQKGQKNSRERMKRIEEGIKELGSQILKEHPVENTQLQNEKLYLYYLQNGRDMYVDQELDINRLSDYDVDHIVPQSFLKDDSIDNKVLTRSDKARGKSDNVPSEEVVKKMKNYWRQLLNAKLITQRKFDNLTKAERGGLSELDKAGFIKRQLVETRQITKHVAQILDSRMNTKYDENDKLIREVKVITLKSKLVSDFRKDFQFYKVREINNYHHAHDAYLNAVVGTALIKKYPKLESEFVYGDYKVYDVRKMIAKSEQEIGKATAKYFFYSNIMNFFKTEITLANGEIRKRPLIETNGETGEIVWDKGRDFATVRKVLSMPQVNIVKKTEVQTGGFSKESILPKRNSDKLIARKKDWDPKKYGGFDSPTVAYSVLVVAKVEKGKSKKLKSVKELLGITIMERSSFEKNPIDFLEAKGYKEVKKDLIIKLPKYSLFELENGRKRMLASAGELQKGNELALPSKYVNFLYLASHYEKLKGSPEDNEQKQLFVEQHKHYLDEIIEQISEFSKRVILADANLDKVLSAYNKHRDKPIREQAENIIHLFTLTNLGAPAAFKYFDTTIDRKRYTSTKEVLDATLIHQSITGLYETRIDLSQLGGDGGGGGGSSGGSGGTLGIEDEYRLHETSTEPDVSLGSTWLSDFPQAWAETGGMGLAVRQAPLIIPLKATSTPVSIQQYPMSHEARLGIKPHIQRLLDQGILVPCQSPWNTPLLPVKKPGTNDYRPVQDLREVNKRVEDIHPTVPNPYNLLSGLPPSHQWYTVLDLKDAFFCLRLHPTSQPLFAFEWRDPGMGISGQLTWTRLPQGFKNSPTLFNEALHRDLADFRIQHPDLILLQYVDDILLAATSELDCQQGTRALLQTLGDLGYRASAKKAQICQKQVKYLGYLLREGQRWLTEARKETVMGQPVPKTPRQLREFLGTAGFCRLWIPGFAEMAAPLYPLTKPGTLFSWGPDQQKAYQEIKQALLTAPALGLPDLTKPFELFVDEKQGYAKGVLTQKLGPWRRPVAYLSKKLDPVAAGWPPCLRMVAAIAVLTKDAGKLTMGQPLVILAPHAVEALVKQPPDRWLSNARMTHYQAMLLDTDRVQFGPVVALNPATLLPLPEEGAPHDCLEILAETHGTRPDLTDQPIPDADHTWYTDGSSFLQEGQRKAGAAVTTETEVIWAGALPAGTSAQRAELIALTQALKMAEGKRLNVYTDSRYAFATAHIHGEIYRRRGWLTSEGREIKNKSEILALLKALFLPKRLSIIHCLGHQKGDSAEARGNRLADQAAREAAIKTPPDTSTLLAGKRTADGSEFEKRTADGSEFESPKKKAKVE

SEQ ID NO: 6849 - protein, 2094 aa, synthetic construct
MPAAKRVKLDGGDKKYSIGLDIGTNSVGWAVITDEYKVPSKKFKVLGNTDRHSIKKNLIGALLFDSGETAEATRLKRTARRRYTRRKNRICYLQEIFSNEMAKVDDSFFHRLEESFLVEEDKKHERHPIFGNIVDEVAYHEKYPTIYHLRKKLVDSTDKADLRLIYLALAHMIKFRGHFLIEGDLNPDNSDVDKLFIQLVQTYNQLFEENPINASGVDAKAILSARLSKSRRLENLIAQLPGEKKNGLFGNLIALSLGLTPNFKSNFDLAEDAKLQLSKDTYDDDLDNLLAQIGDQYADLFLAAKNLSDAILLSDILRVNTEITKAPLSASMIKRYDEHHQDLTLLKALVRQQLPEKYKEIFFDQSKNGYAGYIDGGASQEEFYKFIKPILEKMDGTEELLVKLNREDLLRKQRTFDNGSIPHQIHLGELHAILRRQEDFYPFLKDNREKIEKILTFRIPYYVGPLARGNSRFAWMTRKSEETITPWNFEEVVDKGASAQSFIERMTNFDKNLPNEKVLPKHSLLYEYFTVYNELTKVKYVTEGMRKPAFLSGEQKKAIVDLLFKTNRKVTVKQLKEDYFKKIECFDSVEISGVEDRFNASLGTYHDLLKIIKDKDFLDNEENEDILEDIVLTLTLFEDREMIEERLKTYAHLFDDKVMKQLKRRRYTGWGRLSRKLINGIRDKQSGKTILDFLKSDGFANRNFMQLIHDDSLTFKEDIQKAQVSGQGDSLHEHIANLAGSPAIKKGILQTVKVVDELVKVMGRHKPENIVIEMARENQTTQKGQKNSRERMKRIEEGIKELGSQILKEHPVENTQLQNEKLYLYYLQNGRDMYVDQELDINRLSDYDVDHIVPQSFLKDDSIDNKVLTRSDKARGKSDNVPSEEVVKKMKNYWRQLLNAKLITQRKFDNLTKAERGGLSELDKAGFIKRQLVETRQITKHVAQILDSRMNTKYDENDKLIREVKVITLKSKLVSDFRKDFQFYKVREINNYHHAHDAYLNAVVGTALIKKYPKLESEFVYGDYKVYDVRKMIAKSEQEIGKATAKYFFYSNIMNFFKTEITLANGEIRKRPLIETNGETGEIVWDKGRDFATVRKVLSMPQVNIVKKTEVQTGGFSKESILPKRNSDKLIARKKDWDPKKYGGFDSPTVAYSVLVVAKVEKGKSKKLKSVKELLGITIMERSSFEKNPIDFLEAKGYKEVKKDLIIKLPKYSLFELENGRKRMLASAGELQKGNELALPSKYVNFLYLASHYEKLKGSPEDNEQKQLFVEQHKHYLDEIIEQISEFSKRVILADANLDKVLSAYNKHRDKPIREQAENIIHLFTLTNLGAPAAFKYFDTTIDRKRYTSTKEVLDATLIHQSITGLYETRIDLSQLGGDGGGGGGSSGGSGGTLNIEDEYRLHETSKEPDVSLGSTWLSDFPQAWAETGGMGLAVRQAPLIIPLKATSTPVSIKQYPMSQEARLGIKPHIQRLLDQGILVPCQSPWNTPLLPVKKPGTNDYRPVQDLREVNKRVEDIHPTVPNPYNLLSGLPPSHQWYTVLDLKDAFFCLRLHPTSQPLFAFEWRDPEMGISGQLTWTRLPQGFKNSPTLFNEALHRDLAGFRIQHPDLILLQYVDDLLLAATSELDCQQGTRALLQTLGDLGYRASAKKAQICQKQVKYLGYLLKEGQRWLTEARKETVMGQPIPKTPRQLREFLGTAGFCRLWIPGFAEMAAPLYPLTKPGTLFNWGPDQQKAFQEIKQALLTAPALGLPDLTKPFELFVDEKQGYAKGVLTQKLGPWRRPVAYLSKKLDPVAAGWPPCLRMVAAIAVLTKDAGKLTMGQPLVILAPHAVEALVKQPPDRWLSNARMTHYQALLLDTDRVQFGPVVALNPATLLPLPEEGLQHDCLDILAEAHGTRSDLMDQPLPDADHTWYTDGSSFLQEGQRKAGAAVTTETEVIWARALPAGTSAQRAELIALTQALKMAEGKKLNVYTDSRYAFATAHIHGEIYRRRGWLTSEGKEIKNKDEILALLKALFLPKRLSIIHCPGHQKGNSAEARGNRMADQAAREVATRETPETSTLLAGKRTADGSEFEKRTADGSEFESPKKKAKVE

SEQ ID NO: 6850 - protein, 2094 aa, synthetic construct
MPAAKRVKLDGGDKKYSIGLDIGTNSVGWAVITDEYKVPSKKFKVLGNTDRHSIKKNLIGALLFDSGETAEATRLKRTARRRYTRRKNRICYLQEIFSNEMAKVDDSFFHRLEESFLVEEDKKHERHPIFGNIVDEVAYHEKYPTIYHLRKKLVDSTDKADLRLIYLALAHMIKFRGHFLIEGDLNPDNSDVDKLFIQLVQTYNQLFEENPINASGVDAKAILSARLSKSRRLENLIAQLPGEKKNGLFGNLIALSLGLTPNFKSNFDLAEDAKLQLSKDTYDDDLDNLLAQIGDQYADLFLAAKNLSDAILLSDILRVNTEITKAPLSASMIKRYDEHHQDLTLLKALVRQQLPEKYKEIFFDQSKNGYAGYIDGGASQEEFYKFIKPILEKMDGTEELLVKLNREDLLRKQRTFDNGSIPHQIHLGELHAILRRQEDFYPFLKDNREKIEKILTFRIPYYVGPLARGNSRFAWMTRKSEETITPWNFEEVVDKGASAQSFIERMTNFDKNLPNEKVLPKHSLLYEYFTVYNELTKVKYVTEGMRKPAFLSGEQKKAIVDLLFKTNRKVTVKQLKEDYFKKIECFDSVEISGVEDRFNASLGTYHDLLKIIKDKDFLDNEENEDILEDIVLTLTLFEDREMIEERLKTYAHLFDDKVMKQLKRRRYTGWGRLSRKLINGIRDKQSGKTILDFLKSDGFANRNFMQLIHDDSLTFKEDIQKAQVSGQGDSLHEHIANLAGSPAIKKGILQTVKVVDELVKVMGRHKPENIVIEMARENQTTQKGQKNSRERMKRIEEGIKELGSQILKEHPVENTQLQNEKLYLYYLQNGRDMYVDQELDINRLSDYDVDHIVPQSFLKDDSIDNKVLTRSDKARGKSDNVPSEEVVKKMKNYWRQLLNAKLITQRKFDNLTKAERGGLSELDKAGFIKRQLVETRQITKHVAQILDSRMNTKYDENDKLIREVKVITLKSKLVSDFRKDFQFYKVREINNYHHAHDAYLNAVVGTALIKKYPKLESEFVYGDYKVYDVRKMIAKSEQEIGKATAKYFFYSNIMNFFKTEITLANGEIRKRPLIETNGETGEIVWDKGRDFATVRKVLSMPQVNIVKKTEVQTGGFSKESILPKRNSDKLIARKKDWDPKKYGGFDSPTVAYSVLVVAKVEKGKSKKLKSVKELLGITIMERSSFEKNPIDFLEAKGYKEVKKDLIIKLPKYSLFELENGRKRMLASAGELQKGNELALPSKYVNFLYLASHYEKLKGSPEDNEQKQLFVEQHKHYLDEIIEQISEFSKRVILADANLDKVLSAYNKHRDKPIREQAENIIHLFTLTNLGAPAAFKYFDTTIDRKRYTSTKEVLDATLIHQSITGLYETRIDLSQLGGDGGGGGGSSGGSGGTLNIEDEYRLHETSKGPDVPLGSTWLSDFPQAWAETGGMGLAVRQAPLIIPLKATSTPVSIKQYPMSQEARLGIKPHIQRLLDQGILVPCQSPWNTPLLPVKKPGTNDYRPVQDLREVNKRVEDIHPTVPNPYNLLSGLPPSHQWYTVLDLKDAFFCLRLHPTSQSLFAFEWRDPEMGISGQLTWTRLPQGFKNSPTLFNEALHRDLADFRIQHPDLILLQYVDDLLLAATSELDCQQGTRALLQTLGDLGYRASAKKAQICQKQVKYLGYLLKEGQRWLTEARKETVMGQPTPKTPRQLREFLGTAGFCRLWIPGFAEMAAPLYPLTKPGTLFEWGPDQQKAYQEIKQALLTAPALGLPDLTKPFELFVDEKQGYAKGVLTQKLGPWRRPVAYLSKKLDPVAAGWPPCLRMVAAIAVLTKDAGKLTMGQPLVILAPHAVEALVKQPPDRWLSNARMTHYQALLLDTDRVQFGPIVALNPATLLPLPEEGLQHDCLDILAEAHGTRPDLTDQPLPDADHTWYTDGSSFLQEGQRKAGAAVTTETEVVWAKALPAGTSAQRAELIALTQALKMAEGKKLNVYTDSRYAFATAHIHGEIYRRRGWLTSEGKEIKNKDEILALLKALFLPKRLSIIHCPGHQKGNRAEARGNRMADQAAREVATRETPETSTLLAGKRTADGSEFEKRTADGSEFESPKKKAKVE

SEQ ID NO: 6851 - protein, 2114 aa, synthetic construct
MPAAKRVKLDGGDKKYSIGLDIGTNSVGWAVITDEYKVPSKKFKVLGNTDRHSIKKNLIGALLFDSGETAEATRLKRTARRRYTRRKNRICYLQEIFSNEMAKVDDSFFHRLEESFLVEEDKKHERHPIFGNIVDEVAYHEKYPTIYHLRKKLVDSTDKADLRLIYLALAHMIKFRGHFLIEGDLNPDNSDVDKLFIQLVQTYNQLFEENPINASGVDAKAILSARLSKSRRLENLIAQLPGEKKNGLFGNLIALSLGLTPNFKSNFDLAEDAKLQLSKDTYDDDLDNLLAQIGDQYADLFLAAKNLSDAILLSDILRVNTEITKAPLSASMIKRYDEHHQDLTLLKALVRQQLPEKYKEIFFDQSKNGYAGYIDGGASQEEFYKFIKPILEKMDGTEELLVKLNREDLLRKQRTFDNGSIPHQIHLGELHAILRRQEDFYPFLKDNREKIEKILTFRIPYYVGPLARGNSRFAWMTRKSEETITPWNFEEVVDKGASAQSFIERMTNFDKNLPNEKVLPKHSLLYEYFTVYNELTKVKYVTEGMRKPAFLSGEQKKAIVDLLFKTNRKVTVKQLKEDYFKKIECFDSVEISGVEDRFNASLGTYHDLLKIIKDKDFLDNEENEDILEDIVLTLTLFEDREMIEERLKTYAHLFDDKVMKQLKRRRYTGWGRLSRKLINGIRDKQSGKTILDFLKSDGFANRNFMQLIHDDSLTFKEDIQKAQVSGQGDSLHEHIANLAGSPAIKKGILQTVKVVDELVKVMGRHKPENIVIEMARENQTTQKGQKNSRERMKRIEEGIKELGSQILKEHPVENTQLQNEKLYLYYLQNGRDMYVDQELDINRLSDYDVDHIVPQSFLKDDSIDNKVLTRSDKARGKSDNVPSEEVVKKMKNYWRQLLNAKLITQRKFDNLTKAERGGLSELDKAGFIKRQLVETRQITKHVAQILDSRMNTKYDENDKLIREVKVITLKSKLVSDFRKDFQFYKVREINNYHHAHDAYLNAVVGTALIKKYPKLESEFVYGDYKVYDVRKMIAKSEQEIGKATAKYFFYSNIMNFFKTEITLANGEIRKRPLIETNGETGEIVWDKGRDFATVRKVLSMPQVNIVKKTEVQTGGFSKESILPKRNSDKLIARKKDWDPKKYGGFDSPTVAYSVLVVAKVEKGKSKKLKSVKELLGITIMERSSFEKNPIDFLEAKGYKEVKKDLIIKLPKYSLFELENGRKRMLASAGELQKGNELALPSKYVNFLYLASHYEKLKGSPEDNEQKQLFVEQHKHYLDEIIEQISEFSKRVILADANLDKVLSAYNKHRDKPIREQAENIIHLFTLTNLGAPAAFKYFDTTIDRKRYTSTKEVLDATLIHQSITGLYETRIDLSQLGGDGGGGGGSSGGSGGVQEISDSRPMLHIYLNGRRFLGLLDTGADKTCIAGRDWPANWPIHQTESSLQGLGMACGVARSSQPLRWQHEDKSGIIHPFVIPTLPFTLWGRDIMKDIKVRLMTDSPDDSQDLMIGAIESNLFADQISWKSDQPVWLNQWPLKQEKLQALQQLVTEQLQLGHLEESNSPWNTPVFVIKKKSGKWRLLQDLRAVNATMHDMGALQPGLPSPPAVPKGWEIIIIDLQDCFFNIKLHPEDCKRFAFSVPSPNFKRPYQRFQWKVLPQGMKNSPTLCQKFVDKAILTVRDKYQDSYIVHYMDDILLAHPSRSIVDEILTSMIQALNKHGLVVSTEKIQKYDNLKYLGTHIQGDSVSYQKLQIRTDKLRTLNDFQKLLGNINWIRPFLKLTTGELKPLFEILNPDSNPISTRKLTPEACKALQLMNERLSTARVKRLDLSQPWSLCILKTEYTPTACLWQDGVVEWIHLPHISPKVITPYDIFCTQLIIKGRHRSKELFSKDPDYIVVPYTKVQFDLLLQEKEDWPISLLGFLGEVHFHLPKDPLLTFTLQTAIIFPHMTSTTPLEKGIVIFTDGSANGRSVTYIQGREPIIKENTQNTAQQAEIVAVITAFEEVSQPFNLYTDSKYVTGLFPEIETATLSPRTKIYTELKHLQRLIHKRQEKFYIGHIRGHTGLPGPLAQGNAYADSLTRILTAAGKRTADGSEFEKRTADGSEFESPKKKAKVE

SEQ ID NO: 6852 - protein, 2088 aa, synthetic construct
MPAAKRVKLDGGDKKYSIGLDIGTNSVGWAVITDEYKVPSKKFKVLGNTDRHSIKKNLIGALLFDSGETAEATRLKRTARRRYTRRKNRICYLQEIFSNEMAKVDDSFFHRLEESFLVEEDKKHERHPIFGNIVDEVAYHEKYPTIYHLRKKLVDSTDKADLRLIYLALAHMIKFRGHFLIEGDLNPDNSDVDKLFIQLVQTYNQLFEENPINASGVDAKAILSARLSKSRRLENLIAQLPGEKKNGLFGNLIALSLGLTPNFKSNFDLAEDAKLQLSKDTYDDDLDNLLAQIGDQYADLFLAAKNLSDAILLSDILRVNTEITKAPLSASMIKRYDEHHQDLTLLKALVRQQLPEKYKEIFFDQSKNGYAGYIDGGASQEEFYKFIKPILEKMDGTEELLVKLNREDLLRKQRTFDNGSIPHQIHLGELHAILRRQEDFYPFLKDNREKIEKILTFRIPYYVGPLARGNSRFAWMTRKSEETITPWNFEEVVDKGASAQSFIERMTNFDKNLPNEKVLPKHSLLYEYFTVYNELTKVKYVTEGMRKPAFLSGEQKKAIVDLLFKTNRKVTVKQLKEDYFKKIECFDSVEISGVEDRFNASLGTYHDLLKIIKDKDFLDNEENEDILEDIVLTLTLFEDREMIEERLKTYAHLFDDKVMKQLKRRRYTGWGRLSRKLINGIRDKQSGKTILDFLKSDGFANRNFMQLIHDDSLTFKEDIQKAQVSGQGDSLHEHIANLAGSPAIKKGILQTVKVVDELVKVMGRHKPENIVIEMARENQTTQKGQKNSRERMKRIEEGIKELGSQILKEHPVENTQLQNEKLYLYYLQNGRDMYVDQELDINRLSDYDVDHIVPQSFLKDDSIDNKVLTRSDKARGKSDNVPSEEVVKKMKNYWRQLLNAKLITQRKFDNLTKAERGGLSELDKAGFIKRQLVETRQITKHVAQILDSRMNTKYDENDKLIREVKVITLKSKLVSDFRKDFQFYKVREINNYHHAHDAYLNAVVGTALIKKYPKLESEFVYGDYKVYDVRKMIAKSEQEIGKATAKYFFYSNIMNFFKTEITLANGEIRKRPLIETNGETGEIVWDKGRDFATVRKVLSMPQVNIVKKTEVQTGGFSKESILPKRNSDKLIARKKDWDPKKYGGFDSPTVAYSVLVVAKVEKGKSKKLKSVKELLGITIMERSSFEKNPIDFLEAKGYKEVKKDLIIKLPKYSLFELENGRKRMLASAGELQKGNELALPSKYVNFLYLASHYEKLKGSPEDNEQKQLFVEQHKHYLDEIIEQISEFSKRVILADANLDKVLSAYNKHRDKPIREQAENIIHLFTLTNLGAPAAFKYFDTTIDRKRYTSTKEVLDATLIHQSITGLYETRIDLSQLGGDGGGGGGSSGGSGGTLQLDDEYRLYSPLVKPDQNIQFWLEQFPQAWAETAGMGLAKQVPPQVIQLKASATPVSVRQYPLSKEAQEGIRPHVQRLIQQGILVPVQSPWNTPLLPVRKPGTNDYRPVQDLREVNKRVQDIHPTVPNPYNLLCALPPQRSWYTVLDLKDAFFCLRLHPTSQPLFAFEWRDPGTGRTGQLTWTRLPQGFKNSPTIFDEALHRDLANFRIQHPQVTLLQYVDDLLLAGATKQDCLEGTKALLLELSDLGYRASAKKAQICRREVTYLGYSLRDGQRWLTEARKKTVVQIPAPTTAKQVREFLGTAGFCRLWIPGFATLAAPLYPLTKEKGEFSWAPEHQKAFDAIKKALLSAPALALPDVTKPFTLYVDERKGVARGVLTQTLGPWRRPVAYLSKKLDPVASGWPVCLKAIAAVAILVKDADKLTLGQNITVIAPHALENIVRQPPDRWMTNARMTHYQSLLLTERVTFAPPAALNPATLLPEETDEPVTHDCHQLLIEETGVRKDLTDIPLTGEVLTWFTDGSSYVVEGKRMAGAAVVDGTRTIWASSLPEGTSAQKAELMALTQALRLAEGKSINIYTDSRYAFATAHVHGAIYKQRGLLTSAGREIKNKEEILSLLEALHLPKRLAIIHCPGHQKAKDPISRGNQMADRVAKQAAQGVNLLAGKRTADGSEFEKRTADGSEFESPKKKAKVE

SEQ ID NO: 6853 - protein, 2085 aa, synthetic construct
MPAAKRVKLDGGDKKYSIGLDIGTNSVGWAVITDEYKVPSKKFKVLGNTDRHSIKKNLIGALLFDSGETAEATRLKRTARRRYTRRKNRICYLQEIFSNEMAKVDDSFFHRLEESFLVEEDKKHERHPIFGNIVDEVAYHEKYPTIYHLRKKLVDSTDKADLRLIYLALAHMIKFRGHFLIEGDLNPDNSDVDKLFIQLVQTYNQLFEENPINASGVDAKAILSARLSKSRRLENLIAQLPGEKKNGLFGNLIALSLGLTPNFKSNFDLAEDAKLQLSKDTYDDDLDNLLAQIGDQYADLFLAAKNLSDAILLSDILRVNTEITKAPLSASMIKRYDEHHQDLTLLKALVRQQLPEKYKEIFFDQSKNGYAGYIDGGASQEEFYKFIKPILEKMDGTEELLVKLNREDLLRKQRTFDNGSIPHQIHLGELHAILRRQEDFYPFLKDNREKIEKILTFRIPYYVGPLARGNSRFAWMTRKSEETITPWNFEEVVDKGASAQSFIERMTNFDKNLPNEKVLPKHSLLYEYFTVYNELTKVKYVTEGMRKPAFLSGEQKKAIVDLLFKTNRKVTVKQLKEDYFKKIECFDSVEISGVEDRFNASLGTYHDLLKIIKDKDFLDNEENEDILEDIVLTLTLFEDREMIEERLKTYAHLFDDKVMKQLKRRRYTGWGRLSRKLINGIRDKQSGKTILDFLKSDGFANRNFMQLIHDDSLTFKEDIQKAQVSGQGDSLHEHIANLAGSPAIKKGILQTVKVVDELVKVMGRHKPENIVIEMARENQTTQKGQKNSRERMKRIEEGIKELGSQILKEHPVENTQLQNEKLYLYYLQNGRDMYVDQELDINRLSDYDVDHIVPQSFLKDDSIDNKVLTRSDKARGKSDNVPSEEVVKKMKNYWRQLLNAKLITQRKFDNLTKAERGGLSELDKAGFIKRQLVETRQITKHVAQILDSRMNTKYDENDKLIREVKVITLKSKLVSDFRKDFQFYKVREINNYHHAHDAYLNAVVGTALIKKYPKLESEFVYGDYKVYDVRKMIAKSEQEIGKATAKYFFYSNIMNFFKTEITLANGEIRKRPLIETNGETGEIVWDKGRDFATVRKVLSMPQVNIVKKTEVQTGGFSKESILPKRNSDKLIARKKDWDPKKYGGFDSPTVAYSVLVVAKVEKGKSKKLKSVKELLGITIMERSSFEKNPIDFLEAKGYKEVKKDLIIKLPKYSLFELENGRKRMLASAGELQKGNELALPSKYVNFLYLASHYEKLKGSPEDNEQKQLFVEQHKHYLDEIIEQISEFSKRVILADANLDKVLSAYNKHRDKPIREQAENIIHLFTLTNLGAPAAFKYFDTTIDRKRYTSTKEVLDATLIHQSITGLYETRIDLSQLGGDGGGGGGSSGGSGGIPWLMKKPLQLTTLVPLQEYEERLLKQTMLTGSYKEKLQSLFLKYDALWQHWENQVGHRRIKPHHIATGTVNPRPQKQYPINPKAKASIQTVINDLLKQGVLIQQNSIMNTPVYPVPKPDGKWRMVLDYREVNKTIPLIAAQNQHSAGILSSIFRGKYKTTLDLSNGFWAHSITPESYWLTAFTWLGQQYCWTRLPQGFLNSPALFNADVVDLLKEVPNVQVYVDDIYISHDDPREHLEQLEKVFSLLLNAGYVVSLKKSEIAQHEVEFLGFNITKEGRGLTETFKQKLLNITPPRDLKQLQSILGKLNFARNFIPNFSELVKPLYNIIATAPGKYITWTTDNSQQLQNIISMLNSAENLEERNPEVRLIMKVNTSPSAGYIRFYNEFAKRPIMYLNYVYTKAEVKFTNTEKLLTTIHKGLIKALDLGMGQEILVYSPIVSMTKIQKTPLPERKALPIRWITWMSYLEDPRIQFHYDKTLPELQQVPTVTDDIIAKIKHPSEFSMVFYTDGSAIKHPNVNKSHNAGMGIAQVQFKPEFTVINTWSIPLGDHTAQLAEVAAVEFACKKALKIDGPVLIVTDSFYVAESVNKELPYWQSNGFFNNKKKPLKHVSKWKSIADCIQLKPDIIIIHEKGHQPTASTFHTEGNNLADKLATQGSYVVNAGKRTADGSEFEKRTADGSEFESPKKKAKVE

SEQ ID NO: 6854 - protein, 2174 aa, synthetic construct
MPAAKRVKLDGGDKKYSIGLDIGTNSVGWAVITDEYKVPSKKFKVLGNTDRHSIKKNLIGALLFDSGETAEATRLKRTARRRYTRRKNRICYLQEIFSNEMAKVDDSFFHRLEESFLVEEDKKHERHPIFGNIVDEVAYHEKYPTIYHLRKKLVDSTDKADLRLIYLALAHMIKFRGHFLIEGDLNPDNSDVDKLFIQLVQTYNQLFEENPINASGVDAKAILSARLSKSRRLENLIAQLPGEKKNGLFGNLIALSLGLTPNFKSNFDLAEDAKLQLSKDTYDDDLDNLLAQIGDQYADLFLAAKNLSDAILLSDILRVNTEITKAPLSASMIKRYDEHHQDLTLLKALVRQQLPEKYKEIFFDQSKNGYAGYIDGGASQEEFYKFIKPILEKMDGTEELLVKLNREDLLRKQRTFDNGSIPHQIHLGELHAILRRQEDFYPFLKDNREKIEKILTFRIPYYVGPLARGNSRFAWMTRKSEETITPWNFEEVVDKGASAQSFIERMTNFDKNLPNEKVLPKHSLLYEYFTVYNELTKVKYVTEGMRKPAFLSGEQKKAIVDLLFKTNRKVTVKQLKEDYFKKIECFDSVEISGVEDRFNASLGTYHDLLKIIKDKDFLDNEENEDILEDIVLTLTLFEDREMIEERLKTYAHLFDDKVMKQLKRRRYTGWGRLSRKLINGIRDKQSGKTILDFLKSDGFANRNFMQLIHDDSLTFKEDIQKAQVSGQGDSLHEHIANLAGSPAIKKGILQTVKVVDELVKVMGRHKPENIVIEMARENQTTQKGQKNSRERMKRIEEGIKELGSQILKEHPVENTQLQNEKLYLYYLQNGRDMYVDQELDINRLSDYDVDHIVPQSFLKDDSIDNKVLTRSDKARGKSDNVPSEEVVKKMKNYWRQLLNAKLITQRKFDNLTKAERGGLSELDKAGFIKRQLVETRQITKHVAQILDSRMNTKYDENDKLIREVKVITLKSKLVSDFRKDFQFYKVREINNYHHAHDAYLNAVVGTALIKKYPKLESEFVYGDYKVYDVRKMIAKSEQEIGKATAKYFFYSNIMNFFKTEITLANGEIRKRPLIETNGETGEIVWDKGRDFATVRKVLSMPQVNIVKKTEVQTGGFSKESILPKRNSDKLIARKKDWDPKKYGGFDSPTVAYSVLVVAKVEKGKSKKLKSVKELLGITIMERSSFEKNPIDFLEAKGYKEVKKDLIIKLPKYSLFELENGRKRMLASAGELQKGNELALPSKYVNFLYLASHYEKLKGSPEDNEQKQLFVEQHKHYLDEIIEQISEFSKRVILADANLDKVLSAYNKHRDKPIREQAENIIHLFTLTNLGAPAAFKYFDTTIDRKRYTSTKEVLDATLIHQSITGLYETRIDLSQLGGDGGGGGGSSGGSGGMDPLQLLQPLEAEIKGTKLKAHWNSGATITCVPQAFLEEEVPIKNIWIKTIHGEKEQPVYYLTFKIQGRKVEAEVISSPYDYILVSPSDIPWLMKKPLQLTTLVPLQEYEERLLKQTMLTGSYKEKLQSLFLKYDALWQHWENQVGHRRIKPHHIATGTVNPRPQKQYPINPKAKASIQTVINDLLKQGVLIQQNSIMNTPVYPVPKPDGKWRMVLDYREVNKTIPLIAAQNQHSAGILSSIFRGKYKTTLDLSNGFWAHSITPESYWLTAFTWLGQQYCWTRLPQGFLNSPALFNADVVDLLKEVPNVQVYVDDIYISHDDPREHLEQLEKVFSLLLNAGYVVSLKKSEIAQHEVEFLGFNITKEGRGLTETFKQKLLNITPPRDLKQLQSILGLLNFARNFIPNFSELVKPLYNIIATAPGKYITWTTDNSQQLQNIISMLNSAENLEERNPEVRLIMKVNTSPSAGYIRFYNEFAKRPIMYLNYVYTKAEVKFTNTEKLLTTIHKGLIKALDLGMGQEILVYSPIVSMTKIQKTPLPERKALPIRWITWMSYLEDPRIQFHYDKTLPELQQVPTVTDDIIAKIKHPSEFSMVFYTDGSAIKHPNVNKSHNAGMGIAQVQFKPEFTVINTWSIPLGDHTAQLAEVAAVEFACKKALKIDGPVLIVTDSFYVAESVNKELPYWQSNGFFNNKKKPLKHVSKWKSIADCIQLKPDIIIIHEKGHQPTASTFHTEGNNLADKLATQGSYVVNAGKRTADGSEFEKRTADGSEFESPKKKAKVE

SEQ ID NO: 6855 - protein, 2094 aa, synthetic construct
MPAAKRVKLDGGDKKYSIGLDIGTNSVGWAVITDEYKVPSKKFKVLGNTDRHSIKKNLIGALLFDSGETAEATRLKRTARRRYTRRKNRICYLQEIFSNEMAKVDDSFFHRLEESFLVEEDKKHERHPIFGNIVDEVAYHEKYPTIYHLRKKLVDSTDKADLRLIYLALAHMIKFRGHFLIEGDLNPDNSDVDKLFIQLVQTYNQLFEENPINASGVDAKAILSARLSKSRRLENLIAQLPGEKKNGLFGNLIALSLGLTPNFKSNFDLAEDAKLQLSKDTYDDDLDNLLAQIGDQYADLFLAAKNLSDAILLSDILRVNTEITKAPLSASMIKRYDEHHQDLTLLKALVRQQLPEKYKEIFFDQSKNGYAGYIDGGASQEEFYKFIKPILEKMDGTEELLVKLNREDLLRKQRTFDNGSIPHQIHLGELHAILRRQEDFYPFLKDNREKIEKILTFRIPYYVGPLARGNSRFAWMTRKSEETITPWNFEEVVDKGASAQSFIERMTNFDKNLPNEKVLPKHSLLYEYFTVYNELTKVKYVTEGMRKPAFLSGEQKKAIVDLLFKTNRKVTVKQLKEDYFKKIECFDSVEISGVEDRFNASLGTYHDLLKIIKDKDFLDNEENEDILEDIVLTLTLFEDREMIEERLKTYAHLFDDKVMKQLKRRRYTGWGRLSRKLINGIRDKQSGKTILDFLKSDGFANRNFMQLIHDDSLTFKEDIQKAQVSGQGDSLHEHIANLAGSPAIKKGILQTVKVVDELVKVMGRHKPENIVIEMARENQTTQKGQKNSRERMKRIEEGIKELGSQILKEHPVENTQLQNEKLYLYYLQNGRDMYVDQELDINRLSDYDVDHIVPQSFLKDDSIDNKVLTRSDKARGKSDNVPSEEVVKKMKNYWRQLLNAKLITQRKFDNLTKAERGGLSELDKAGFIKRQLVETRQITKHVAQILDSRMNTKYDENDKLIREVKVITLKSKLVSDFRKDFQFYKVREINNYHHAHDAYLNAVVGTALIKKYPKLESEFVYGDYKVYDVRKMIAKSEQEIGKATAKYFFYSNIMNFFKTEITLANGEIRKRPLIETNGETGEIVWDKGRDFATVRKVLSMPQVNIVKKTEVQTGGFSKESILPKRNSDKLIARKKDWDPKKYGGFDSPTVAYSVLVVAKVEKGKSKKLKSVKELLGITIMERSSFEKNPIDFLEAKGYKEVKKDLIIKLPKYSLFELENGRKRMLASAGELQKGNELALPSKYVNFLYLASHYEKLKGSPEDNEQKQLFVEQHKHYLDEIIEQISEFSKRVILADANLDKVLSAYNKHRDKPIREQAENIIHLFTLTNLGAPAAFKYFDTTIDRKRYTSTKEVLDATLIHQSITGLYETRIDLSQLGGDGGGGGGSSGGSGGTLNIEDEYRLHETSKEPDVPLGSTWLSDFPQAWAETGGMGLAVRQAPLIIPLKATSTPVSIKQYPMSQEARLGIKPHIQRLLDQGILVPCQSPWNTPLLPVKKPGTNDYRPVQDLREVNKRVEDIHPTVPNPYNLLSGLPPSHQWYTVLDLKDAFFCLRLHPTSQPLFAFEWRDPEMGISGQLTWTRLPQGFKNSPTLFNEALHRDLADFRIQHPDLILLQYVDDLLLAATSEQDCQRGTRALLQTLGNLGYRASAKKAQICQKQVKYLGYLLKEGQRWLTEARKETVMGQPTPKTPRQLREFLGTAGFCRLWIPGFAEMAAPLYPLTKPGTLFNWGPDQQKAYQEIKQALLTAPALGLPDLTKPFELFVDEKQGYAKGVLTQKLGPWRRPVAYLSKKLDPVAAGWPPCLRMVAAIAVLTKDAGKLTMGQPLVILAPHAVEALVKQPPDRWLSNARMTHYQAMLLDTDRVQFGPVVALNPATLLPLPEKEAPHDCLEILAETHGTRPDLTDQPIPDADYTWYTDGSSFLQEGQRRAGAAVTTETEVIWARALPAGTSAQRAELIALTQALKMAEGKKLNVYTDSRYAFATAHVHGEIYRRRGWLTSEGREIKNKNEILALLKALFLPKRLSIIHCPGHQKGNSAEARGNRMADQAAREAAMKAVLETSTLLAGKRTADGSEFEKRTADGSEFESPKKKAKVE

SEQ ID NO: 6856 - protein, 2171 aa, synthetic construct
MPAAKRVKLDGGDKKYSIGLDIGTNSVGWAVITDEYKVPSKKFKVLGNTDRHSIKKNLIGALLFDSGETAEATRLKRTARRRYTRRKNRICYLQEIFSNEMAKVDDSFFHRLEESFLVEEDKKHERHPIFGNIVDEVAYHEKYPTIYHLRKKLVDSTDKADLRLIYLALAHMIKFRGHFLIEGDLNPDNSDVDKLFIQLVQTYNQLFEENPINASGVDAKAILSARLSKSRRLENLIAQLPGEKKNGLFGNLIALSLGLTPNFKSNFDLAEDAKLQLSKDTYDDDLDNLLAQIGDQYADLFLAAKNLSDAILLSDILRVNTEITKAPLSASMIKRYDEHHQDLTLLKALVRQQLPEKYKEIFFDQSKNGYAGYIDGGASQEEFYKFIKPILEKMDGTEELLVKLNREDLLRKQRTFDNGSIPHQIHLGELHAILRRQEDFYPFLKDNREKIEKILTFRIPYYVGPLARGNSRFAWMTRKSEETITPWNFEEVVDKGASAQSFIERMTNFDKNLPNEKVLPKHSLLYEYFTVYNELTKVKYVTEGMRKPAFLSGEQKKAIVDLLFKTNRKVTVKQLKEDYFKKIECFDSVEISGVEDRFNASLGTYHDLLKIIKDKDFLDNEENEDILEDIVLTLTLFEDREMIEERLKTYAHLFDDKVMKQLKRRRYTGWGRLSRKLINGIRDKQSGKTILDFLKSDGFANRNFMQLIHDDSLTFKEDIQKAQVSGQGDSLHEHIANLAGSPAIKKGILQTVKVVDELVKVMGRHKPENIVIEMARENQTTQKGQKNSRERMKRIEEGIKELGSQILKEHPVENTQLQNEKLYLYYLQNGRDMYVDQELDINRLSDYDVDHIVPQSFLKDDSIDNKVLTRSDKARGKSDNVPSEEVVKKMKNYWRQLLNAKLITQRKFDNLTKAERGGLSELDKAGFIKRQLVETRQITKHVAQILDSRMNTKYDENDKLIREVKVITLKSKLVSDFRKDFQFYKVREINNYHHAHDAYLNAVVGTALIKKYPKLESEFVYGDYKVYDVRKMIAKSEQEIGKATAKYFFYSNIMNFFKTEITLANGEIRKRPLIETNGETGEIVWDKGRDFATVRKVLSMPQVNIVKKTEVQTGGFSKESILPKRNSDKLIARKKDWDPKKYGGFDSPTVAYSVLVVAKVEKGKSKKLKSVKELLGITIMERSSFEKNPIDFLEAKGYKEVKKDLIIKLPKYSLFELENGRKRMLASAGELQKGNELALPSKYVNFLYLASHYEKLKGSPEDNEQKQLFVEQHKHYLDEIIEQISEFSKRVILADANLDKVLSAYNKHRDKPIREQAENIIHLFTLTNLGAPAAFKYFDTTIDRKRYTSTKEVLDATLIHQSITGLYETRIDLSQLGGDGGGSSGGSGGGGGMDLLKPLTVERKGVKIKGYWNSQADITCVPKDLLQGEEPVRQQNVTTIHGTQEGDVYYVNLKIDGRRINTEVIGTTLDYAIITPGDVPWILKKPLELTIKLDLEEQQGTLLNNSILSKKGKEELKQLFEKYSALWQSWENQVGHRRIRPHKIATGTVKPTPQKQYHINPKAKPDIQIVINDLLKQGVLIQKESTMNTPVYPVPKPNGRWRMVLDYRAVNKVTPLIAVQNQHSYGILGSLFKGRYKTTIDLSNGFWAHPIVPEDYWITAFTWQGKQYCWTVLPQGFLNSPGLFTGDVVDLLQGIPNVEVYVDDVYISHDSEKEHLEYLDILFNRLKEAGYIISLKKSNIANSIVDFLGFQITNEGRGLTDTFKEKLENITAPTTLKQLQSILGLLNFARNFIPDFTELIAPLYALIPKSTKNYVPWQIEHSTTLETLITKLNGAEYLQGRKGDKTLIMKVNASYTTGYIRYYNEGEKKPISYVSIVFSKTELKFTELEKLLTTVHKGLLKALDLSMGQNIHVYSPIVSMQNIQKTPQTAKKALASRWLSWLSYLEDPRIRFFYDPQMPALKDLPAVDTGKDNKKHPSNFQHIFYTDGSAITSPTKEGHLNAGMGIVYFINKDGNLQKQQEWSISLGNHTAQFAEIAAFEFALKKCLPLGGNILVVTDSNYVAKAYNEELDVWASNGFVNNRKKPLKHISKWKSVADLKRLRPDVVVTHEPGHQKLDSSPHAYGNNLADQLATQASFKVHAGKRTADGSEFEKRTADGSEFESPKKKAKVE

SEQ ID NO: 6857 - protein, 2093 aa, synthetic construct
MPAAKRVKLDGGDKKYSIGLDIGTNSVGWAVITDEYKVPSKKFKVLGNTDRHSIKKNLIGALLFDSGETAEATRLKRTARRRYTRRKNRICYLQEIFSNEMAKVDDSFFHRLEESFLVEEDKKHERHPIFGNIVDEVAYHEKYPTIYHLRKKLVDSTDKADLRLIYLALAHMIKFRGHFLIEGDLNPDNSDVDKLFIQLVQTYNQLFEENPINASGVDAKAILSARLSKSRRLENLIAQLPGEKKNGLFGNLIALSLGLTPNFKSNFDLAEDAKLQLSKDTYDDDLDNLLAQIGDQYADLFLAAKNLSDAILLSDILRVNTEITKAPLSASMIKRYDEHHQDLTLLKALVRQQLPEKYKEIFFDQSKNGYAGYIDGGASQEEFYKFIKPILEKMDGTEELLVKLNREDLLRKQRTFDNGSIPHQIHLGELHAILRRQEDFYPFLKDNREKIEKILTFRIPYYVGPLARGNSRFAWMTRKSEETITPWNFEEVVDKGASAQSFIERMTNFDKNLPNEKVLPKHSLLYEYFTVYNELTKVKYVTEGMRKPAFLSGEQKKAIVDLLFKTNRKVTVKQLKEDYFKKIECFDSVEISGVEDRFNASLGTYHDLLKIIKDKDFLDNEENEDILEDIVLTLTLFEDREMIEERLKTYAHLFDDKVMKQLKRRRYTGWGRLSRKLINGIRDKQSGKTILDFLKSDGFANRNFMQLIHDDSLTFKEDIQKAQVSGQGDSLHEHIANLAGSPAIKKGILQTVKVVDELVKVMGRHKPENIVIEMARENQTTQKGQKNSRERMKRIEEGIKELGSQILKEHPVENTQLQNEKLYLYYLQNGRDMYVDQELDINRLSDYDVDHIVPQSFLKDDSIDNKVLTRSDKARGKSDNVPSEEVVKKMKNYWRQLLNAKLITQRKFDNLTKAERGGLSELDKAGFIKRQLVETRQITKHVAQILDSRMNTKYDENDKLIREVKVITLKSKLVSDFRKDFQFYKVREINNYHHAHDAYLNAVVGTALIKKYPKLESEFVYGDYKVYDVRKMIAKSEQEIGKATAKYFFYSNIMNFFKTEITLANGEIRKRPLIETNGETGEIVWDKGRDFATVRKVLSMPQVNIVKKTEVQTGGFSKESILPKRNSDKLIARKKDWDPKKYGGFDSPTVAYSVLVVAKVEKGKSKKLKSVKELLGITIMERSSFEKNPIDFLEAKGYKEVKKDLIIKLPKYSLFELENGRKRMLASAGELQKGNELALPSKYVNFLYLASHYEKLKGSPEDNEQKQLFVEQHKHYLDEIIEQISEFSKRVILADANLDKVLSAYNKHRDKPIREQAENIIHLFTLTNLGAPAAFKYFDTTIDRKRYTSTKEVLDATLIHQSITGLYETRIDLSQLGGDGGGSSGGSGGGGGTLQLEEEYRLFEPESTQKQEMDIWLKNFPQAWAETGGMGTAHCQAPVLIQLKATATPISIRQYPMPHEAYQGIKPHIRRMLDQGILKPCQSPWNTPLLPVKKPGTEDYRPVQDLREVNKRVEDIHPTVPNPYNLLSTLPPSHPWYTVLDLKDAFFCLRLHSESQLLFAFEWRDPEIGLSGQLTWTRLPQGFKNSPTLFNEALHSDLADFRVRYPALVLLQYVDDLLLAAATRTECLEGTKALLETLGNKGYRASAKKAQICLQEVTYLGYSLKDGQRWLTKARKEAILSIPVPKNSRQVREFLGKAGYCRLFIPGFAELAAPLYPLTRPGTLFQWGTEQQLAFEDIKKALLSSPALGLPDITKPFELFIDENSGFAKGVLVQKLGPWKRPVAYLSKKLDTVASGWPPCLRMVAAIAILVKDAGKLTLGQPLTILTSHPVEALVRQPPNKWLSNARMTHYQAMLLDAERVHFGPTVSLNPATLLPLPSGGNHHDCLQILAETHGTRPDLTDQPLPDADLTWYTDGSSFIRNGEREAGAAVTTESEVIWAAPLPPGTSAQRAELIALTQALKMAEGKKLTVYTDSRYAFATTHVHGEIYRRRGWLTSEGKEIKNKNEILALLEALFLPKRLSIIHCPGHQKGDSPQAKGNRLADDTAKKAATETHSSLTVLPAGKRTADGSEFEKRTADGSEFESPKKKAKVE

SEQ ID NO: 6858 - protein, 2216 aa, synthetic construct
MPAAKRVKLDGGDKKYSIGLDIGTNSVGWAVITDEYKVPSKKFKVLGNTDRHSIKKNLIGALLFDSGETAEATRLKRTARRRYTRRKNRICYLQEIFSNEMAKVDDSFFHRLEESFLVEEDKKHERHPIFGNIVDEVAYHEKYPTIYHLRKKLVDSTDKADLRLIYLALAHMIKFRGHFLIEGDLNPDNSDVDKLFIQLVQTYNQLFEENPINASGVDAKAILSARLSKSRRLENLIAQLPGEKKNGLFGNLIALSLGLTPNFKSNFDLAEDAKLQLSKDTYDDDLDNLLAQIGDQYADLFLAAKNLSDAILLSDILRVNTEITKAPLSASMIKRYDEHHQDLTLLKALVRQQLPEKYKEIFFDQSKNGYAGYIDGGASQEEFYKFIKPILEKMDGTEELLVKLNREDLLRKQRTFDNGSIPHQIHLGELHAILRRQEDFYPFLKDNREKIEKILTFRIPYYVGPLARGNSRFAWMTRKSEETITPWNFEEVVDKGASAQSFIERMTNFDKNLPNEKVLPKHSLLYEYFTVYNELTKVKYVTEGMRKPAFLSGEQKKAIVDLLFKTNRKVTVKQLKEDYFKKIECFDSVEISGVEDRFNASLGTYHDLLKIIKDKDFLDNEENEDILEDIVLTLTLFEDREMIEERLKTYAHLFDDKVMKQLKRRRYTGWGRLSRKLINGIRDKQSGKTILDFLKSDGFANRNFMQLIHDDSLTFKEDIQKAQVSGQGDSLHEHIANLAGSPAIKKGILQTVKVVDELVKVMGRHKPENIVIEMARENQTTQKGQKNSRERMKRIEEGIKELGSQILKEHPVENTQLQNEKLYLYYLQNGRDMYVDQELDINRLSDYDVDHIVPQSFLKDDSIDNKVLTRSDKARGKSDNVPSEEVVKKMKNYWRQLLNAKLITQRKFDNLTKAERGGLSELDKAGFIKRQLVETRQITKHVAQILDSRMNTKYDENDKLIREVKVITLKSKLVSDFRKDFQFYKVREINNYHHAHDAYLNAVVGTALIKKYPKLESEFVYGDYKVYDVRKMIAKSEQEIGKATAKYFFYSNIMNFFKTEITLANGEIRKRPLIETNGETGEIVWDKGRDFATVRKVLSMPQVNIVKKTEVQTGGFSKESILPKRNSDKLIARKKDWDPKKYGGFDSPTVAYSVLVVAKVEKGKSKKLKSVKELLGITIMERSSFEKNPIDFLEAKGYKEVKKDLIIKLPKYSLFELENGRKRMLASAGELQKGNELALPSKYVNFLYLASHYEKLKGSPEDNEQKQLFVEQHKHYLDEIIEQISEFSKRVILADANLDKVLSAYNKHRDKPIREQAENIIHLFTLTNLGAPAAFKYFDTTIDRKRYTSTKEVLDATLIHQSITGLYETRIDLSQLGGDGGGSSGGSGGGGGTLGDQGSRGSDPLPEPRVTLTVEGIPTEFLVNTGAEHSVLTKPMGKMGSKRTVVAGATGSKVYPWTTKRLLKIGQKQVTHSFLVIPECPAPLLGRDLLTKLKAQIQFSTEGPQVTWEDRPAMCLVLNLEEEYRLHEKPVPPSIDPSWLQLFPMVWAEKAGMGLANQVPPVVVELKSDASPVAVRQYPMSKEAREGIRPHIQRFLDLGILVPCQSPWNTPLLPVKKPGTNDYRPVQDLREVNKRVQDIHPTVPNPYNLLSSLPPSHTWYSVLDLKDAFFCLKLHPNSQPLFAFEWRDPEKGNTGQLTWTRLPQGFKNSPTLFDEALHRDLASFRALNPQVVMLQYVDDLLVAAPTYRDCKEGTRRLLQELSKLGYRVSAKKAQLCREEVTYLGYLLKGGKRWLTPARKATVMKIPTPTTPRQVREFLGTAGFCRLWIPGFASLAAPLYPLTREKVPFTWTEAHQEAFGRIKEALLSAPALALPDLTKPFALYVDEKEGVARGVLTQTLGPWRRPVAYLSKKLDPVASGWPTCLKAIAAVALLLKDADKLTLGQNVLVIAPHNLESIVRQPPDRWMTNARMTHYQSLLLNERVSFAPPAILNPATLLPVESDDTPIHICSEILAEETGTRPDLRDQPLPGVPAWYTDGSSFIMDGRRQAGAAIVDNKRTVWASNLPEGTSAQKAELIALTQALRLAEGKSINIYTDSRYAFATAHVHGAIYKQRGLLTSAGKDIKNKEEILALLEAIHLPKRVAIIHCPGHQRGTDPVATGNRKADEAAKQAAQSTRILTETTKNAGKRTADGSEFEKRTADGSEFESPKKKAKVE

SEQ ID NO: 6859 - protein, 2125 aa, synthetic construct
MPAAKRVKLDGGDKKYSIGLDIGTNSVGWAVITDEYKVPSKKFKVLGNTDRHSIKKNLIGALLFDSGETAEATRLKRTARRRYTRRKNRICYLQEIFSNEMAKVDDSFFHRLEESFLVEEDKKHERHPIFGNIVDEVAYHEKYPTIYHLRKKLVDSTDKADLRLIYLALAHMIKFRGHFLIEGDLNPDNSDVDKLFIQLVQTYNQLFEENPINASGVDAKAILSARLSKSRRLENLIAQLPGEKKNGLFGNLIALSLGLTPNFKSNFDLAEDAKLQLSKDTYDDDLDNLLAQIGDQYADLFLAAKNLSDAILLSDILRVNTEITKAPLSASMIKRYDEHHQDLTLLKALVRQQLPEKYKEIFFDQSKNGYAGYIDGGASQEEFYKFIKPILEKMDGTEELLVKLNREDLLRKQRTFDNGSIPHQIHLGELHAILRRQEDFYPFLKDNREKIEKILTFRIPYYVGPLARGNSRFAWMTRKSEETITPWNFEEVVDKGASAQSFIERMTNFDKNLPNEKVLPKHSLLYEYFTVYNELTKVKYVTEGMRKPAFLSGEQKKAIVDLLFKTNRKVTVKQLKEDYFKKIECFDSVEISGVEDRFNASLGTYHDLLKIIKDKDFLDNEENEDILEDIVLTLTLFEDREMIEERLKTYAHLFDDKVMKQLKRRRYTGWGRLSRKLINGIRDKQSGKTILDFLKSDGFANRNFMQLIHDDSLTFKEDIQKAQVSGQGDSLHEHIANLAGSPAIKKGILQTVKVVDELVKVMGRHKPENIVIEMARENQTTQKGQKNSRERMKRIEEGIKELGSQILKEHPVENTQLQNEKLYLYYLQNGRDMYVDQELDINRLSDYDVDHIVPQSFLKDDSIDNKVLTRSDKARGKSDNVPSEEVVKKMKNYWRQLLNAKLITQRKFDNLTKAERGGLSELDKAGFIKRQLVETRQITKHVAQILDSRMNTKYDENDKLIREVKVITLKSKLVSDFRKDFQFYKVREINNYHHAHDAYLNAVVGTALIKKYPKLESEFVYGDYKVYDVRKMIAKSEQEIGKATAKYFFYSNIMNFFKTEITLANGEIRKRPLIETNGETGEIVWDKGRDFATVRKVLSMPQVNIVKKTEVQTGGFSKESILPKRNSDKLIARKKDWDPKKYGGFDSPTVAYSVLVVAKVEKGKSKKLKSVKELLGITIMERSSFEKNPIDFLEAKGYKEVKKDLIIKLPKYSLFELENGRKRMLASAGELQKGNELALPSKYVNFLYLASHYEKLKGSPEDNEQKQLFVEQHKHYLDEIIEQISEFSKRVILADANLDKVLSAYNKHRDKPIREQAENIIHLFTLTNLGAPAAFKYFDTTIDRKRYTSTKEVLDATLIHQSITGLYETRIDLSQLGGDGGGSSGGSGGGGGLLGRDLLTKLKAQIQFSTEGPQVTWEDRPAMCLVLNLEEEYRLHEKPVPPSIDPSWLQLFPMVWAEKAGMGLANQVPPVVVELKSDASPVAVRQYPMSKEAREGIRPHIQRFLDLGILVPCQSPWNTPLLPVKKPGTNDYRPVQDLREVNKRVQDIHPTVPNPYNLLSSLPPSHTWYSVLDLKDAFFCLKLHPNSQPLFAFEWRDPEKGNTGQLTWTRLPQGFKNSPTLFNEALHRDLASFRALNPQVVMLQYVDDLLVAAPTYRDCKEGTRRLLQELSKLGYRVSAKKAQLCREEVTYLGYLLKGGKRWLTPARKATVMKIPTPTTPRQVREFLGTAGFCRLWIPGFASLAAPLYPLTRPKVPFTWTEAHQEAFGRIKEALLSAPALALPDLTKPFALYVDEKEGVARGVLTQTLGPWRRPVAYLSKKLDPVASGWPTCLKAIAAVALLLKDADKLTLGQNVLVIAPHNLESIVRQPPDRWMTNARMTHYQSLLLNERVSFAPPAILNPATLLPVESDDTPIHICSEILAEETGTRPDLRDQPLPGVPAWYTDGSSFIMDGRRQAGAAIVDNKRTVWASNLPEGTSAQKAELIALTQALRLAEGKSINIYTDSRYAFATAHVHGAIYKQRGWLTSAGKDIKNKEEILALLEAIHLPKRVAIIHCPGHQRGTDPVATGNRKADEAAKQAAQSTRILTETTKNAGKRTADGSEFEKRTADGSEFESPKKKAKVE

SEQ ID NO: 6860 - protein, 2125 aa, synthetic construct
MPAAKRVKLDGGDKKYSIGLDIGTNSVGWAVITDEYKVPSKKFKVLGNTDRHSIKKNLIGALLFDSGETAEATRLKRTARRRYTRRKNRICYLQEIFSNEMAKVDDSFFHRLEESFLVEEDKKHERHPIFGNIVDEVAYHEKYPTIYHLRKKLVDSTDKADLRLIYLALAHMIKFRGHFLIEGDLNPDNSDVDKLFIQLVQTYNQLFEENPINASGVDAKAILSARLSKSRRLENLIAQLPGEKKNGLFGNLIALSLGLTPNFKSNFDLAEDAKLQLSKDTYDDDLDNLLAQIGDQYADLFLAAKNLSDAILLSDILRVNTEITKAPLSASMIKRYDEHHQDLTLLKALVRQQLPEKYKEIFFDQSKNGYAGYIDGGASQEEFYKFIKPILEKMDGTEELLVKLNREDLLRKQRTFDNGSIPHQIHLGELHAILRRQEDFYPFLKDNREKIEKILTFRIPYYVGPLARGNSRFAWMTRKSEETITPWNFEEVVDKGASAQSFIERMTNFDKNLPNEKVLPKHSLLYEYFTVYNELTKVKYVTEGMRKPAFLSGEQKKAIVDLLFKTNRKVTVKQLKEDYFKKIECFDSVEISGVEDRFNASLGTYHDLLKIIKDKDFLDNEENEDILEDIVLTLTLFEDREMIEERLKTYAHLFDDKVMKQLKRRRYTGWGRLSRKLINGIRDKQSGKTILDFLKSDGFANRNFMQLIHDDSLTFKEDIQKAQVSGQGDSLHEHIANLAGSPAIKKGILQTVKVVDELVKVMGRHKPENIVIEMARENQTTQKGQKNSRERMKRIEEGIKELGSQILKEHPVENTQLQNEKLYLYYLQNGRDMYVDQELDINRLSDYDVDHIVPQSFLKDDSIDNKVLTRSDKARGKSDNVPSEEVVKKMKNYWRQLLNAKLITQRKFDNLTKAERGGLSELDKAGFIKRQLVETRQITKHVAQILDSRMNTKYDENDKLIREVKVITLKSKLVSDFRKDFQFYKVREINNYHHAHDAYLNAVVGTALIKKYPKLESEFVYGDYKVYDVRKMIAKSEQEIGKATAKYFFYSNIMNFFKTEITLANGEIRKRPLIETNGETGEIVWDKGRDFATVRKVLSMPQVNIVKKTEVQTGGFSKESILPKRNSDKLIARKKDWDPKKYGGFDSPTVAYSVLVVAKVEKGKSKKLKSVKELLGITIMERSSFEKNPIDFLEAKGYKEVKKDLIIKLPKYSLFELENGRKRMLASAGELQKGNELALPSKYVNFLYLASHYEKLKGSPEDNEQKQLFVEQHKHYLDEIIEQISEFSKRVILADANLDKVLSAYNKHRDKPIREQAENIIHLFTLTNLGAPAAFKYFDTTIDRKRYTSTKEVLDATLIHQSITGLYETRIDLSQLGGDGGGSSGGSGGGGGLLGRDLLTKLKAQIQFSTEGPQVTWEDRPAMCLVLNLEEEYRLHEKPVPPSIDPSWLQLFPMVWAEKAGMGLANQVPPVVVELKSDASPVAVRQYPMSKEAREGIRPHIQRFLDLGILVPCQSPWNTPLLPVKKPGTNDYRPVQDLREVNKRVQDIHPTVPNPYNLLSSLPPSHTWYSVLDLKDAFFCLKLHPNSQPLFAFEWRDPEKGNTGQLTWTRLPQGFKNSPTLFNEALHRDLASFRALNPQVVMLQYVDDLLVAAPTYRDCKEGTRRLLQELSKLGYRVSAKKAQLCREEVTYLGYLLKGGKRWLTPARKATVMKIPTPTTPRQVREFLGKAGFCRLFIPGFASLAAPLYPLTRPKVPFTWTEAHQEAFGRIKEALLSAPALALPDLTKPFALYVDEKEGVARGVLTQTLGPWRRPVAYLSKKLDPVASGWPTCLKAIAAVALLLKDADKLTLGQNVLVIAPHNLESIVRQPPDRWMTNARMTHYQSLLLNERVSFAPPAILNPATLLPVESDDTPIHICSEILAEETGTRPDLRDQPLPGVPAWYTDGSSFIMDGRRQAGAAIVDNKRTVWASNLPEGTSAQKAELIALTQALRLAEGKSINIYTDSRYAFATAHVHGAIYKQRGWLTSAGKDIKNKEEILALLEAIHLPKRVAIIHCPGHQRGTDPVATGNRKADEAAKQAAQSTRILTETTKNAGKRTADGSEFEKRTADGSEFESPKKKAKVE

SEQ ID NO: 6861 - protein, 2216 aa, synthetic construct
MPAAKRVKLDGGDKKYSIGLDIGTNSVGWAVITDEYKVPSKKFKVLGNTDRHSIKKNLIGALLFDSGETAEATRLKRTARRRYTRRKNRICYLQEIFSNEMAKVDDSFFHRLEESFLVEEDKKHERHPIFGNIVDEVAYHEKYPTIYHLRKKLVDSTDKADLRLIYLALAHMIKFRGHFLIEGDLNPDNSDVDKLFIQLVQTYNQLFEENPINASGVDAKAILSARLSKSRRLENLIAQLPGEKKNGLFGNLIALSLGLTPNFKSNFDLAEDAKLQLSKDTYDDDLDNLLAQIGDQYADLFLAAKNLSDAILLSDILRVNTEITKAPLSASMIKRYDEHHQDLTLLKALVRQQLPEKYKEIFFDQSKNGYAGYIDGGASQEEFYKFIKPILEKMDGTEELLVKLNREDLLRKQRTFDNGSIPHQIHLGELHAILRRQEDFYPFLKDNREKIEKILTFRIPYYVGPLARGNSRFAWMTRKSEETITPWNFEEVVDKGASAQSFIERMTNFDKNLPNEKVLPKHSLLYEYFTVYNELTKVKYVTEGMRKPAFLSGEQKKAIVDLLFKTNRKVTVKQLKEDYFKKIECFDSVEISGVEDRFNASLGTYHDLLKIIKDKDFLDNEENEDILEDIVLTLTLFEDREMIEERLKTYAHLFDDKVMKQLKRRRYTGWGRLSRKLINGIRDKQSGKTILDFLKSDGFANRNFMQLIHDDSLTFKEDIQKAQVSGQGDSLHEHIANLAGSPAIKKGILQTVKVVDELVKVMGRHKPENIVIEMARENQTTQKGQKNSRERMKRIEEGIKELGSQILKEHPVENTQLQNEKLYLYYLQNGRDMYVDQELDINRLSDYDVDHIVPQSFLKDDSIDNKVLTRSDKARGKSDNVPSEEVVKKMKNYWRQLLNAKLITQRKFDNLTKAERGGLSELDKAGFIKRQLVETRQITKHVAQILDSRMNTKYDENDKLIREVKVITLKSKLVSDFRKDFQFYKVREINNYHHAHDAYLNAVVGTALIKKYPKLESEFVYGDYKVYDVRKMIAKSEQEIGKATAKYFFYSNIMNFFKTEITLANGEIRKRPLIETNGETGEIVWDKGRDFATVRKVLSMPQVNIVKKTEVQTGGFSKESILPKRNSDKLIARKKDWDPKKYGGFDSPTVAYSVLVVAKVEKGKSKKLKSVKELLGITIMERSSFEKNPIDFLEAKGYKEVKKDLIIKLPKYSLFELENGRKRMLASAGELQKGNELALPSKYVNFLYLASHYEKLKGSPEDNEQKQLFVEQHKHYLDEIIEQISEFSKRVILADANLDKVLSAYNKHRDKPIREQAENIIHLFTLTNLGAPAAFKYFDTTIDRKRYTSTKEVLDATLIHQSITGLYETRIDLSQLGGDGGGSSGGSGGGGGTLGDQGSRGSDPLPEPRVTLTVEGIPTEFLVNTGAEHSVLTKPMGKMGSKRTVVAGATGSKVYPWTTKRLLKIGQKQVTHSFLVIPECPAPLLGRDLLTKLKAQIQFSTEGPQVTWEDRPAMCLVLNLEEEYRLHEKPVPPSIDPSWLQLFPMVWAEKAGMGLANQVPPVVVELKSDASPVAVRQYPMSKEAREGIRPHIQRFLDLGILVPCQSPWNTPLLPVKKPGTNDYRPVQDLREVNKRVQDIHPTVPNPYNLLSSLPPSHTWYSVLDLKDAFFCLKLHPNSQPLFAFEWRDPEKGNTGQLTWTRLPQGFKNSPTLFNEALHRDLASFRALNPQVVMLQYVDDLLVAAPTYRDCKEGTRRLLQELSKLGYRVSAKKAQLCREEVTYLGYLLKGGKRWLTPARKATVMKIPTPTTPRQVREFLGTAGFCRLWIPGFASLAAPLYPLTRPKVPFTWTEAHQEAFGRIKEALLSAPALALPDLTKPFALYVDEKEGVARGVLTQTLGPWRRPVAYLSKKLDPVASGWPTCLKAIAAVALLLKDADKLTLGQNVLVIAPHNLESIVRQPPDRWMTNARMTHYQSLLLNERVSFAPPAILNPATLLPVESDDTPIHICSEILAEETGTRPDLRDQPLPGVPAWYTDGSSFIMDGRRQAGAAIVDNKRTVWASNLPEGTSAQKAELIALTQALRLAEGKSINIYTDSRYAFATAHVHGAIYKQRGWLTSAGKDIKNKEEILALLEAIHLPKRVAIIHCPGHQRGTDPVATGNRKADEAAKQAAQSTRILTETTKNAGKRTADGSEFEKRTADGSEFESPKKKAKVE

SEQ ID NO: 6862 - protein, 2216 aa, synthetic construct
MPAAKRVKLDGGDKKYSIGLDIGTNSVGWAVITDEYKVPSKKFKVLGNTDRHSIKKNLIGALLFDSGETAEATRLKRTARRRYTRRKNRICYLQEIFSNEMAKVDDSFFHRLEESFLVEEDKKHERHPIFGNIVDEVAYHEKYPTIYHLRKKLVDSTDKADLRLIYLALAHMIKFRGHFLIEGDLNPDNSDVDKLFIQLVQTYNQLFEENPINASGVDAKAILSARLSKSRRLENLIAQLPGEKKNGLFGNLIALSLGLTPNFKSNFDLAEDAKLQLSKDTYDDDLDNLLAQIGDQYADLFLAAKNLSDAILLSDILRVNTEITKAPLSASMIKRYDEHHQDLTLLKALVRQQLPEKYKEIFFDQSKNGYAGYIDGGASQEEFYKFIKPILEKMDGTEELLVKLNREDLLRKQRTFDNGSIPHQIHLGELHAILRRQEDFYPFLKDNREKIEKILTFRIPYYVGPLARGNSRFAWMTRKSEETITPWNFEEVVDKGASAQSFIERMTNFDKNLPNEKVLPKHSLLYEYFTVYNELTKVKYVTEGMRKPAFLSGEQKKAIVDLLFKTNRKVTVKQLKEDYFKKIECFDSVEISGVEDRFNASLGTYHDLLKIIKDKDFLDNEENEDILEDIVLTLTLFEDREMIEERLKTYAHLFDDKVMKQLKRRRYTGWGRLSRKLINGIRDKQSGKTILDFLKSDGFANRNFMQLIHDDSLTFKEDIQKAQVSGQGDSLHEHIANLAGSPAIKKGILQTVKVVDELVKVMGRHKPENIVIEMARENQTTQKGQKNSRERMKRIEEGIKELGSQILKEHPVENTQLQNEKLYLYYLQNGRDMYVDQELDINRLSDYDVDHIVPQSFLKDDSIDNKVLTRSDKARGKSDNVPSEEVVKKMKNYWRQLLNAKLITQRKFDNLTKAERGGLSELDKAGFIKRQLVETRQITKHVAQILDSRMNTKYDENDKLIREVKVITLKSKLVSDFRKDFQFYKVREINNYHHAHDAYLNAVVGTALIKKYPKLESEFVYGDYKVYDVRKMIAKSEQEIGKATAKYFFYSNIMNFFKTEITLANGEIRKRPLIETNGETGEIVWDKGRDFATVRKVLSMPQVNIVKKTEVQTGGFSKESILPKRNSDKLIARKKDWDPKKYGGFDSPTVAYSVLVVAKVEKGKSKKLKSVKELLGITIMERSSFEKNPIDFLEAKGYKEVKKDLIIKLPKYSLFELENGRKRMLASAGELQKGNELALPSKYVNFLYLASHYEKLKGSPEDNEQKQLFVEQHKHYLDEIIEQISEFSKRVILADANLDKVLSAYNKHRDKPIREQAENIIHLFTLTNLGAPAAFKYFDTTIDRKRYTSTKEVLDATLIHQSITGLYETRIDLSQLGGDGGGSSGGSGGGGGTLGDQGSRGSDPLPEPRVTLTVEGIPTEFLVNTGAEHSVLTKPMGKMGSKRTVVAGATGSKVYPWTTKRLLKIGQKQVTHSFLVIPECPAPLLGRDLLTKLKAQIQFSTEGPQVTWEDRPAMCLVLNLEEEYRLHEKPVPPSIDPSWLQLFPMVWAEKAGMGLANQVPPVVVELKSDASPVAVRQYPMSKEAREGIRPHIQRFLDLGILVPCQSPWNTPLLPVKKPGTNDYRPVQDLREVNKRVQDIHPTVPNPYNLLSSLPPSHTWYSVLDLKDAFFCLKLHPNSQPLFAFEWRDPEKGNTGQLTWTRLPQGFKNSPTLFNEALHRDLASFRALNPQVVMLQYVDDLLVAAPTYRDCKEGTRRLLQELSKLGYRVSAKKAQLCREEVTYLGYLLKGGKRWLTPARKATVMKIPTPTTPRQVREFLGKAGFCRLFIPGFASLAAPLYPLTRPKVPFTWTEAHQEAFGRIKEALLSAPALALPDLTKPFALYVDEKEGVARGVLTQTLGPWRRPVAYLSKKLDPVASGWPTCLKAIAAVALLLKDADKLTLGQNVLVIAPHNLESIVRQPPDRWMTNARMTHYQSLLLNERVSFAPPAILNPATLLPVESDDTPIHICSEILAEETGTRPDLRDQPLPGVPAWYTDGSSFIMDGRRQAGAAIVDNKRTVWASNLPEGTSAQKAELIALTQALRLAEGKSINIYTDSRYAFATAHVHGAIYKQRGWLTSAGKDIKNKEEILALLEAIHLPKRVAIIHCPGHQRGTDPVATGNRKADEAAKQAAQSTRILTETTKNAGKRTADGSEFEKRTADGSEFESPKKKAKVE

SEQ ID NO: 6863 - protein, 2094 aa, synthetic construct
MPAAKRVKLDGGDKKYSIGLDIGTNSVGWAVITDEYKVPSKKFKVLGNTDRHSIKKNLIGALLFDSGETAEATRLKRTARRRYTRRKNRICYLQEIFSNEMAKVDDSFFHRLEESFLVEEDKKHERHPIFGNIVDEVAYHEKYPTIYHLRKKLVDSTDKADLRLIYLALAHMIKFRGHFLIEGDLNPDNSDVDKLFIQLVQTYNQLFEENPINASGVDAKAILSARLSKSRRLENLIAQLPGEKKNGLFGNLIALSLGLTPNFKSNFDLAEDAKLQLSKDTYDDDLDNLLAQIGDQYADLFLAAKNLSDAILLSDILRVNTEITKAPLSASMIKRYDEHHQDLTLLKALVRQQLPEKYKEIFFDQSKNGYAGYIDGGASQEEFYKFIKPILEKMDGTEELLVKLNREDLLRKQRTFDNGSIPHQIHLGELHAILRRQEDFYPFLKDNREKIEKILTFRIPYYVGPLARGNSRFAWMTRKSEETITPWNFEEVVDKGASAQSFIERMTNFDKNLPNEKVLPKHSLLYEYFTVYNELTKVKYVTEGMRKPAFLSGEQKKAIVDLLFKTNRKVTVKQLKEDYFKKIECFDSVEISGVEDRFNASLGTYHDLLKIIKDKDFLDNEENEDILEDIVLTLTLFEDREMIEERLKTYAHLFDDKVMKQLKRRRYTGWGRLSRKLINGIRDKQSGKTILDFLKSDGFANRNFMQLIHDDSLTFKEDIQKAQVSGQGDSLHEHIANLAGSPAIKKGILQTVKVVDELVKVMGRHKPENIVIEMARENQTTQKGQKNSRERMKRIEEGIKELGSQILKEHPVENTQLQNEKLYLYYLQNGRDMYVDQELDINRLSDYDVDHIVPQSFLKDDSIDNKVLTRSDKARGKSDNVPSEEVVKKMKNYWRQLLNAKLITQRKFDNLTKAERGGLSELDKAGFIKRQLVETRQITKHVAQILDSRMNTKYDENDKLIREVKVITLKSKLVSDFRKDFQFYKVREINNYHHAHDAYLNAVVGTALIKKYPKLESEFVYGDYKVYDVRKMIAKSEQEIGKATAKYFFYSNIMNFFKTEITLANGEIRKRPLIETNGETGEIVWDKGRDFATVRKVLSMPQVNIVKKTEVQTGGFSKESILPKRNSDKLIARKKDWDPKKYGGFDSPTVAYSVLVVAKVEKGKSKKLKSVKELLGITIMERSSFEKNPIDFLEAKGYKEVKKDLIIKLPKYSLFELENGRKRMLASAGELQKGNELALPSKYVNFLYLASHYEKLKGSPEDNEQKQLFVEQHKHYLDEIIEQISEFSKRVILADANLDKVLSAYNKHRDKPIREQAENIIHLFTLTNLGAPAAFKYFDTTIDRKRYTSTKEVLDATLIHQSITGLYETRIDLSQLGGDGGGSSGGSGGGGGTLNLEDEYRLYETSAEPEVSPGSTWLSDFPQAWAETGGMGLAVRQAPLIIPLKATSTPVSIKQYPMSQEAKLGIKPHIQRLLDQGILVPCQSPWNTPLLPVKKPGTNDYRPVQDLREVNKRVEDIHPTVPNPYNLLSGLPPSHRWYTVLDLKDAFFCLRLHPTSQPLFAFEWRDPGMGISGQLTWTRLPQGFKNSPTLFNEALHRDLADFRIQHPDLILLQYVDDILLAATSELDCQQGTRALLLTLGNLGYRASAKKAQLCQKQVKYLGYLLKEGQRWLTEARKETVMGQPTPKTPRQLREFLGTAGFCRLWIPGFAEMAAPLYPLTKPGTLFNWGPDQQKAYQEIKQALLTAPALGLPDLTKPFELFVDEKQGYAKGVLTQKLGPWRRPVAYLSKKLDPVAAGWPPCLRMVAAIAVLRKDAGKLTMGQPLVILAPHAVEALVKQPPDRWLSNARMTHYQAMLLDTDRVQFGPVVALNPATLLPLPEEGAPHDCLEILAETHGTRPDLTDQPIPDADHTWYTDGSSFLQEGQRKAGAAVTTETEVIWARALPAGTSAQRAELIALTQALKMAEGKRLNVYTDSRYAFATAHIHGEIYRRRGWLTSEGREIKNKSEILALLKALFLPKRLSIIHCLGHQKGDSAEARGNRLADQAAREAAIKTPPDTSTLLAGKRTADGSEFEKRTADGSEFESPKKKAKVE

SEQ ID NO: 6864 - protein, 2094 aa, synthetic construct
MPAAKRVKLDGGDKKYSIGLDIGTNSVGWAVITDEYKVPSKKFKVLGNTDRHSIKKNLIGALLFDSGETAEATRLKRTARRRYTRRKNRICYLQEIFSNEMAKVDDSFFHRLEESFLVEEDKKHERHPIFGNIVDEVAYHEKYPTIYHLRKKLVDSTDKADLRLIYLALAHMIKFRGHFLIEGDLNPDNSDVDKLFIQLVQTYNQLFEENPINASGVDAKAILSARLSKSRRLENLIAQLPGEKKNGLFGNLIALSLGLTPNFKSNFDLAEDAKLQLSKDTYDDDLDNLLAQIGDQYADLFLAAKNLSDAILLSDILRVNTEITKAPLSASMIKRYDEHHQDLTLLKALVRQQLPEKYKEIFFDQSKNGYAGYIDGGASQEEFYKFIKPILEKMDGTEELLVKLNREDLLRKQRTFDNGSIPHQIHLGELHAILRRQEDFYPFLKDNREKIEKILTFRIPYYVGPLARGNSRFAWMTRKSEETITPWNFEEVVDKGASAQSFIERMTNFDKNLPNEKVLPKHSLLYEYFTVYNELTKVKYVTEGMRKPAFLSGEQKKAIVDLLFKTNRKVTVKQLKEDYFKKIECFDSVEISGVEDRFNASLGTYHDLLKIIKDKDFLDNEENEDILEDIVLTLTLFEDREMIEERLKTYAHLFDDKVMKQLKRRRYTGWGRLSRKLINGIRDKQSGKTILDFLKSDGFANRNFMQLIHDDSLTFKEDIQKAQVSGQGDSLHEHIANLAGSPAIKKGILQTVKVVDELVKVMGRHKPENIVIEMARENQTTQKGQKNSRERMKRIEEGIKELGSQILKEHPVENTQLQNEKLYLYYLQNGRDMYVDQELDINRLSDYDVDHIVPQSFLKDDSIDNKVLTRSDKARGKSDNVPSEEVVKKMKNYWRQLLNAKLITQRKFDNLTKAERGGLSELDKAGFIKRQLVETRQITKHVAQILDSRMNTKYDENDKLIREVKVITLKSKLVSDFRKDFQFYKVREINNYHHAHDAYLNAVVGTALIKKYPKLESEFVYGDYKVYDVRKMIAKSEQEIGKATAKYFFYSNIMNFFKTEITLANGEIRKRPLIETNGETGEIVWDKGRDFATVRKVLSMPQVNIVKKTEVQTGGFSKESILPKRNSDKLIARKKDWDPKKYGGFDSPTVAYSVLVVAKVEKGKSKKLKSVKELLGITIMERSSFEKNPIDFLEAKGYKEVKKDLIIKLPKYSLFELENGRKRMLASAGELQKGNELALPSKYVNFLYLASHYEKLKGSPEDNEQKQLFVEQHKHYLDEIIEQISEFSKRVILADANLDKVLSAYNKHRDKPIREQAENIIHLFTLTNLGAPAAFKYFDTTIDRKRYTSTKEVLDATLIHQSITGLYETRIDLSQLGGDGGGSSGGSGGGGGTLNIEDEHRLHETSKEPDVSLGSTWLSDFPQAWAETGGMGLAVRQAPLIIPLKATSTPVSIKQYPMSQEARLGIKPHIQRLLDQGILVPCQSPWNTPLLPVKKPGTNDYRPVQDLREVNKRVEDIHPTVPNPYNLLSGLPPSHQWYTVLDLKDAFFCLRLHPTSQPLFAFEWRDPEMGISGQLTWTRLPQGFKNSPTLFNEALHRDLADFRIQHPDLILLQYVDDLLLAATSELDCQQGTRALLQTLGNLGYRASAKKAQICQKQVKYLGYLLKEGQRWLTEARKETVMGQPTPKTPRQLREFLGTAGFCRLWIPGFAEMAAPLYPLTKPGTLFNWGPDQQKAYQEIKQALLTAPALGLPDLTKPFELFVDEKQGYAKGVLTQKLGPWRRPVAYLSKKLDPVAAGWPPCLRMVAAIAVLTKDAGKLTMGQPLVILAPHAVEALVKQPPDRWLSNARMTHYQALLLDTDRVQFGPVVALNPATLLPLPEEGLQHNCLDILAEAHGTRPDLTDQPLPDADHTWYTDGSSLLQEGQRKAGAAVTTETEVIWAKALPAGTSAQRAELIALTQALKMAEGKKLNVYTDSRYAFATAHIHGEIYRRRGWLTSEGKEIKNKDEILALLKALFLPKRLSIIHCPGHQKGHSAEARGNRMADQAARKAAITETPDTSTLLAGKRTADGSEFEKRTADGSEFESPKKKAKVE

SEQ ID NO: 6865 - protein, 2094 aa, synthetic construct
MPAAKRVKLDGGDKKYSIGLDIGTNSVGWAVITDEYKVPSKKFKVLGNTDRHSIKKNLIGALLFDSGETAEATRLKRTARRRYTRRKNRICYLQEIFSNEMAKVDDSFFHRLEESFLVEEDKKHERHPIFGNIVDEVAYHEKYPTIYHLRKKLVDSTDKADLRLIYLALAHMIKFRGHFLIEGDLNPDNSDVDKLFIQLVQTYNQLFEENPINASGVDAKAILSARLSKSRRLENLIAQLPGEKKNGLFGNLIALSLGLTPNFKSNFDLAEDAKLQLSKDTYDDDLDNLLAQIGDQYADLFLAAKNLSDAILLSDILRVNTEITKAPLSASMIKRYDEHHQDLTLLKALVRQQLPEKYKEIFFDQSKNGYAGYIDGGASQEEFYKFIKPILEKMDGTEELLVKLNREDLLRKQRTFDNGSIPHQIHLGELHAILRRQEDFYPFLKDNREKIEKILTFRIPYYVGPLARGNSRFAWMTRKSEETITPWNFEEVVDKGASAQSFIERMTNFDKNLPNEKVLPKHSLLYEYFTVYNELTKVKYVTEGMRKPAFLSGEQKKAIVDLLFKTNRKVTVKQLKEDYFKKIECFDSVEISGVEDRFNASLGTYHDLLKIIKDKDFLDNEENEDILEDIVLTLTLFEDREMIEERLKTYAHLFDDKVMKQLKRRRYTGWGRLSRKLINGIRDKQSGKTILDFLKSDGFANRNFMQLIHDDSLTFKEDIQKAQVSGQGDSLHEHIANLAGSPAIKKGILQTVKVVDELVKVMGRHKPENIVIEMARENQTTQKGQKNSRERMKRIEEGIKELGSQILKEHPVENTQLQNEKLYLYYLQNGRDMYVDQELDINRLSDYDVDHIVPQSFLKDDSIDNKVLTRSDKARGKSDNVPSEEVVKKMKNYWRQLLNAKLITQRKFDNLTKAERGGLSELDKAGFIKRQLVETRQITKHVAQILDSRMNTKYDENDKLIREVKVITLKSKLVSDFRKDFQFYKVREINNYHHAHDAYLNAVVGTALIKKYPKLESEFVYGDYKVYDVRKMIAKSEQEIGKATAKYFFYSNIMNFFKTEITLANGEIRKRPLIETNGETGEIVWDKGRDFATVRKVLSMPQVNIVKKTEVQTGGFSKESILPKRNSDKLIARKKDWDPKKYGGFDSPTVAYSVLVVAKVEKGKSKKLKSVKELLGITIMERSSFEKNPIDFLEAKGYKEVKKDLIIKLPKYSLFELENGRKRMLASAGELQKGNELALPSKYVNFLYLASHYEKLKGSPEDNEQKQLFVEQHKHYLDEIIEQISEFSKRVILADANLDKVLSAYNKHRDKPIREQAENIIHLFTLTNLGAPAAFKYFDTTIDRKRYTSTKEVLDATLIHQSITGLYETRIDLSQLGGDGGGSSGGSGGGGGTLNIEDEHRLHETSKEPDVSLGSTWLSDFPQAWAETGGMGLAVRQAPLIIPLKATSTPVSIKQYPMSQEARLGIKPHIQRLLDQGILVPCQSPWNTPLLPVKKPGTNDYRPVQDLREVNKRVEDIHPTVPNPYNLLSGLPPSHQWYTVLDLKDAFFCLRLHPTSQPLFAFEWRDPEMGISGQLTWTRLPQGFKNSPTLFDEALHRDLADFRIQHPDLILLQYVDDLLLAATSELDCQQGTRALLQTLGNLGYRASAKKAQICQKQVKYLGYLLKEGQRWLTEARKETVMGQPTPKTPRQLREFLGTAGFCRLWIPGFAEMAAPLYPLTKTGTLFNWGPDQQKAYQEIKQALLTAPALGLPDLTKPFELFVDEKQGYAKGVLTQKLGPWRRPVAYLSKKLDPVAAGWPPCLRMVAAIAVLTKDAGKLTMGQPLVILAPHAVEALVKQPPDRWLSNARMTHYQALLLDTDRVQFGPVVALNPATLLPLPEEGLQHNCLDILAEAHGTRPDLTDQPLPDADHTWYTDGSSLLQEGQRKAGAAVTTETEVIWAKALPAGTSAQRAELIALTQALKMAEGKKLNVYTDSRYAFATAHIHGEIYRRRGLLTSEGKEIKNKDEILALLKALFLPKRLSIIHCPGHQKGHSAEARGNRMADQAARKAAITETPDTSTLLAGKRTADGSEFEKRTADGSEFESPKKKAKVE

SEQ ID NO: 6866 - protein, 2094 aa, synthetic construct; identical to SEQ ID NO: 6864

SEQ ID NO: 6867 - protein, 2088 aa, synthetic construct
MPAAKRVKLDGGDKKYSIGLDIGTNSVGWAVITDEYKVPSKKFKVLGNTDRHSIKKNLIGALLFDSGETAEATRLKRTARRRYTRRKNRICYLQEIFSNEMAKVDDSFFHRLEESFLVEEDKKHERHPIFGNIVDEVAYHEKYPTIYHLRKKLVDSTDKADLRLIYLALAHMIKFRGHFLIEGDLNPDNSDVDKLFIQLVQTYNQLFEENPINASGVDAKAILSARLSKSRRLENLIAQLPGEKKNGLFGNLIALSLGLTPNFKSNFDLAEDAKLQLSKDTYDDDLDNLLAQIGDQYADLFLAAKNLSDAILLSDILRVNTEITKAPLSASMIKRYDEHHQDLTLLKALVRQQLPEKYKEIFFDQSKNGYAGYIDGGASQEEFYKFIKPILEKMDGTEELLVKLNREDLLRKQRTFDNGSIPHQIHLGELHAILRRQEDFYPFLKDNREKIEKILTFRIPYYVGPLARGNSRFAWMTRKSEETITPWNFEEVVDKGASAQSFIERMTNFDKNLPNEKVLPKHSLLYEYFTVYNELTKVKYVTEGMRKPAFLSGEQKKAIVDLLFKTNRKVTVKQLKEDYFKKIECFDSVEISGVEDRFNASLGTYHDLLKIIKDKDFLDNEENEDILEDIVLTLTLFEDREMIEERLKTYAHLFDDKVMKQLKRRRYTGWGRLSRKLINGIRDKQSGKTILDFLKSDGFANRNFMQLIHDDSLTFKEDIQKAQVSGQGDSLHEHIANLAGSPAIKKGILQTVKVVDELVKVMGRHKPENIVIEMARENQTTQKGQKNSRERMKRIEEGIKELGSQILKEHPVENTQLQNEKLYLYYLQNGRDMYVDQELDINRLSDYDVDHIVPQSFLKDDSIDNKVLTRSDKARGKSDNVPSEEVVKKMKNYWRQLLNAKLITQRKFDNLTKAERGGLSELDKAGFIKRQLVETRQITKHVAQILDSRMNTKYDENDKLIREVKVITLKSKLVSDFRKDFQFYKVREINNYHHAHDAYLNAVVGTALIKKYPKLESEFVYGDYKVYDVRKMIAKSEQEIGKATAKYFFYSNIMNFFKTEITLANGEIRKRPLIETNGETGEIVWDKGRDFATVRKVLSMPQVNIVKKTEVQTGGFSKESILPKRNSDKLIARKKDWDPKKYGGFDSPTVAYSVLVVAKVEKGKSKKLKSVKELLGITIMERSSFEKNPIDFLEAKGYKEVKKDLIIKLPKYSLFELENGRKRMLASAGELQKGNELALPSKYVNFLYLASHYEKLKGSPEDNEQKQLFVEQHKHYLDEIIEQISEFSKRVILADANLDKVLSAYNKHRDKPIREQAENIIHLFTLTNLGAPAAFKYFDTTIDRKRYTSTKEVLDATLIHQSITGLYETRIDLSQLGGDGGGSSGGSGGGGGTLQLDDEYRLYSPLVKPDQNIQFWLEQFPQAWAETAGMGLAKQVPPQVIQLKASATPVSVRQYPLSKEAQEGIRPHVQRLIQQGILVPVQSPWNTPLLPVRKPGTNDYRPVQDLREVNKRVQDIHPTVPNPYNLLCALPPQRSWYTVLDLKDAFFCLRLHPTSQPLFAFEWRDPGTGRTGQLTWTRLPQGFKNSPTIFDEALHRDLANFRIQHPQVTLLQYVDDLLLAGATKQDCLEGTKALLLELSDLGYRASAKKAQICRREVTYLGYSLRDGQRWLTEARKKTVVQIPAPTTAKQVREFLGTAGFCRLWIPGFATLAAPLYPLTKEKGEFSWAPEHQKAFDAIKKALLSAPALALPDVTKPFTLYVDERKGVARGVLTQTLGPWRRPVAYLSKKLDPVASGWPVCLKAIAAVAILVKDADKLTLGQNITVIAPHALENIVRQPPDRWMTNARMTHYQSLLLTERVTFAPPAALNPATLLPEETDEPVTHDCHQLLIEETGVRKDLTDIPLTGEVLTWFTDGSSYVVEGKRMAGAAVVDGTRTIWASSLPEGTSAQKAELMALTQALRLAEGKSINIYTDSRYAFATAHVHGAIYKQRGLLTSAGREIKNKEEILSLLEALHLPKRLAIIHCPGHQKAKDPISRGNQMADRVAKQAAQGVNLLAGKRTADGSEFEKRTADGSEFESPKKKAKVE

SEQ ID NO: 6868 - protein, 2088 aa, synthetic construct; identical to SEQ ID NO: 6867

SEQ ID NO: 6869 - protein, 2092 aa, synthetic construct
MPAAKRVKLDGGDKKYSIGLDIGTNSVGWAVITDEYKVPSKKFKVLGNTDRHSIKKNLIGALLFDSGETAEATRLKRTARRRYTRRKNRICYLQEIFSNEMAKVDDSFFHRLEESFLVEEDKKHERHPIFGNIVDEVAYHEKYPTIYHLRKKLVDSTDKADLRLIYLALAHMIKFRGHFLIEGDLNPDNSDVDKLFIQLVQTYNQLFEENPINASGVDAKAILSARLSKSRRLENLIAQLPGEKKNGLFGNLIALSLGLTPNFKSNFDLAEDAKLQLSKDTYDDDLDNLLAQIGDQYADLFLAAKNLSDAILLSDILRVNTEITKAPLSASMIKRYDEHHQDLTLLKALVRQQLPEKYKEIFFDQSKNGYAGYIDGGASQEEFYKFIKPILEKMDGTEELLVKLNREDLLRKQRTFDNGSIPHQIHLGELHAILRRQEDFYPFLKDNREKIEKILTFRIPYYVGPLARGNSRFAWMTRKSEETITPWNFEEVVDKGASAQSFIERMTNFDKNLPNEKVLPKHSLLYEYFTVYNELTKVKYVTEGMRKPAFLSGEQKKAIVDLLFKTNRKVTVKQLKEDYFKKIECFDSVEISGVEDRFNASLGTYHDLLKIIKDKDFLDNEENEDILEDIVLTLTLFEDREMIEERLKTYAHLFDDKVMKQLKRRRYTGWGRLSRKLINGIRDKQSGKTILDFLKSDGFANRNFMQLIHDDSLTFKEDIQKAQVSGQGDSLHEHIANLAGSPAIKKGILQTVKVVDELVKVMGRHKPENIVIEMARENQTTQKGQKNSRERMKRIEEGIKELGSQILKEHPVENTQLQNEKLYLYYLQNGRDMYVDQELDINRLSDYDVDHIVPQSFLKDDSIDNKVLTRSDKARGKSDNVPSEEVVKKMKNYWRQLLNAKLITQRKFDNLTKAERGGLSELDKAGFIKRQLVETRQITKHVAQILDSRMNTKYDENDKLIREVKVITLKSKLVSDFRKDFQFYKVREINNYHHAHDAYLNAVVGTALIKKYPKLESEFVYGDYKVYDVRKMIAKSEQEIGKATAKYFFYSNIMNFFKTEITLANGEIRKRPLIETNGETGEIVWDKGRDFATVRKVLSMPQVNIVKKTEVQTGGFSKESILPKRNSDKLIARKKDWDPKKYGGFDSPTVAYSVLVVAKVEKGKSKKLKSVKELLGITIMERSSFEKNPIDFLEAKGYKEVKKDLIIKLPKYSLFELENGRKRMLASAGELQKGNELALPSKYVNFLYLASHYEKLKGSPEDNEQKQLFVEQHKHYLDEIIEQISEFSKRVILADANLDKVLSAYNKHRDKPIREQAENIIHLFTLTNLGAPAAFKYFDTTIDRKRYTSTKEVLDATLIHQSITGLYETRIDLSQLGGDGGGSSGGSGGGGGVLNLEEEYRLHEKPVPSSIDPSWLQLFPTVWAERAGMGLANQVPPVVVELRSGASPVAVRQYPMSKEAREGIRPHIQRFLDLGVLVPCQSPWNTPLLPVKKPGTNDYRPVQDLREINKRVQDIHPTVPNPYNLLSSLPPSHTWYSVLDLKDAFFCLKLHPNSQPLFAFEWRDPEKGNTGQLTWTRLPQGFKNSPTLFNEALHRDLAPFRALNPQVVLLQYVDDLLVAAPTYRDCKEGTQKLLQELSKLGYRVSAKKAQLCQKEVTYLGYLLKEGKRWLTPARKATVMKIPPPTTPRQVREFLGTAGFCRLWIPGFASLAAPLYPLTKPSIPFIWTEEHQKAFDRIKEALLSAPALALPDLTKPFTLYVDERAGVARGVLTQTLGPWRRPVAYLSKKLDPVASGWPTCLKAVAAVALLLKDADKLTLGQNVTVIASHSLESIVRQPPDRWMTNARMTHYQSLLLNERVSFAPPAVLNPATLLPVESEATPVHRCSEILAEETGTRRDLKDQPLPGVPAWYTDGSSFIAEGKRRAGAAIVDGKRTVWASSLPEGTSAQKAELVALTQALRLAEGKDINIYTDSRYAFATAHIHGAIYKQRGWLTSAGKDIKNKEEILALLEAIHLPKRVAIIHCPGHQKGNDPVATGNRRADEAAKQAALSTRVLAETTKPAGKRTADGSEFEKRTADGSEFESPKKKAKVE

SEQ ID NO: 6870 - protein, 2092 aa, synthetic construct
MPAAKRVKLDGGDKKYSIGLDIGTNSVGWAVITDEYKVPSKKFKVLGNTDRHSIKKNLIGALLFDSGETAEATRLKRTARRRYTRRKNRICYLQEIFSNEMAKVDDSFFHRLEESFLVEEDKKHERHPIFGNIVDEVAYHEKYPTIYHLRKKLVDSTDKADLRLIYLALAHMIKFRGHFLIEGDLNPDNSDVDKLFIQLVQTYNQLFEENPINASGVDAKAILSARLSKSRRLENLIAQLPGEKKNGLFGNLIALSLGLTPNFKSNFDLAEDAKLQLSKDTYDDDLDNLLAQIGDQYADLFLAAKNLSDAILLSDILRVNTEITKAPLSASMIKRYDEHHQDLTLLKALVRQQLPEKYKEIFFDQSKNGYAGYIDGGASQEEFYKFIKPILEKMDGTEELLVKLNREDLLRKQRTFDNGSIPHQIHLGELHAILRRQEDFYPFLKDNREKIEKILTFRIPYYVGPLARGNSRFAWMTRKSEETITPWNFEEVVDKGASAQSFIERMTNFDKNLPNEKVLPKHSLLYEYFTVYNELTKVKYVTEGMRKPAFLSGEQKKAIVDLLFKTNRKVTVKQLKEDYFKKIECFDSVEISGVEDRFNASLGTYHDLLKIIKDKDFLDNEENEDILEDIVLTLTLFEDREMIEERLKTYAHLFDDKVMKQLKRRRYTGWGRLSRKLINGIRDKQSGKTILDFLKSDGFANRNFMQLIHDDSLTFKEDIQKAQVSGQGDSLHEHIANLAGSPAIKKGILQTVKVVDELVKVMGRHKPENIVIEMARENQTTQKGQKNSRERMKRIEEGIKELGSQILKEHPVENTQLQNEKLYLYYLQNGRDMYVDQELDINRLSDYDVDHIVPQSFLKDDSIDNKVLTRSDKARGKSDNVPSEEVVKKMKNYWRQLLNAKLITQRKFDNLTKAERGGLSELDKAGFIKRQLVETRQITKHVAQILDSRMNTKYDENDKLIREVKVITLKSKLVSDFRKDFQFYKVREINNYHHAHDAYLNAVVGTALIKKYPKLESEFVYGDYKVYDVRKMIAKSEQEIGKATAKYFFYSNIMNFFKTEITLANGEIRKRPLIETNGETGEIVWDKGRDFATVRKVLSMPQVNIVKKTEVQTGGFSKESILPKRNSDKLIARKKDWDPKKYGGFDSPTVAYSVLVVAKVEKGKSKKLKSVKELLGITIMERSSFEKNPIDFLEAKGYKEVKKDLIIKLPKYSLFELENGRKRMLASAGELQKGNELALPSKYVNFLYLASHYEKLKGSPEDNEQKQLFVEQHKHYLDEIIEQISEFSKRVILADANLDKVLSAYNKHRDKPIREQAENIIHLFTLTNLGAPAAFKYFDTTIDRKRYTSTKEVLDATLIHQSITGLYETRIDLSQLGGDGGGSSGGSGGGGGVLNLEEEYRLHEKPVPSSIDPSWLQLFPTVWAERAGMGLANQVPPVVVELRSGASPVAVRQYPMSKEAREGIRPHIQRFLDLGVLVPCQSPWNTPLLPVKKPGTNDYRPVQDLREINKRVQDIHPTVPNPYNLLSSLPPSHTWYSVLDLKDAFFCLKLHPNSQPLFAFEWRDPEKGNTGQLTWTRLPQGFKNSPTLFNEALHRDLAPFRALNPQVVLLQYVDDLLVAAPTYRDCKEGTQKLLQELSKLGYRVSAKKAQLCQKEVTYLGYLLKEGKRWLTPARKATVMKIPPPTTPRQVREFLGKAGFCRLFIPGFASLAAPLYPLTKPSIPFIWTEEHQKAFDRIKEALLSAPALALPDLTKPFTLYVDERAGVARGVLTQTLGPWRRPVAYLSKKLDPVASGWPTCLKAVAAVALLLKDADKLTLGQNVTVIASHSLESIVRQPPDRWMTNARMTHYQSLLLNERVSFAPPAVLNPATLLPVESEATPVHRCSEILAEETGTRRDLKDQPLPGVPAWYTDGSSFIAEGKRRAGAAIVDGKRTVWASSLPEGTSAQKAELVALTQALRLAEGKDINIYTDSRYAFATAHIHGAIYKQRGWLTSAGKDIKNKEEILALLEAIHLPKRVAIIHCPGHQKGNDPVATGNRRADEAAKQAALSTRVLAETTKPAGKRTADGSEFEKRTADGSEFESPKKKAKVE

SEQ ID NO: 6871 - protein, 2096 aa, synthetic construct
MPAAKRVKLDGGDKKYSIGLDIGTNSVGWAVITDEYKVPSKKFKVLGNTDRHSIKKNLIGALLFDSGETAEATRLKRTARRRYTRRKNRICYLQEIFSNEMAKVDDSFFHRLEESFLVEEDKKHERHPIFGNIVDEVAYHEKYPTIYHLRKKLVDSTDKADLRLIYLALAHMIKFRGHFLIEGDLNPDNSDVDKLFIQLVQTYNQLFEENPINASGVDAKAILSARLSKSRRLENLIAQLPGEKKNGLFGNLIALSLGLTPNFKSNFDLAEDAKLQLSKDTYDDDLDNLLAQIGDQYADLFLAAKNLSDAILLSDILRVNTEITKAPLSASMIKRYDEHHQDLTLLKALVRQQLPEKYKEIFFDQSKNGYAGYIDGGASQEEFYKFIKPILEKMDGTEELLVKLNREDLLRKQRTFDNGSIPHQIHLGELHAILRRQEDFYPFLKDNREKIEKILTFRIPYYVGPLARGNSRFAWMTRKSEETITPWNFEEVVDKGASAQSFIERMTNFDKNLPNEKVLPKHSLLYEYFTVYNELTKVKYVTEGMRKPAFLSGEQKKAIVDLLFKTNRKVTVKQLKEDYFKKIECFDSVEISGVEDRFNASLGTYHDLLKIIKDKDFLDNEENEDILEDIVLTLTLFEDREMIEERLKTYAHLFDDKVMKQLKRRRYTGWGRLSRKLINGIRDKQSGKTILDFLKSDGFANRNFMQLIHDDSLTFKEDIQKAQVSGQGDSLHEHIANLAGSPAIKKGILQTVKVVDELVKVMGRHKPENIVIEMARENQTTQKGQKNSRERMKRIEEGIKELGSQILKEHPVENTQLQNEKLYLYYLQNGRDMYVDQELDINRLSDYDVDHIVPQSFLKDDSIDNKVLTRSDKARGKSDNVPSEEVVKKMKNYWRQLLNAKLITQRKFDNLTKAERGGLSELDKAGFIKRQLVETRQITKHVAQILDSRMNTKYDENDKLIREVKVITLKSKLVSDFRKDFQFYKVREINNYHHAHDAYLNAVVGTALIKKYPKLESEFVYGDYKVYDVRKMIAKSEQEIGKATAKYFFYSNIMNFFKTEITLANGEIRKRPLIETNGETGEIVWDKGRDFATVRKVLSMPQVNIVKKTEVQTGGFSKESILPKRNSDKLIARKKDWDPKKYGGFDSPTVAYSVLVVAKVEKGKSKKLKSVKELLGITIMERSSFEKNPIDFLEAKGYKEVKKDLIIKLPKYSLFELENGRKRMLASAGELQKGNELALPSKYVNFLYLASHYEKLKGSPEDNEQKQLFVEQHKHYLDEIIEQISEFSKRVILADANLDKVLSAYNKHRDKPIREQAENIIHLFTLTNLGAPAAFKYFDTTIDRKRYTSTKEVLDATLIHQSITGLYETRIDLSQLGGDGGGSSGGGGGSGGTAPLEEEYRLFLEAPIQNVTLLEQWKREIPKVWAEINPPGLASTQAPIHVQLLSTALPVRVRQYPITLEAKRSLRETIRKFRAAGILRPVHSPWNTPLLPVRKSGTSEYRMVQDLREVNKRVETIHPTVPNPYTLLSLLPPDRIWYSVLDLKDAFFCIPLAPESQLIFAFEWADAEEGESGQLTWTRLPQGFKNSPTLFNEALNRDLQGFRLDHPSVSLLQYVDDLLIAADTQAACLSATRDLLMTLAELGYRVSGKKAQLCQEEVTYLGFKIHKGSRSLSNSRTQAILQIPVPKTKRQVREFLGTIGYCRLWIPGFAELAQPLYAATRPGNDPLVWGEKEEEAFQSLKLALTQPPALALPSLDKPFQLFVEETSGAAKGVLTQALGPWKRPVAYLSKRLDPVAAGWPRCLRAIAAAALLTREASKLTFGQDIEITSSHNLESLLRSPPDKWLTNARITQYQVLLLDPPRVRFKQTAALNPATLLPETDDTLPIHHCLDTLDSLTSTRPDLTDQPLAQAEATLFTDGSSYIRDGKRYAGAAVVTLDSVIWAEPLPIGTSAQKAELIALTKALEWSKDKSVNIYTDSRYAFATLHVHGMIYRERGWLTAGGKAIKNAPEILALLTAVWLPKRVAVMHCKGHQKDDAPTSTGNRRADEVAREVAIRPLSTQATISAGKRTADGSEFEKRTADGSEFESPKKKAKVE

SEQ ID NO: 6872 - protein, 2100 aa, synthetic construct
MPAAKRVKLDGGDKKYSIGLDIGTNSVGWAVITDEYKVPSKKFKVLGNTDRHSIKKNLIGALLFDSGETAEATRLKRTARRRYTRRKNRICYLQEIFSNEMAKVDDSFFHRLEESFLVEEDKKHERHPIFGNIVDEVAYHEKYPTIYHLRKKLVDSTDKADLRLIYLALAHMIKFRGHFLIEGDLNPDNSDVDKLFIQLVQTYNQLFEENPINASGVDAKAILSARLSKSRRLENLIAQLPGEKKNGLFGNLIALSLGLTPNFKSNFDLAEDAKLQLSKDTYDDDLDNLLAQIGDQYADLFLAAKNLSDAILLSDILRVNTEITKAPLSASMIKRYDEHHQDLTLLKALVRQQLPEKYKEIFFDQSKNGYAGYIDGGASQEEFYKFIKPILEKMDGTEELLVKLNREDLLRKQRTFDNGSIPHQIHLGELHAILRRQEDFYPFLKDNREKIEKILTFRIPYYVGPLARGNSRFAWMTRKSEETITPWNFEEVVDKGASAQSFIERMTNFDKNLPNEKVLPKHSLLYEYFTVYNELTKVKYVTEGMRKPAFLSGEQKKAIVDLLFKTNRKVTVKQLKEDYFKKIECFDSVEISGVEDRFNASLGTYHDLLKIIKDKDFLDNEENEDILEDIVLTLTLFEDREMIEERLKTYAHLFDDKVMKQLKRRRYTGWGRLSRKLINGIRDKQSGKTILDFLKSDGFANRNFMQLIHDDSLTFKEDIQKAQVSGQGDSLHEHIANLAGSPAIKKGILQTVKVVDELVKVMGRHKPENIVIEMARENQTTQKGQKNSRERMKRIEEGIKELGSQILKEHPVENTQLQNEKLYLYYLQNGRDMYVDQELDINRLSDYDVDHIVPQSFLKDDSIDNKVLTRSDKARGKSDNVPSEEVVKKMKNYWRQLLNAKLITQRKFDNLTKAERGGLSELDKAGFIKRQLVETRQITKHVAQILDSRMNTKYDENDKLIREVKVITLKSKLVSDFRKDFQFYKVREINNYHHAHDAYLNAVVGTALIKKYPKLESEFVYGDYKVYDVRKMIAKSEQEIGKATAKYFFYSNIMNFFKTEITLANGEIRKRPLIETNGETGEIVWDKGRDFATVRKVLSMPQVNIVKKTEVQTGGFSKESILPKRNSDKLIARKKDWDPKKYGGFDSPTVAYSVLVVAKVEKGKSKKLKSVKELLGITIMERSSFEKNPIDFLEAKGYKEVKKDLIIKLPKYSLFELENGRKRMLASAGELQKGNELALPSKYVNFLYLASHYEKLKGSPEDNEQKQLFVEQHKHYLDEIIEQISEFSKRVILADANLDKVLSAYNKHRDKPIREQAENIIHLFTLTNLGAPAAFKYFDTTIDRKRYTSTKEVLDATLIHQSITGLYETRIDLSQLGGDGGGSSGGGGGSGGTVSLQDEHRLFDIPVTTSLPDVWLQDFPQAWAETGGLGRAKCQAPIIIDLKPTAVPVSIKQYPMSLEAHMGIRQHIIKFLELGVLRPCRSPWNTPLLPVKKPGTQDYRPVQDLREINKRTVDIHPTVPNPYNLLSTLKPDYSWYTVLDLKDAFFCLPLAPQSQELFAFEWKDPERGISGQLTWTRLPQGFKNSPTLFNEALHRDLTDFRTQHPEVTLLQYVDDLLLAAPTKKACTQGTRHLLQELGEKGYRASAKKAQICQTKVTYLGYILSEGKRWLTPGRIETVARIPPPRNPREVREFLGTAGFCRLWIPGFAELAAPLYALTKPSTPFTWQTEHQLAFEALKKALLSAPALGLPDTSKPFTLFLDERQGIAKGVLTQKLGPWKRPVAYLSKKLDPVAAGWPPCLRIMAATAMLVKDSAKLTLGQPLTVITPHTLEAIVRQPPDRWITNARLTHYQALLLDTDRVQFGPPVTLNPATLLPVPENQPSPHDCRQVLAETHGTREDLKDQELPDADHTWYTDGSSYLDSGTRRAGAAVVDGHNTIWAQSLPPGTSAQKAELIALTKALELSKGKKANIYTDSRYAFATAHTHGSIYERRGWLTSEGKEIKNKAEIIALLKALFLPQEVAIIHCPGHQKGQDPVAVGNRQADRVARQAAMAEVLTLATEPDNTSHITAGKRTADGSEFEKRTADGSEFESPKKKAKVE

SEQ ID NO: 6873 - protein, 2216 aa, synthetic construct
MPAAKRVKLDGGDKKYSIGLDIGTNSVGWAVITDEYKVPSKKFKVLGNTDRHSIKKNLIGALLFDSGETAEATRLKRTARRRYTRRKNRICYLQEIFSNEMAKVDDSFFHRLEESFLVEEDKKHERHPIFGNIVDEVAYHEKYPTIYHLRKKLVDSTDKADLRLIYLALAHMIKFRGHFLIEGDLNPDNSDVDKLFIQLVQTYNQLFEENPINASGVDAKAILSARLSKSRRLENLIAQLPGEKKNGLFGNLIALSLGLTPNFKSNFDLAEDAKLQLSKDTYDDDLDNLLAQIGDQYADLFLAAKNLSDAILLSDILRVNTEITKAPLSASMIKRYDEHHQDLTLLKALVRQQLPEKYKEIFFDQSKNGYAGYIDGGASQEEFYKFIKPILEKMDGTEELLVKLNREDLLRKQRTFDNGSIPHQIHLGELHAILRRQEDFYPFLKDNREKIEKILTFRIPYYVGPLARGNSRFAWMTRKSEETITPWNFEEVVDKGASAQSFIERMTNFDKNLPNEKVLPKHSLLYEYFTVYNELTKVKYVTEGMRKPAFLSGEQKKAIVDLLFKTNRKVTVKQLKEDYFKKIECFDSVEISGVEDRFNASLGTYHDLLKIIKDKDFLDNEENEDILEDIVLTLTLFEDREMIEERLKTYAHLFDDKVMKQLKRRRYTGWGRLSRKLINGIRDKQSGKTILDFLKSDGFANRNFMQLIHDDSLTFKEDIQKAQVSGQGDSLHEHIANLAGSPAIKKGILQTVKVVDELVKVMGRHKPENIVIEMARENQTTQKGQKNSRERMKRIEEGIKELGSQILKEHPVENTQLQNEKLYLYYLQNGRDMYVDQELDINRLSDYDVDHIVPQSFLKDDSIDNKVLTRSDKARGKSDNVPSEEVVKKMKNYWRQLLNAKLITQRKFDNLTKAERGGLSELDKAGFIKRQLVETRQITKHVAQILDSRMNTKYDENDKLIREVKVITLKSKLVSDFRKDFQFYKVREINNYHHAHDAYLNAVVGTALIKKYPKLESEFVYGDYKVYDVRKMIAKSEQEIGKATAKYFFYSNIMNFFKTEITLANGEIRKRPLIETNGETGEIVWDKGRDFATVRKVLSMPQVNIVKKTEVQTGGFSKESILPKRNSDKLIARKKDWDPKKYGGFDSPTVAYSVLVVAKVEKGKSKKLKSVKELLGITIMERSSFEKNPIDFLEAKGYKEVKKDLIIKLPKYSLFELENGRKRMLASAGELQKGNELALPSKYVNFLYLASHYEKLKGSPEDNEQKQLFVEQHKHYLDEIIEQISEFSKRVILADANLDKVLSAYNKHRDKPIREQAENIIHLFTLTNLGAPAAFKYFDTTIDRKRYTSTKEVLDATLIHQSITGLYETRIDLSQLGGDGGGSSGGGGGSGGTLGDQGSRGSDPLPEPRVTLTVEGIPTEFLVNTGAEHSVLTKPMGKMGSKRTVVAGATGSKVYPWTTKRLLKIGQKQVTHSFLVIPECPAPLLGRDLLTKLKAQIQFSTEGPQVTWEDRPAMCLVLNLEEEYRLHEKPVPPSIDPSWLQLFPMVWAEKAGMGLANQVPPVVVELKSDASPVAVRQYPMSKEAREGIRPHIQRFLDLGILVPCQSPWNTPLLPVKKPGTNDYRPVQDLREVNKRVQDIHPTVPNPYNLLSSLPPSHTWYSVLDLKDAFFCLKLHPNSQPLFAFEWRDPEKGNTGQLTWTRLPQGFKNSPTLFDEALHRDLASFRALNPQVVMLQYVDDLLVAAPTYRDCKEGTRRLLQELSKLGYRVSAKKAQLCREEVTYLGYLLKGGKRWLTPARKATVMKIPTPTTPRQVREFLGTAGFCRLWIPGFASLAAPLYPLTREKVPFTWTEAHQEAFGRIKEALLSAPALALPDLTKPFALYVDEKEGVARGVLTQTLGPWRRPVAYLSKKLDPVASGWPTCLKAIAAVALLLKDADKLTLGQNVLVIAPHNLESIVRQPPDRWMTNARMTHYQSLLLNERVSFAPPAILNPATLLPVESDDTPIHICSEILAEETGTRPDLRDQPLPGVPAWYTDGSSFIMDGRRQAGAAIVDNKRTVWASNLPEGTSAQKAELIALTQALRLAEGKSINIYTDSRYAFATAHVHGAIYKQRGLLTSAGKDIKNKEEILALLEAIHLPKRVAIIHCPGHQRGTDPVATGNRKADEAAKQAAQSTRILTETTKNAGKRTADGSEFEKRTADGSEFESPKKKAKVE

SEQ ID NO: 6874 - protein, 2125 aa, synthetic construct
MPAAKRVKLDGGDKKYSIGLDIGTNSVGWAVITDEYKVPSKKFKVLGNTDRHSIKKNLIGALLFDSGETAEATRLKRTARRRYTRRKNRICYLQEIFSNEMAKVDDSFFHRLEESFLVEEDKKHERHPIFGNIVDEVAYHEKYPTIYHLRKKLVDSTDKADLRLIYLALAHMIKFRGHFLIEGDLNPDNSDVDKLFIQLVQTYNQLFEENPINASGVDAKAILSARLSKSRRLENLIAQLPGEKKNGLFGNLIALSLGLTPNFKSNFDLAEDAKLQLSKDTYDDDLDNLLAQIGDQYADLFLAAKNLSDAILLSDILRVNTEITKAPLSASMIKRYDEHHQDLTLLKALVRQQLPEKYKEIFFDQSKNGYAGYIDGGASQEEFYKFIKPILEKMDGTEELLVKLNREDLLRKQRTFDNGSIPHQIHLGELHAILRRQEDFYPFLKDNREKIEKILTFRIPYYVGPLARGNSRFAWMTRKSEETITPWNFEEVVDKGASAQSFIERMTNFDKNLPNEKVLPKHSLLYEYFTVYNELTKVKYVTEGMRKPAFLSGEQKKAIVDLLFKTNRKVTVKQLKEDYFKKIECFDSVEISGVEDRFNASLGTYHDLLKIIKDKDFLDNEENEDILEDIVLTLTLFEDREMIEERLKTYAHLFDDKVMKQLKRRRYTGWGRLSRKLINGIRDKQSGKTILDFLKSDGFANRNFMQLIHDDSLTFKEDIQKAQVSGQGDSLHEHIANLAGSPAIKKGILQTVKVVDELVKVMGRHKPENIVIEMARENQTTQKGQKNSRERMKRIEEGIKELGSQILKEHPVENTQLQNEKLYLYYLQNGRDMYVDQELDINRLSDYDVDHIVPQSFLKDDSIDNKVLTRSDKARGKSDNVPSEEVVKKMKNYWRQLLNAKLITQRKFDNLTKAERGGLSELDKAGFIKRQLVETRQITKHVAQILDSRMNTKYDENDKLIREVKVITLKSKLVSDFRKDFQFYKVREINNYHHAHDAYLNAVVGTALIKKYPKLESEFVYGDYKVYDVRKMIAKSEQEIGKATAKYFFYSNIMNFFKTEITLANGEIRKRPLIETNGETGEIVWDKGRDFATVRKVLSMPQVNIVKKTEVQTGGFSKESILPKRNSDKLIARKKDWDPKKYGGFDSPTVAYSVLVVAKVEKGKSKKLKSVKELLGITIMERSSFEKNPIDFLEAKGYKEVKKDLIIKLPKYSLFELENGRKRMLASAGELQKGNELALPSKYVNFLYLASHYEKLKGSPEDNEQKQLFVEQHKHYLDEIIEQISEFSKRVILADANLDKVLSAYNKHRDKPIREQAENIIHLFTLTNLGAPAAFKYFDTTIDRKRYTSTKEVLDATLIHQSITGLYETRIDLSQLGGDGGGSSGGGGGSGGLLGRDLLTKLKAQIQFSTEGPQVTWEDRPAMCLVLNLEEEYRLHEKPVPPSIDPSWLQLFPMVWAEKAGMGLANQVPPVVVELKSDASPVAVRQYPMSKEAREGIRPHIQRFLDLGILVPCQSPWNTPLLPVKKPGTNDYRPVQDLREVNKRVQDIHPTVPNPYNLLSSLPPSHTWYSVLDLKDAFFCLKLHPNSQPLFAFEWRDPEKGNTGQLTWTRLPQGFKNSPTLFNEALHRDLASFRALNPQVVMLQYVDDLLVAAPTYRDCKEGTRRLLQELSKLGYRVSAKKAQLCREEVTYLGYLLKGGKRWLTPARKATVMKIPTPTTPRQVREFLGTAGFCRLWIPGFASLAAPLYPLTRPKVPFTWTEAHQEAFGRIKEALLSAPALALPDLTKPFALYVDEKEGVARGVLTQTLGPWRRPVAYLSKKLDPVASGWPTCLKAIAAVALLLKDADKLTLGQNVLVIAPHNLESIVRQPPDRWMTNARMTHYQSLLLNERVSFAPPAILNPATLLPVESDDTPIHICSEILAEETGTRPDLRDQPLPGVPAWYTDGSSFIMDGRRQAGAAIVDNKRTVWASNLPEGTSAQKAELIALTQALRLAEGKSINIYTDSRYAFATAHVHGAIYKQRGWLTSAGKDIKNKEEILALLEAIHLPKRVAIIHCPGHQRGTDPVATGNRKADEAAKQAAQSTRILTETTKNAGKRTADGSEFEKRTADGSEFESPKKKAKVE

SEQ ID NO: 6875 - protein, 2094 aa, synthetic construct; identical to SEQ ID NO: 4517

SEQ ID NO: 6876 - protein, 2094 aa, synthetic construct; identical to SEQ ID NO: 4517

SEQ ID NO: 6877 - protein, 2094 aa, synthetic construct
MPAAKRVKLDGGDKKYSIGLDIGTNSVGWAVITDEYKVPSKKFKVLGNTDRHSIKKNLIGALLFDSGETAEATRLKRTARRRYTRRKNRICYLQEIFSNEMAKVDDSFFHRLEESFLVEEDKKHERHPIFGNIVDEVAYHEKYPTIYHLRKKLVDSTDKADLRLIYLALAHMIKFRGHFLIEGDLNPDNSDVDKLFIQLVQTYNQLFEENPINASGVDAKAILSARLSKSRRLENLIAQLPGEKKNGLFGNLIALSLGLTPNFKSNFDLAEDAKLQLSKDTYDDDLDNLLAQIGDQYADLFLAAKNLSDAILLSDILRVNTEITKAPLSASMIKRYDEHHQDLTLLKALVRQQLPEKYKEIFFDQSKNGYAGYIDGGASQEEFYKFIKPILEKMDGTEELLVKLNREDLLRKQRTFDNGSIPHQIHLGELHAILRRQEDFYPFLKDNREKIEKILTFRIPYYVGPLARGNSRFAWMTRKSEETITPWNFEEVVDKGASAQSFIERMTNFDKNLPNEKVLPKHSLLYEYFTVYNELTKVKYVTEGMRKPAFLSGEQKKAIVDLLFKTNRKVTVKQLKEDYFKKIECFDSVEISGVEDRFNASLGTYHDLLKIIKDKDFLDNEENEDILEDIVLTLTLFEDREMIEERLKTYAHLFDDKVMKQLKRRRYTGWGRLSRKLINGIRDKQSGKTILDFLKSDGFANRNFMQLIHDDSLTFKEDIQKAQVSGQGDSLHEHIANLAGSPAIKKGILQTVKVVDELVKVMGRHKPENIVIEMARENQTTQKGQKNSRERMKRIEEGIKELGSQILKEHPVENTQLQNEKLYLYYLQNGRDMYVDQELDINRLSDYDVDHIVPQSFLKDDSIDNKVLTRSDKARGKSDNVPSEEVVKKMKNYWRQLLNAKLITQRKFDNLTKAERGGLSELDKAGFIKRQLVETRQITKHVAQILDSRMNTKYDENDKLIREVKVITLKSKLVSDFRKDFQFYKVREINNYHHAHDAYLNAVVGTALIKKYPKLESEFVYGDYKVYDVRKMIAKSEQEIGKATAKYFFYSNIMNFFKTEITLANGEIRKRPLIETNGETGEIVWDKGRDFATVRKVLSMPQVNIVKKTEVQTGGFSKESILPKRNSDKLIARKKDWDPKKYGGFDSPTVAYSVLVVAKVEKGKSKKLKSVKELLGITIMERSSFEKNPIDFLEAKGYKEVKKDLIIKLPKYSLFELENGRKRMLASAGELQKGNELALPSKYVNFLYLASHYEKLKGSPEDNEQKQLFVEQHKHYLDEIIEQISEFSKRVILADANLDKVLSAYNKHRDKPIREQAENIIHLFTLTNLGAPAAFKYFDTTIDRKRYTSTKEVLDATLIHQSITGLYETRIDLSQLGGDGGGSSGGGGGSGGTLGIEDEYRLHETSTEPDVSLGSTWLSDFPQAWAETGGMGLAVRQAPLIIPLKATSTPVSIQQYPMSHEARLGIKPHIQRLLDQGILVPCQSPWNTPLLPVKKPGTNDYRPVQDLREVNKRVEDIHPTVPNPYNLLSGLPPSHQWYTVLDLKDAFFCLRLHPTSQPLFAFEWRDPGMGISGQLTWTRLPQGFKNSPTLFNEALHRDLADFRIQHPDLILLQYVDDILLAATSELDCQQGTRALLQTLGDLGYRASAKKAQICQKQVKYLGYLLREGQRWLTEARKETVMGQPVPKTPRQLREFLGTAGFCRLWIPGFAEMAAPLYPLTKPGTLFSWGPDQQKAYQEIKQALLTAPALGLPDLTKPFELFVDEKQGYAKGVLTQKLGPWRRPVAYLSKKLDPVAAGWPPCLRMVAAIAVLTKDAGKLTMGQPLVILAPHAVEALVKQPPDRWLSNARMTHYQAMLLDTDRVQFGPVVALNPATLLPLPEEGAPHDCLEILAETHGTRPDLTDQPIPDADHTWYTDGSSFLQEGQRKAGAAVTTETEVIWAGALPAGTSAQRAELIALTQALKMAEGKRLNVYTDSRYAFATAHIHGEIYRRRGWLTSEGREIKNKSEILALLKALFLPKRLSIIHCLGHQKGDSAEARGNRLADQAAREAAIKTPPDTSTLLAGKRTADGSEFEKRTADGSEFESPKKKAKVE

SEQ ID NO: 6878 - protein, 2094 aa, synthetic construct
MPAAKRVKLDGGDKKYSIGLDIGTNSVGWAVITDEYKVPSKKFKVLGNTDRHSIKKNLIGALLFDSGETAEATRLKRTARRRYTRRKNRICYLQEIFSNEMAKVDDSFFHRLEESFLVEEDKKHERHPIFGNIVDEVAYHEKYPTIYHLRKKLVDSTDKADLRLIYLALAHMIKFRGHFLIEGDLNPDNSDVDKLFIQLVQTYNQLFEENPINASGVDAKAILSARLSKSRRLENLIAQLPGEKKNGLFGNLIALSLGLTPNFKSNFDLAEDAKLQLSKDTYDDDLDNLLAQIGDQYADLFLAAKNLSDAILLSDILRVNTEITKAPLSASMIKRYDEHHQDLTLLKALVRQQLPEKYKEIFFDQSKNGYAGYIDGGASQEEFYKFIKPILEKMDGTEELLVKLNREDLLRKQRTFDNGSIPHQIHLGELHAILRRQEDFYPFLKDNREKIEKILTFRIPYYVGPLARGNSRFAWMTRKSEETITPWNFEEVVDKGASAQSFIERMTNFDKNLPNEKVLPKHSLLYEYFTVYNELTKVKYVTEGMRKPAFLSGEQKKAIVDLLFKTNRKVTVKQLKEDYFKKIECFDSVEISGVEDRFNASLGTYHDLLKIIKDKDFLDNEENEDILEDIVLTLTLFEDREMIEERLKTYAHLFDDKVMKQLKRRRYTGWGRLSRKLINGIRDKQSGKTILDFLKSDGFANRNFMQLIHDDSLTFKEDIQKAQVSGQGDSLHEHIANLAGSPAIKKGILQTVKVVDELVKVMGRHKPENIVIEMARENQTTQKGQKNSRERMKRIEEGIKELGSQILKEHPVENTQLQNEKLYLYYLQNGRDMYVDQELDINRLSDYDVDHIVPQSFLKDDSIDNKVLTRSDKARGKSDNVPSEEVVKKMKNYWRQLLNAKLITQRKFDNLTKAERGGLSELDKAGFIKRQLVETRQITKHVAQILDSRMNTKYDENDKLIREVKVITLKSKLVSDFRKDFQFYKVREINNYHHAHDAYLNAVVGTALIKKYPKLESEFVYGDYKVYDVRKMIAKSEQEIGKATAKYFFYSNIMNFFKTEITLANGEIRKRPLIETNGETGEIVWDKGRDFATVRKVLSMPQVNIVKKTEVQTGGFSKESILPKRNSDKLIARKKDWDPKKYGGFDSPTVAYSVLVVAKVEKGKSKKLKSVKELLGITIMERSSFEKNPIDFLEAKGYKEVKKDLIIKLPKYSLFELENGRKRMLASAGELQKGNELALPSKYVNFLYLASHYEKLKGSPEDNEQKQLFVEQHKHYLDEIIEQISEFSKRVILADANLDKVLSAYNKHRDKPIREQAENIIHLFTLTNLGAPAAFKYFDTTIDRKRYTSTKEVLDATLIHQSITGLYETRIDLSQLGGDGGGSSGGGGGSGGTLNIEDEYRLHETSKEPDVSLGSTWLSDFPQAWAETGGMGLAVRQAPLIIPLKATSTPVSIKQYPMSQEARLGIKPHIQRLLDQGILVPCQSPWNTPLLPVKKPGTNDYRPVQDLREVNKRVEDIHPTVPNPYNLLSGLPPSHQWYTVLDLKDAFFCLRLHPTSQPLFAFEWRDPEMGISGQLTWTRLPQGFKNSPTLFNEALHRDLAGFRIQHPDLILLQYVDDLLLAATSELDCQQGTRALLQTLGDLGYRASAKKAQICQKQVKYLGYLLKEGQRWLTEARKETVMGQPIPKTPRQLREFLGTAGFCRLWIPGFAEMAAPLYPLTKPGTLFNWGPDQQKAFQEIKQALLTAPALGLPDLTKPFELFVDEKQGYAKGVLTQKLGPWRRPVAYLSKKLDPVAAGWPPCLRMVAAIAVLTKDAGKLTMGQPLVILAPHAVEALVKQPPDRWLSNARMTHYQALLLDTDRVQFGPVVALNPATLLPLPEEGLQHDCLDILAEAHGTRSDLMDQPLPDADHTWYTDGSSFLQEGQRKAGAAVTTETEVIWARALPAGTSAQRAELIALTQALKMAEGKKLNVYTDSRYAFATAHIHGEIYRRRGWLTSEGKEIKNKDEILALLKALFLPKRLSIIHCPGHQKGNSAEARGNRMADQAAREVATRETPETSTLLAGKRTADGSEFEKRTADGSEFESPKKKAKVE

SEQ ID NO: 6879 - protein, 2094 aa, synthetic construct
MPAAKRVKLDGGDKKYSIGLDIGTNSVGWAVITDEYKVPSKKFKVLGNTDRHSIKKNLIGALLFDSGETAEATRLKRTARRRYTRRKNRICYLQEIFSNEMAKVDDSFFHRLEESFLVEEDKKHERHPIFGNIVDEVAYHEKYPTIYHLRKKLVDSTDKADLRLIYLALAHMIKFRGHFLIEGDLNPDNSDVDKLFIQLVQTYNQLFEENPINASGVDAKAILSARLSKSRRLENLIAQLPGEKKNGLFGNLIALSLGLTPNFKSNFDLAEDAKLQLSKDTYDDDLDNLLAQIGDQYADLFLAAKNLSDAILLSDILRVNTEITKAPLSASMIKRYDEHHQDLTLLKALVRQQLPEKYKEIFFDQSKNGYAGYIDGGASQEEFYKFIKPILEKMDGTEELLVKLNREDLLRKQRTFDNGSIPHQIHLGELHAILRRQEDFYPFLKDNREKIEKILTFRIPYYVGPLARGNSRFAWMTRKSEETITPWNFEEVVDKGASAQSFIERMTNFDKNLPNEKVLPKHSLLYEYFTVYNELTKVKYVTEGMRKPAFLSGEQKKAIVDLLFKTNRKVTVKQLKEDYFKKIECFDSVEISGVEDRFNASLGTYHDLLKIIKDKDFLDNEENEDILEDIVLTLTLFEDREMIEERLKTYAHLFDDKVMKQLKRRRYTGWGRLSRKLINGIRDKQSGKTILDFLKSDGFANRNFMQLIHDDSLTFKEDIQKAQVSGQGDSLHEHIANLAGSPAIKKGILQTVKVVDELVKVMGRHKPENIVIEMARENQTTQKGQKNSRERMKRIEEGIKELGSQILKEHPVENTQLQNEKLYLYYLQNGRDMYVDQELDINRLSDYDVDHIVPQSFLKDDSIDNKVLTRSDKARGKSDNVPSEEVVKKMKNYWRQLLNAKLITQRKFDNLTKAERGGLSELDKAGFIKRQLVETRQITKHVAQILDSRMNTKYDENDKLIREVKVITLKSKLVSDFRKDFQFYKVREINNYHHAHDAYLNAVVGTALIKKYPKLESEFVYGDYKVYDVRKMIAKSEQEIGKATAKYFFYSNIMNFFKTEITLANGEIRKRPLIETNGETGEIVWDKGRDFATVRKVLSMPQVNIVKKTEVQTGGFSKESILPKRNSDKLIARKKDWDPKKYGGFDSPTVAYSVLVVAKVEKGKSKKLKSVKELLGITIMERSSFEKNPIDFLEAKGYKEVKKDLIIKLPKYSLFELENGRKRMLASAGELQKGNELALPSKYVNFLYLASHYEKLKGSPEDNEQKQLFVEQHKHYLDEIIEQISEFSKRVILADANLDKVLSAYNKHRDKPIREQAENIIHLFTLTNLGAPAAFKYFDTTIDRKRYTSTKEVLDATLIHQSITGLYETRIDLSQLGGDGGGSSGGGGGSGGTLNIEDEYRLHETSKEPDVSLGSTWLSDFPQAWAETGGMGLAVRQAPLIIPLKATSTPVSIKQYPMSQEARLGIKPHIQRLLDQGILVPCQSPWNTPLLPVKKPGTNDYRPVQDLREVNKRVEDIHPTVPNPYNLLSGLPPSHQWYTVLDLKDAFFCLRLHPTSQPLFAFEWRDPEMGISGQLTWTRLPQGFKNSPTLFNEALHRDLAGFRIQHPDLILLQYVDDLLLAATSELDCQQGTRALLQTLGDLGYRASAKKAQICQKQVKYLGYLLKEGQRWLTEARKETVMGQPIPKTPRQLREFLGKAGFCRLFIPGFAEMAAPLYPLTKPGTLFNWGPDQQKAFQEIKQALLTAPALGLPDLTKPFELFVDEKQGYAKGVLTQKLGPWRRPVAYLSKKLDPVAAGWPPCLRMVAAIAVLTKDAGKLTMGQPLVILAPHAVEALVKQPPDRWLSNARMTHYQALLLDTDRVQFGPVVALNPATLLPLPEEGLQHDCLDILAEAHGTRSDLMDQPLPDADHTWYTDGSSFLQEGQRKAGAAVTTETEVIWARALPAGTSAQRAELIALTQALKMAEGKKLNVYTDSRYAFATAHIHGEIYRRRGWLTSEGKEIKNKDEILALLKALFLPKRLSIIHCPGHQKGNSAEARGNRMADQAAREVATRETPETSTLLAGKRTADGSEFEKRTADGSEFESPKKKAKVE

SEQ ID NO: 6880 - protein, 2114 aa, synthetic construct
MPAAKRVKLDGGDKKYSIGLDIGTNSVGWAVITDEYKVPSKKFKVLGNTDRHSIKKNLIGALLFDSGETAEATRLKRTARRRYTRRKNRICYLQEIFSNEMAKVDDSFFHRLEESFLVEEDKKHERHPIFGNIVDEVAYHEKYPTIYHLRKKLVDSTDKADLRLIYLALAHMIKFRGHFLIEGDLNPDNSDVDKLFIQLVQTYNQLFEENPINASGVDAKAILSARLSKSRRLENLIAQLPGEKKNGLFGNLIALSLGLTPNFKSNFDLAEDAKLQLSKDTYDDDLDNLLAQIGDQYADLFLAAKNLSDAILLSDILRVNTEITKAPLSASMIKRYDEHHQDLTLLKALVRQQLPEKYKEIFFDQSKNGYAGYIDGGASQEEFYKFIKPILEKMDGTEELLVKLNREDLLRKQRTFDNGSIPHQIHLGELHAILRRQEDFYPFLKDNREKIEKILTFRIPYYVGPLARGNSRFAWMTRKSEETITPWNFEEVVDKGASAQSFIERMTNFDKNLPNEKVLPKHSLLYEYFTVYNELTKVKYVTEGMRKPAFLSGEQKKAIVDLLFKTNRKVTVKQLKEDYFKKIECFDSVEISGVEDRFNASLGTYHDLLKIIKDKDFLDNEENEDILEDIVLTLTLFEDREMIEERLKTYAHLFDDKVMKQLKRRRYTGWGRLSRKLINGIRDKQSGKTILDFLKSDGFANRNFMQLIHDDSLTFKEDIQKAQVSGQGDSLHEHIANLAGSPAIKKGILQTVKVVDELVKVMGRHKPENIVIEMARENQTTQKGQKNSRERMKRIEEGIKELGSQILKEHPVENTQLQNEKLYLYYLQNGRDMYVDQELDINRLSDYDVDHIVPQSFLKDDSIDNKVLTRSDKARGKSDNVPSEEVVKKMKNYWRQLLNAKLITQRKFDNLTKAERGGLSELDKAGFIKRQLVETRQITKHVAQILDSRMNTKYDENDKLIREVKVITLKSKLVSDFRKDFQFYKVREINNYHHAHDAYLNAVVGTALIKKYPKLESEFVYGDYKVYDVRKMIAKSEQEIGKATAKYFFYSNIMNFFKTEITLANGEIRKRPLIETNGETGEIVWDKGRDFATVRKVLSMPQVNIVKKTEVQTGGFSKESILPKRNSDKLIARKKDWDPKKYGGFDSPTVAYSVLVVAKVEKGKSKKLKSVKELLGITIMERSSFEKNPIDFLEAKGYKEVKKDLIIKLPKYSLFELENGRKRMLASAGELQKGNELALPSKYVNFLYLASHYEKLKGSPEDNEQKQLFVEQHKHYLDEIIEQISEFSKRVILADANLDKVLSAYNKHRDKPIREQAENIIHLFTLTNLGAPAAFKYFDTTIDRKRYTSTKEVLDATLIHQSITGLYETRIDLSQLGGDGGGSSGGGGGSGGVQEISDSRPMLHIYLNGRRFLGLLDTGADKTCIAGRDWPANWPIHQTESSLQGLGMACGVARSSQPLRWQHEDKSGIIHPFVIPTLPFTLWGRDIMKDIKVRLMTDSPDDSQDLMIGAIESNLFADQISWKSDQPVWLNQWPLKQEKLQALQQLVTEQLQLGHLEESNSPWNTPVFVIKKKSGKWRLLQDLRAVNATMHDMGALQPGLPSPVAVPKGWEIIIIDLQDCFFNIKLHPEDCKRFAFSVPSPNFKRPYQRFQWKVLPQGMKNSPTLCQKFVDKAILTVRDKYQDSYIVHYMDDILLAHPSRSIVDEILTSMIQALNKHGLVVSTEKIQKYDNLKYLGTHIQGDSVSYQKLQIRTDKLRTLNDFQKLLGNINWIRPFLKLTTGELKPLFEILNGDSNPISTRKLTPEACKALQLMNERLSTARVKRLDLSQPWSLCILKTEYTPTACLWQDGVVEWIHLPHISPKVITPYDIFCTQLIIKGRHRSKELFSKDPDYIVVPYTKVQFDLLLQEKEDWPISLLGFLGEVHFHLPKDPLLTFTLQTAIIFPHMTSTTPLEKGIVIFTDGSANGRSVTYIQGREPIIKENTQNTAQQAEIVAVITAFEEVSQPFNLYTDSKYVTGLFPEIETATLSPRTKIYTELKHLQRLIHKRQEKFYIGHIRGHTGLPGPLAQGNAYADSLTRILTAAGKRTADGSEFEKRTADGSEFESPKKKAKVE

SEQ ID NO: 6881 - protein, 2086 aa, synthetic construct
MPAAKRVKLDGGDKKYSIGLDIGTNSVGWAVITDEYKVPSKKFKVLGNTDRHSIKKNLIGALLFDSGETAEATRLKRTARRRYTRRKNRICYLQEIFSNEMAKVDDSFFHRLEESFLVEEDKKHERHPIFGNIVDEVAYHEKYPTIYHLRKKLVDSTDKADLRLIYLALAHMIKFRGHFLIEGDLNPDNSDVDKLFIQLVQTYNQLFEENPINASGVDAKAILSARLSKSRRLENLIAQLPGEKKNGLFGNLIALSLGLTPNFKSNFDLAEDAKLQLSKDTYDDDLDNLLAQIGDQYADLFLAAKNLSDAILLSDILRVNTEITKAPLSASMIKRYDEHHQDLTLLKALVRQQLPEKYKEIFFDQSKNGYAGYIDGGASQEEFYKFIKPILEKMDGTEELLVKLNREDLLRKQRTFDNGSIPHQIHLGELHAILRRQEDFYPFLKDNREKIEKILTFRIPYYVGPLARGNSRFAWMTRKSEETITPWNFEEVVDKGASAQSFIERMTNFDKNLPNEKVLPKHSLLYEYFTVYNELTKVKYVTEGMRKPAFLSGEQKKAIVDLLFKTNRKVTVKQLKEDYFKKIECFDSVEISGVEDRFNASLGTYHDLLKIIKDKDFLDNEENEDILEDIVLTLTLFEDREMIEERLKTYAHLFDDKVMKQLKRRRYTGWGRLSRKLINGIRDKQSGKTILDFLKSDGFANRNFMQLIHDDSLTFKEDIQKAQVSGQGDSLHEHIANLAGSPAIKKGILQTVKVVDELVKVMGRHKPENIVIEMARENQTTQKGQKNSRERMKRIEEGIKELGSQILKEHPVENTQLQNEKLYLYYLQNGRDMYVDQELDINRLSDYDVDHIVPQSFLKDDSIDNKVLTRSDKARGKSDNVPSEEVVKKMKNYWRQLLNAKLITQRKFDNLTKAERGGLSELDKAGFIKRQLVETRQITKHVAQILDSRMNTKYDENDKLIREVKVITLKSKLVSDFRKDFQFYKVREINNYHHAHDAYLNAVVGTALIKKYPKLESEFVYGDYKVYDVRKMIAKSEQEIGKATAKYFFYSNIMNFFKTEITLANGEIRKRPLIETNGETGEIVWDKGRDFATVRKVLSMPQVNIVKKTEVQTGGFSKESILPKRNSDKLIARKKDWDPKKYGGFDSPTVAYSVLVVAKVEKGKSKKLKSVKELLGITIMERSSFEKNPIDFLEAKGYKEVKKDLIIKLPKYSLFELENGRKRMLASAGELQKGNELALPSKYVNFLYLASHYEKLKGSPEDNEQKQLFVEQHKHYLDEIIEQISEFSKRVILADANLDKVLSAYNKHRDKPIREQAENIIHLFTLTNLGAPAAFKYFDTTIDRKRYTSTKEVLDATLIHQSITGLYETRIDLSQLGGDGGGSSGGGGGSGGLDDEYRLYSPLVKPDQNIQFWLEQFPQAWAETAGMGLAKQVPPQVIQLKASATPVSVRQYPLSKEAQEGIRPHVQRLIQQGILVPVQSPWNTPLLPVRKPGTNDYRPVQDLREVNKRVQDIHPTVPNPYNLLCALPPQRSWYTVLDLKDAFFCLRLHPTSQPLFAFEWRDPGTGRTGQLTWTRLPQGFKNSPTIFNEALHRDLANFRIQHPQVTLLQYVDDLLLAGATKQDCLEGTKALLLELSDLGYRASAKKAQICRREVTYLGYSLRDGQRWLTEARKKTVVQIPAPTTAKQVREFLGKAGFCRLFIPGFATLAAPLYPLTKPKGEFSWAPEHQKAFDAIKKALLSAPALALPDVTKPFTLYVDERKGVARGVLTQTLGPWRRPVAYLSKKLDPVASGWPVCLKAIAAVAILVKDADKLTLGQNITVIAPHALENIVRQPPDRWMTNARMTHYQSLLLTERVTFAPPAALNPATLLPEETDEPVTHDCHQLLIEETGVRKDLTDIPLTGEVLTWFTDGSSYVVEGKRMAGAAVVDGTRTIWASSLPEGTSAQKAELMALTQALRLAEGKSINIYTDSRYAFATAHVHGAIYKQRGWLTSAGREIKNKEEILSLLEALHLPKRLAIIHCPGHQKAKDPISRGNQMADRVAKQAAQGVNLLPAGKRTADGSEFEKRTADGSEFESPKKKAKVE

SEQ ID NO: 6882 - protein, 2094 aa, synthetic construct
MPAAKRVKLDGGDKKYSIGLDIGTNSVGWAVITDEYKVPSKKFKVLGNTDRHSIKKNLIGALLFDSGETAEATRLKRTARRRYTRRKNRICYLQEIFSNEMAKVDDSFFHRLEESFLVEEDKKHERHPIFGNIVDEVAYHEKYPTIYHLRKKLVDSTDKADLRLIYLALAHMIKFRGHFLIEGDLNPDNSDVDKLFIQLVQTYNQLFEENPINASGVDAKAILSARLSKSRRLENLIAQLPGEKKNGLFGNLIALSLGLTPNFKSNFDLAEDAKLQLSKDTYDDDLDNLLAQIGDQYADLFLAAKNLSDAILLSDILRVNTEITKAPLSASMIKRYDEHHQDLTLLKALVRQQLPEKYKEIFFDQSKNGYAGYIDGGASQEEFYKFIKPILEKMDGTEELLVKLNREDLLRKQRTFDNGSIPHQIHLGELHAILRRQEDFYPFLKDNREKIEKILTFRIPYYVGPLARGNSRFAWMTRKSEETITPWNFEEVVDKGASAQSFIERMTNFDKNLPNEKVLPKHSLLYEYFTVYNELTKVKYVTEGMRKPAFLSGEQKKAIVDLLFKTNRKVTVKQLKEDYFKKIECFDSVEISGVEDRFNASLGTYHDLLKIIKDKDFLDNEENEDILEDIVLTLTLFEDREMIEERLKTYAHLFDDKVMKQLKRRRYTGWGRLSRKLINGIRDKQSGKTILDFLKSDGFANRNFMQLIHDDSLTFKEDIQKAQVSGQGDSLHEHIANLAGSPAIKKGILQTVKVVDELVKVMGRHKPENIVIEMARENQTTQKGQKNSRERMKRIEEGIKELGSQILKEHPVENTQLQNEKLYLYYLQNGRDMYVDQELDINRLSDYDVDHIVPQSFLKDDSIDNKVLTRSDKARGKSDNVPSEEVVKKMKNYWRQLLNAKLITQRKFDNLTKAERGGLSELDKAGFIKRQLVETRQITKHVAQILDSRMNTKYDENDKLIREVKVITLKSKLVSDFRKDFQFYKVREINNYHHAHDAYLNAVVGTALIKKYPKLESEFVYGDYKVYDVRKMIAKSEQEIGKATAKYFFYSNIMNFFKTEITLANGEIRKRPLIETNGETGEIVWDKGRDFATVRKVLSMPQVNIVKKTEVQTGGFSKESILPKRNSDKLIARKKDWDPKKYGGFDSPTVAYSVLVVAKVEKGKSKKLKSVKELLGITIMERSSFEKNPIDFLEAKGYKEVKKDLIIKLPKYSLFELENGRKRMLASAGELQKGNELALPSKYVNFLYLASHYEKLKGSPEDNEQKQLFVEQHKHYLDEIIEQISEFSKRVILADANLDKVLSAYNKHRDKPIREQAENIIHLFTLTNLGAPAAFKYFDTTIDRKRYTSTKEVLDATLIHQSITGLYETRIDLSQLGGDGGGSSGGGGGSGGTLNIEDEYRLHETSKEPDVPLGSTWLSDFPQAWAETGGMGLAVRQAPLIIPLKATSTPVSIKQYPMSQEARLGIKPHIQRLLDQGILVPCQSPWNTPLLPVKKPGTNDYRPVQDLREVNKRVEDIHPTVPNPYNLLSGLPPSHQWYTVLDLKDAFFCLRLHPTSQPLFAFEWRDPEMGISGQLTWTRLPQGFKNSPTLFNEALHRDLADFRIQHPDLILLQYVDDLLLAATSEQDCQRGTRALLQTLGNLGYRASAKKAQICQKQVKYLGYLLKEGQRWLTEARKETVMGQPTPKTPRQLREFLGTAGFCRLWIPGFAEMAAPLYPLTKPGTLFNWGPDQQKAYQEIKQALLTAPALGLPDLTKPFELFVDEKQGYAKGVLTQKLGPWRRPVAYLSKKLDPVAAGWPPCLRMVAAIAVLTKDAGKLTMGQPLVILAPHAVEALVKQPPDRWLSNARMTHYQAMLLDTDRVQFGPVVALNPATLLPLPEKEAPHDCLEILAETHGTRPDLTDQPIPDADYTWYTDGSSFLQEGQRRAGAAVTTETEVIWARALPAGTSAQRAELIALTQALKMAEGKKLNVYTDSRYAFATAHVHGEIYRRRGWLTSEGREIKNKNEILALLKALFLPKRLSIIHCPGHQKGNSAEARGNRMADQAAREAAMKAVLETSTLLAGKRTADGSEFEKRTADGSEFESPKKKAKVE

SEQ ID NO: 6883 - protein, 2094 aa, synthetic construct; identical to SEQ ID NO: 4518

SEQ ID NO: 6884 - protein, 2098 aa, synthetic construct
MPAAKRVKLDGGDKKYSIGLDIGTNSVGWAVITDEYKVPSKKFKVLGNTDRHSIKKNLIGALLFDSGETAEATRLKRTARRRYTRRKNRICYLQEIFSNEMAKVDDSFFHRLEESFLVEEDKKHERHPIFGNIVDEVAYHEKYPTIYHLRKKLVDSTDKADLRLIYLALAHMIKFRGHFLIEGDLNPDNSDVDKLFIQLVQTYNQLFEENPINASGVDAKAILSARLSKSRRLENLIAQLPGEKKNGLFGNLIALSLGLTPNFKSNFDLAEDAKLQLSKDTYDDDLDNLLAQIGDQYADLFLAAKNLSDAILLSDILRVNTEITKAPLSASMIKRYDEHHQDLTLLKALVRQQLPEKYKEIFFDQSKNGYAGYIDGGASQEEFYKFIKPILEKMDGTEELLVKLNREDLLRKQRTFDNGSIPHQIHLGELHAILRRQEDFYPFLKDNREKIEKILTFRIPYYVGPLARGNSRFAWMTRKSEETITPWNFEEVVDKGASAQSFIERMTNFDKNLPNEKVLPKHSLLYEYFTVYNELTKVKYVTEGMRKPAFLSGEQKKAIVDLLFKTNRKVTVKQLKEDYFKKIECFDSVEISGVEDRFNASLGTYHDLLKIIKDKDFLDNEENEDILEDIVLTLTLFEDREMIEERLKTYAHLFDDKVMKQLKRRRYTGWGRLSRKLINGIRDKQSGKTILDFLKSDGFANRNFMQLIHDDSLTFKEDIQKAQVSGQGDSLHEHIANLAGSPAIKKGILQTVKVVDELVKVMGRHKPENIVIEMARENQTTQKGQKNSRERMKRIEEGIKELGSQILKEHPVENTQLQNEKLYLYYLQNGRDMYVDQELDINRLSDYDVDHIVPQSFLKDDSIDNKVLTRSDKARGKSDNVPSEEVVKKMKNYWRQLLNAKLITQRKFDNLTKAERGGLSELDKAGFIKRQLVETRQITKHVAQILDSRMNTKYDENDKLIREVKVITLKSKLVSDFRKDFQFYKVREINNYHHAHDAYLNAVVGTALIKKYPKLESEFVYGDYKVYDVRKMIAKSEQEIGKATAKYFFYSNIMNFFKTEITLANGEIRKRPLIETNGETGEIVWDKGRDFATVRKVLSMPQVNIVKKTEVQTGGFSKESILPKRNSDKLIARKKDWDPKKYGGFDSPTVAYSVLVVAKVEKGKSKKLKSVKELLGITIMERSSFEKNPIDFLEAKGYKEVKKDLIIKLPKYSLFELENGRKRMLASAGELQKGNELALPSKYVNFLYLASHYEKLKGSPEDNEQKQLFVEQHKHYLDEIIEQISEFSKRVILADANLDKVLSAYNKHRDKPIREQAENIIHLFTLTNLGAPAAFKYFDTTIDRKRYTSTKEVLDATLIHQSITGLYETRIDLSQLGGDGGGGSGGGEAAAKGGTAPLEEEYRLFLEAPIQNVTLLEQWKREIPKVWAEINPPGLASTQAPIHVQLLSTALPVRVRQYPITLEAKRSLRETIRKFRAAGILRPVHSPWNTPLLPVRKSGTSEYRMVQDLREVNKRVETIHPTVPNPYTLLSLLPPDRIWYSVLDLKDAFFCIPLAPESQLIFAFEWADAEEGESGQLTWTRLPQGFKNSPTLFDEALNRDLQGFRLDHPSVSLLQYVDDLLIAADTQAACLSATRDLLMTLAELGYRVSGKKAQLCQEEVTYLGFKIHKGSRSLSNSRTQAILQIPVPKTKRQVREFLGTIGYCRLWIPGFAELAQPLYAATRGGNDPLVWGEKEEEAFQSLKLALTQPPALALPSLDKPFQLFVEETSGAAKGVLTQALGPWKRPVAYLSKRLDPVAAGWPRCLRAIAAAALLTREASKLTFGQDIEITSSHNLESLLRSPPDKWLTNARITQYQVLLLDPPRVRFKQTAALNPATLLPETDDTLPIHHCLDTLDSLTSTRPDLTDQPLAQAEATLFTDGSSYIRDGKRYAGAAVVTLDSVIWAEPLPIGTSAQKAELIALTKALEWSKDKSVNIYTDSRYAFATLHVHGMIYRERGLLTAGGKAIKNAPEILALLTAVWLPKRVAVMHCKGHQKDDAPTSTGNRRADEVAREVAIRPLSTQATISAGKRTADGSEFEKRTADGSEFESPKKKAKVE

SEQ ID NO: 6885 - protein, 2098 aa, synthetic construct
MPAAKRVKLDGGDKKYSIGLDIGTNSVGWAVITDEYKVPSKKFKVLGNTDRHSIKKNLIGALLFDSGETAEATRLKRTARRRYTRRKNRICYLQEIFSNEMAKVDDSFFHRLEESFLVEEDKKHERHPIFGNIVDEVAYHEKYPTIYHLRKKLVDSTDKADLRLIYLALAHMIKFRGHFLIEGDLNPDNSDVDKLFIQLVQTYNQLFEENPINASGVDAKAILSARLSKSRRLENLIAQLPGEKKNGLFGNLIALSLGLTPNFKSNFDLAEDAKLQLSKDTYDDDLDNLLAQIGDQYADLFLAAKNLSDAILLSDILRVNTEITKAPLSASMIKRYDEHHQDLTLLKALVRQQLPEKYKEIFFDQSKNGYAGYIDGGASQEEFYKFIKPILEKMDGTEELLVKLNREDLLRKQRTFDNGSIPHQIHLGELHAILRRQEDFYPFLKDNREKIEKILTFRIPYYVGPLARGNSRFAWMTRKSEETITPWNFEEVVDKGASAQSFIERMTNFDKNLPNEKVLPKHSLLYEYFTVYNELTKVKYVTEGMRKPAFLSGEQKKAIVDLLFKTNRKVTVKQLKEDYFKKIECFDSVEISGVEDRFNASLGTYHDLLKIIKDKDFLDNEENEDILEDIVLTLTLFEDREMIEERLKTYAHLFDDKVMKQLKRRRYTGWGRLSRKLINGIRDKQSGKTILDFLKSDGFANRNFMQLIHDDSLTFKEDIQKAQVSGQGDSLHEHIANLAGSPAIKKGILQTVKVVDELVKVMGRHKPENIVIEMARENQTTQKGQKNSRERMKRIEEGIKELGSQILKEHPVENTQLQNEKLYLYYLQNGRDMYVDQELDINRLSDYDVDHIVPQSFLKDDSIDNKVLTRSDKARGKSDNVPSEEVVKKMKNYWRQLLNAKLITQRKFDNLTKAERGGLSELDKAGFIKRQLVETRQITKHVAQILDSRMNTKYDENDKLIREVKVITLKSKLVSDFRKDFQFYKVREINNYHHAHDAYLNAVVGTALIKKYPKLESEFVYGDYKVYDVRKMIAKSEQEIGKATAKYFFYSNIMNFFKTEITLANGEIRKRPLIETNGETGEIVWDKGRDFATVRKVLSMPQVNIVKKTEVQTGGFSKESILPKRNSDKLIARKKDWDPKKYGGFDSPTVAYSVLVVAKVEKGKSKKLKSVKELLGITIMERSSFEKNPIDFLEAKGYKEVKKDLIIKLPKYSLFELENGRKRMLASAGELQKGNELALPSKYVNFLYLASHYEKLKGSPEDNEQKQLFVEQHKHYLDEIIEQISEFSKRVILADANLDKVLSAYNKHRDKPIREQAENIIHLFTLTNLGAPAAFKYFDTTIDRKRYTSTKEVLDATLIHQSITGLYETRIDLSQLGGDGGGGSGGGEAAAKGGTAPLEEEYRLFLEAPIQNVTLLEQWKREIPKVWAEINPPGLASTQAPIHVQLLSTALPVRVRQYPITLEAKRSLRETIRKFRAAGILRPVHSPWNTPLLPVRKSGTSEYRMVQDLREVNKRVETIHPTVPNPYTLLSLLPPDRIWYSVLDLKDAFFCIPLAPESQLIFAFEWADAEEGESGQLTWTRLPQGFKNSPTLFNEALNRDLQGFRLDHPSVSLLQYVDDLLIAADTQAACLSATRDLLMTLAELGYRVSGKKAQLCQEEVTYLGFKIHKGSRSLSNSRTQAILQIPVPKTKRQVREFLGTIGYCRLWIPGFAELAQPLYAATRPGNDPLVWGEKEEEAFQSLKLALTQPPALALPSLDKPFQLFVEETSGAAKGVLTQALGPWKRPVAYLSKRLDPVAAGWPRCLRAIAAAALLTREASKLTFGQDIEITSSHNLESLLRSPPDKWLTNARITQYQVLLLDPPRVRFKQTAALNPATLLPETDDTLPIHHCLDTLDSLTSTRPDLTDQPLAQAEATLFTDGSSYIRDGKRYAGAAVVTLDSVIWAEPLPIGTSAQKAELIALTKALEWSKDKSVNIYTDSRYAFATLHVHGMIYRERGWLTAGGKAIKNAPEILALLTAVWLPKRVAVMHCKGHQKDDAPTSTGNRRADEVAREVAIRPLSTQATISAGKRTADGSEFEKRTADGSEFESPKKKAKVE

SEQ ID NO: 6886 - protein, 2102 aa, synthetic construct
MPAAKRVKLDGGDKKYSIGLDIGTNSVGWAVITDEYKVPSKKFKVLGNTDRHSIKKNLIGALLFDSGETAEATRLKRTARRRYTRRKNRICYLQEIFSNEMAKVDDSFFHRLEESFLVEEDKKHERHPIFGNIVDEVAYHEKYPTIYHLRKKLVDSTDKADLRLIYLALAHMIKFRGHFLIEGDLNPDNSDVDKLFIQLVQTYNQLFEENPINASGVDAKAILSARLSKSRRLENLIAQLPGEKKNGLFGNLIALSLGLTPNFKSNFDLAEDAKLQLSKDTYDDDLDNLLAQIGDQYADLFLAAKNLSDAILLSDILRVNTEITKAPLSASMIKRYDEHHQDLTLLKALVRQQLPEKYKEIFFDQSKNGYAGYIDGGASQEEFYKFIKPILEKMDGTEELLVKLNREDLLRKQRTFDNGSIPHQIHLGELHAILRRQEDFYPFLKDNREKIEKILTFRIPYYVGPLARGNSRFAWMTRKSEETITPWNFEEVVDKGASAQSFIERMTNFDKNLPNEKVLPKHSLLYEYFTVYNELTKVKYVTEGMRKPAFLSGEQKKAIVDLLFKTNRKVTVKQLKEDYFKKIECFDSVEISGVEDRFNASLGTYHDLLKIIKDKDFLDNEENEDILEDIVLTLTLFEDREMIEERLKTYAHLFDDKVMKQLKRRRYTGWGRLSRKLINGIRDKQSGKTILDFLKSDGFANRNFMQLIHDDSLTFKEDIQKAQVSGQGDSLHEHIANLAGSPAIKKGILQTVKVVDELVKVMGRHKPENIVIEMARENQTTQKGQKNSRERMKRIEEGIKELGSQILKEHPVENTQLQNEKLYLYYLQNGRDMYVDQELDINRLSDYDVDHIVPQSFLKDDSIDNKVLTRSDKARGKSDNVPSEEVVKKMKNYWRQLLNAKLITQRKFDNLTKAERGGLSELDKAGFIKRQLVETRQITKHVAQILDSRMNTKYDENDKLIREVKVITLKSKLVSDFRKDFQFYKVREINNYHHAHDAYLNAVVGTALIKKYPKLESEFVYGDYKVYDVRKMIAKSEQEIGKATAKYFFYSNIMNFFKTEITLANGEIRKRPLIETNGETGEIVWDKGRDFATVRKVLSMPQVNIVKKTEVQTGGFSKESILPKRNSDKLIARKKDWDPKKYGGFDSPTVAYSVLVVAKVEKGKSKKLKSVKELLGITIMERSSFEKNPIDFLEAKGYKEVKKDLIIKLPKYSLFELENGRKRMLASAGELQKGNELALPSKYVNFLYLASHYEKLKGSPEDNEQKQLFVEQHKHYLDEIIEQISEFSKRVILADANLDKVLSAYNKHRDKPIREQAENIIHLFTLTNLGAPAAFKYFDTTIDRKRYTSTKEVLDATLIHQSITGLYETRIDLSQLGGDGGGGSGGGEAAAKGGTVSLQDEHRLFDIPVTTSLPDVWLQDFPQAWAETGGLGRAKCQAPIIIDLKPTAVPVSIKQYPMSLEAHMGIRQHIIKFLELGVLRPCRSPWNTPLLPVKKPGTQDYRPVQDLREINKRTVDIHPTVPNPYNLLSTLKPDYSWYTVLDLKDAFFCLPLAPQSQELFAFEWKDPERGISGQLTWTRLPQGFKNSPTLFNEALHRDLTDFRTQHPEVTLLQYVDDLLLAAPTKKACTQGTRHLLQELGEKGYRASAKKAQICQTKVTYLGYILSEGKRWLTPGRIETVARIPPPRNPREVREFLGTAGFCRLWIPGFAELAAPLYALTKPSTPFTWQTEHQLAFEALKKALLSAPALGLPDTSKPFTLFLDERQGIAKGVLTQKLGPWKRPVAYLSKKLDPVAAGWPPCLRIMAATAMLVKDSAKLTLGQPLTVITPHTLEAIVRQPPDRWITNARLTHYQALLLDTDRVQFGPPVTLNPATLLPVPENQPSPHDCRQVLAETHGTREDLKDQELPDADHTWYTDGSSYLDSGTRRAGAAVVDGHNTIWAQSLPPGTSAQKAELIALTKALELSKGKKANIYTDSRYAFATAHTHGSIYERRGWLTSEGKEIKNKAEIIALLKALFLPQEVAIIHCPGHQKGQDPVAVGNRQADRVARQAAMAEVLTLATEPDNTSHITAGKRTADGSEFEKRTADGSEFESPKKKAKVE

SEQ ID NO: 6887 - protein, 2173 aa, synthetic construct
MPAAKRVKLDGGDKKYSIGLDIGTNSVGWAVITDEYKVPSKKFKVLGNTDRHSIKKNLIGALLFDSGETAEATRLKRTARRRYTRRKNRICYLQEIFSNEMAKVDDSFFHRLEESFLVEEDKKHERHPIFGNIVDEVAYHEKYPTIYHLRKKLVDSTDKADLRLIYLALAHMIKFRGHFLIEGDLNPDNSDVDKLFIQLVQTYNQLFEENPINASGVDAKAILSARLSKSRRLENLIAQLPGEKKNGLFGNLIALSLGLTPNFKSNFDLAEDAKLQLSKDTYDDDLDNLLAQIGDQYADLFLAAKNLSDAILLSDILRVNTEITKAPLSASMIKRYDEHHQDLTLLKALVRQQLPEKYKEIFFDQSKNGYAGYIDGGASQEEFYKFIKPILEKMDGTEELLVKLNREDLLRKQRTFDNGSIPHQIHLGELHAILRRQEDFYPFLKDNREKIEKILTFRIPYYVGPLARGNSRFAWMTRKSEETITPWNFEEVVDKGASAQSFIERMTNFDKNLPNEKVLPKHSLLYEYFTVYNELTKVKYVTEGMRKPAFLSGEQKKAIVDLLFKTNRKVTVKQLKEDYFKKIECFDSVEISGVEDRFNASLGTYHDLLKIIKDKDFLDNEENEDILEDIVLTLTLFEDREMIEERLKTYAHLFDDKVMKQLKRRRYTGWGRLSRKLINGIRDKQSGKTILDFLKSDGFANRNFMQLIHDDSLTFKEDIQKAQVSGQGDSLHEHIANLAGSPAIKKGILQTVKVVDELVKVMGRHKPENIVIEMARENQTTQKGQKNSRERMKRIEEGIKELGSQILKEHPVENTQLQNEKLYLYYLQNGRDMYVDQELDINRLSDYDVDHIVPQSFLKDDSIDNKVLTRSDKARGKSDNVPSEEVVKKMKNYWRQLLNAKLITQRKFDNLTKAERGGLSELDKAGFIKRQLVETRQITKHVAQILDSRMNTKYDENDKLIREVKVITLKSKLVSDFRKDFQFYKVREINNYHHAHDAYLNAVVGTALIKKYPKLESEFVYGDYKVYDVRKMIAKSEQEIGKATAKYFFYSNIMNFFKTEITLANGEIRKRPLIETNGETGEIVWDKGRDFATVRKVLSMPQVNIVKKTEVQTGGFSKESILPKRNSDKLIARKKDWDPKKYGGFDSPTVAYSVLVVAKVEKGKSKKLKSVKELLGITIMERSSFEKNPIDFLEAKGYKEVKKDLIIKLPKYSLFELENGRKRMLASAGELQKGNELALPSKYVNFLYLASHYEKLKGSPEDNEQKQLFVEQHKHYLDEIIEQISEFSKRVILADANLDKVLSAYNKHRDKPIREQAENIIHLFTLTNLGAPAAFKYFDTTIDRKRYTSTKEVLDATLIHQSITGLYETRIDLSQLGGDGGGGSGGGEAAAKGGMDLLKPLTVERKGVKIKGYWNSQADITCVPKDLLQGEEPVRQQNVTTIHGTQEGDVYYVNLKIDGRRINTEVIGTTLDYAIITPGDVPWILKKPLELTIKLDLEEQQGTLLNNSILSKKGKEELKQLFEKYSALWQSWENQVGHRRIRPHKIATGTVKPTPQKQYHINPKAKPDIQIVINDLLKQGVLIQKESTMNTPVYPVPKPNGRWRMVLDYRAVNKVTPLIAVQNQHSYGILGSLFKGRYKTTIDLSNGFWAHPIVPEDYWITAFTWQGKQYCWTVLPQGFLNSPGLFTGDVVDLLQGIPNVEVYVDDVYISHDSEKEHLEYLDILFNRLKEAGYIISLKKSNIANSIVDFLGFQITNEGRGLTDTFKEKLENITAPTTLKQLQSILGLLNFARNFIPDFTELIAPLYALIPKSTKNYVPWQIEHSTTLETLITKLNGAEYLQGRKGDKTLIMKVNASYTTGYIRYYNEGEKKPISYVSIVFSKTELKFTELEKLLTTVHKGLLKALDLSMGQNIHVYSPIVSMQNIQKTPQTAKKALASRWLSWLSYLEDPRIRFFYDPQMPALKDLPAVDTGKDNKKHPSNFQHIFYTDGSAITSPTKEGHLNAGMGIVYFINKDGNLQKQQEWSISLGNHTAQFAEIAAFEFALKKCLPLGGNILVVTDSNYVAKAYNEELDVWASNGFVNNRKKPLKHISKWKSVADLKRLRPDVVVTHEPGHQKLDSSPHAYGNNLADQLATQASFKVHAGKRTADGSEFEKRTADGSEFESPKKKAKVE

SEQ ID NO: 6888 - protein, 2173 aa, synthetic construct
MPAAKRVKLDGGDKKYSIGLDIGTNSVGWAVITDEYKVPSKKFKVLGNTDRHSIKKNLIGALLFDSGETAEATRLKRTARRRYTRRKNRICYLQEIFSNEMAKVDDSFFHRLEESFLVEEDKKHERHPIFGNIVDEVAYHEKYPTIYHLRKKLVDSTDKADLRLIYLALAHMIKFRGHFLIEGDLNPDNSDVDKLFIQLVQTYNQLFEENPINASGVDAKAILSARLSKSRRLENLIAQLPGEKKNGLFGNLIALSLGLTPNFKSNFDLAEDAKLQLSKDTYDDDLDNLLAQIGDQYADLFLAAKNLSDAILLSDILRVNTEITKAPLSASMIKRYDEHHQDLTLLKALVRQQLPEKYKEIFFDQSKNGYAGYIDGGASQEEFYKFIKPILEKMDGTEELLVKLNREDLLRKQRTFDNGSIPHQIHLGELHAILRRQEDFYPFLKDNREKIEKILTFRIPYYVGPLARGNSRFAWMTRKSEETITPWNFEEVVDKGASAQSFIERMTNFDKNLPNEKVLPKHSLLYEYFTVYNELTKVKYVTEGMRKPAFLSGEQKKAIVDLLFKTNRKVTVKQLKEDYFKKIECFDSVEISGVEDRFNASLGTYHDLLKIIKDKDFLDNEENEDILEDIVLTLTLFEDREMIEERLKTYAHLFDDKVMKQLKRRRYTGWGRLSRKLINGIRDKQSGKTILDFLKSDGFANRNFMQLIHDDSLTFKEDIQKAQVSGQGDSLHEHIANLAGSPAIKKGILQTVKVVDELVKVMGRHKPENIVIEMARENQTTQKGQKNSRERMKRIEEGIKELGSQILKEHPVENTQLQNEKLYLYYLQNGRDMYVDQELDINRLSDYDVDHIVPQSFLKDDSIDNKVLTRSDKARGKSDNVPSEEVVKKMKNYWRQLLNAKLITQRKFDNLTKAERGGLSELDKAGFIKRQLVETRQITKHVAQILDSRMNTKYDENDKLIREVKVITLKSKLVSDFRKDFQFYKVREINNYHHAHDAYLNAVVGTALIKKYPKLESEFVYGDYKVYDVRKMIAKSEQEIGKATAKYFFYSNIMNFFKTEITLANGEIRKRPLIETNGETGEIVWDKGRDFATVRKVLSMPQVNIVKKTEVQTGGFSKESILPKRNSDKLIARKKDWDPKKYGGFDSPTVAYSVLVVAKVEKGKSKKLKSVKELLGITIMERSSFEKNPIDFLEAKGYKEVKKDLIIKLPKYSLFELENGRKRMLASAGELQKGNELALPSKYVNFLYLASHYEKLKGSPEDNEQKQLFVEQHKHYLDEIIEQISEFSKRVILADANLDKVLSAYNKHRDKPIREQAENIIHLFTLTNLGAPAAFKYFDTTIDRKRYTSTKEVLDATLIHQSITGLYETRIDLSQLGGDGGGGSGGGEAAAKGGMDLLKPLTVERKGVKIKGYWNSQADITCVPKDLLQGEEPVRQQNVTTIHGTQEGDVYYVNLKIDGRRINTEVIGTTLDYAIITPGDVPWILKKPLELTIKLDLEEQQGTLLNNSILSKKGKEELKQLFEKYSALWQSWENQVGHRRIRPHKIATGTVKPTPQKQYHINPKAKPDIQIVINDLLKQGVLIQKESTMNTPVYPVPKPNGRWRMVLDYRAVNKVTPLIAVQNQHSYGILGSLFKGRYKTTIDLSNGFWAHPIVPEDYWITAFTWQGKQYCWTVLPQGFLNSPGLFNGDVVDLLQGIPNVEVYVDDVYISHDSEKEHLEYLDILFNRLKEAGYIISLKKSNIANSIVDFLGFQITNEGRGLTDTFKEKLENITAPTTLKQLQSILGLLNFARNFIPDFTELIAPLYALIPKSPKNYVPWQIEHSTTLETLITKLNGAEYLQGRKGDKTLIMKVNASYTTGYIRYYNEGEKKPISYVSIVFSKTELKFTELEKLLTTVHKGLLKALDLSMGQNIHVYSPIVSMQNIQKTPQTAKKALASRWLSWLSYLEDPRIRFFYDPQMPALKDLPAVDTGKDNKKHPSNFQHIFYTDGSAITSPTKEGHLNAGMGIVYFINKDGNLQKQQEWSISLGNHTAQFAEIAAFEFALKKCLPLGGNILVVTDSNYVAKAYNEELDVWASNGFVNNRKKPLKHISKWKSVADLKRLRPDVVVTHEPGHQKLDSSPHAYGNNLADQLATQASFKVHAGKRTADGSEFEKRTADGSEFESPKKKAKVE

SEQ ID NO: 6889 - protein, 2095 aa, synthetic construct
MPAAKRVKLDGGDKKYSIGLDIGTNSVGWAVITDEYKVPSKKFKVLGNTDRHSIKKNLIGALLFDSGETAEATRLKRTARRRYTRRKNRICYLQEIFSNEMAKVDDSFFHRLEESFLVEEDKKHERHPIFGNIVDEVAYHEKYPTIYHLRKKLVDSTDKADLRLIYLALAHMIKFRGHFLIEGDLNPDNSDVDKLFIQLVQTYNQLFEENPINASGVDAKAILSARLSKSRRLENLIAQLPGEKKNGLFGNLIALSLGLTPNFKSNFDLAEDAKLQLSKDTYDDDLDNLLAQIGDQYADLFLAAKNLSDAILLSDILRVNTEITKAPLSASMIKRYDEHHQDLTLLKALVRQQLPEKYKEIFFDQSKNGYAGYIDGGASQEEFYKFIKPILEKMDGTEELLVKLNREDLLRKQRTFDNGSIPHQIHLGELHAILRRQEDFYPFLKDNREKIEKILTFRIPYYVGPLARGNSRFAWMTRKSEETITPWNFEEVVDKGASAQSFIERMTNFDKNLPNEKVLPKHSLLYEYFTVYNELTKVKYVTEGMRKPAFLSGEQKKAIVDLLFKTNRKVTVKQLKEDYFKKIECFDSVEISGVEDRFNASLGTYHDLLKIIKDKDFLDNEENEDILEDIVLTLTLFEDREMIEERLKTYAHLFDDKVMKQLKRRRYTGWGRLSRKLINGIRDKQSGKTILDFLKSDGFANRNFMQLIHDDSLTFKEDIQKAQVSGQGDSLHEHIANLAGSPAIKKGILQTVKVVDELVKVMGRHKPENIVIEMARENQTTQKGQKNSRERMKRIEEGIKELGSQILKEHPVENTQLQNEKLYLYYLQNGRDMYVDQELDINRLSDYDVDHIVPQSFLKDDSIDNKVLTRSDKARGKSDNVPSEEVVKKMKNYWRQLLNAKLITQRKFDNLTKAERGGLSELDKAGFIKRQLVETRQITKHVAQILDSRMNTKYDENDKLIREVKVITLKSKLVSDFRKDFQFYKVREINNYHHAHDAYLNAVVGTALIKKYPKLESEFVYGDYKVYDVRKMIAKSEQEIGKATAKYFFYSNIMNFFKTEITLANGEIRKRPLIETNGETGEIVWDKGRDFATVRKVLSMPQVNIVKKTEVQTGGFSKESILPKRNSDKLIARKKDWDPKKYGGFDSPTVAYSVLVVAKVEKGKSKKLKSVKELLGITIMERSSFEKNPIDFLEAKGYKEVKKDLIIKLPKYSLFELENGRKRMLASAGELQKGNELALPSKYVNFLYLASHYEKLKGSPEDNEQKQLFVEQHKHYLDEIIEQISEFSKRVILADANLDKVLSAYNKHRDKPIREQAENIIHLFTLTNLGAPAAFKYFDTTIDRKRYTSTKEVLDATLIHQSITGLYETRIDLSQLGGDGGGGSGGGEAAAKGGTLQLEEEYRLFEPESTQKQEMDIWLKNFPQAWAETGGMGTAHCQAPVLIQLKATATPISIRQYPMPHEAYQGIKPHIRRMLDQGILKPCQSPWNTPLLPVKKPGTEDYRPVQDLREVNKRVEDIHPTVPNPYNLLSTLPPSHPWYTVLDLKDAFFCLRLHSESQLLFAFEWRDPEIGLSGQLTWTRLPQGFKNSPTLFNEALHSDLADFRVRYPALVLLQYVDDLLLAAATRTECLEGTKALLETLGNKGYRASAKKAQICLQEVTYLGYSLKDGQRWLTKARKEAILSIPVPKNSRQVREFLGTAGYCRLWIPGFAELAAPLYPLTRPGTLFQWGTEQQLAFEDIKKALLSSPALGLPDITKPFELFIDENSGFAKGVLVQKLGPWKRPVAYLSKKLDTVASGWPPCLRMVAAIAILVKDAGKLTLGQPLTILTSHPVEALVRQPPNKWLSNARMTHYQAMLLDAERVHFGPTVSLNPATLLPLPSGGNHHDCLQILAETHGTRPDLTDQPLPDADLTWYTDGSSFIRNGEREAGAAVTTESEVIWAAPLPPGTSAQRAELIALTQALKMAEGKKLTVYTDSRYAFATTHVHGEIYRRRGWLTSEGKEIKNKNEILALLEALFLPKRLSIIHCPGHQKGDSPQAKGNRLADDTAKKAATETHSSLTVLPAGKRTADGSEFEKRTADGSEFESPKKKAKVE

SEQ ID NO: 6890 - protein, 2127 aa, synthetic construct
MPAAKRVKLDGGDKKYSIGLDIGTNSVGWAVITDEYKVPSKKFKVLGNTDRHSIKKNLIGALLFDSGETAEATRLKRTARRRYTRRKNRICYLQEIFSNEMAKVDDSFFHRLEESFLVEEDKKHERHPIFGNIVDEVAYHEKYPTIYHLRKKLVDSTDKADLRLIYLALAHMIKFRGHFLIEGDLNPDNSDVDKLFIQLVQTYNQLFEENPINASGVDAKAILSARLSKSRRLENLIAQLPGEKKNGLFGNLIALSLGLTPNFKSNFDLAEDAKLQLSKDTYDDDLDNLLAQIGDQYADLFLAAKNLSDAILLSDILRVNTEITKAPLSASMIKRYDEHHQDLTLLKALVRQQLPEKYKEIFFDQSKNGYAGYIDGGASQEEFYKFIKPILEKMDGTEELLVKLNREDLLRKQRTFDNGSIPHQIHLGELHAILRRQEDFYPFLKDNREKIEKILTFRIPYYVGPLARGNSRFAWMTRKSEETITPWNFEEVVDKGASAQSFIERMTNFDKNLPNEKVLPKHSLLYEYFTVYNELTKVKYVTEGMRKPAFLSGEQKKAIVDLLFKTNRKVTVKQLKEDYFKKIECFDSVEISGVEDRFNASLGTYHDLLKIIKDKDFLDNEENEDILEDIVLTLTLFEDREMIEERLKTYAHLFDDKVMKQLKRRRYTGWGRLSRKLINGIRDKQSGKTILDFLKSDGFANRNFMQLIHDDSLTFKEDIQKAQVSGQGDSLHEHIANLAGSPAIKKGILQTVKVVDELVKVMGRHKPENIVIEMARENQTTQKGQKNSRERMKRIEEGIKELGSQILKEHPVENTQLQNEKLYLYYLQNGRDMYVDQELDINRLSDYDVDHIVPQSFLKDDSIDNKVLTRSDKARGKSDNVPSEEVVKKMKNYWRQLLNAKLITQRKFDNLTKAERGGLSELDKAGFIKRQLVETRQITKHVAQILDSRMNTKYDENDKLIREVKVITLKSKLVSDFRKDFQFYKVREINNYHHAHDAYLNAVVGTALIKKYPKLESEFVYGDYKVYDVRKMIAKSEQEIGKATAKYFFYSNIMNFFKTEITLANGEIRKRPLIETNGETGEIVWDKGRDFATVRKVLSMPQVNIVKKTEVQTGGFSKESILPKRNSDKLIARKKDWDPKKYGGFDSPTVAYSVLVVAKVEKGKSKKLKSVKELLGITIMERSSFEKNPIDFLEAKGYKEVKKDLIIKLPKYSLFELENGRKRMLASAGELQKGNELALPSKYVNFLYLASHYEKLKGSPEDNEQKQLFVEQHKHYLDEIIEQISEFSKRVILADANLDKVLSAYNKHRDKPIREQAENIIHLFTLTNLGAPAAFKYFDTTIDRKRYTSTKEVLDATLIHQSITGLYETRIDLSQLGGDGGGGSGGGEAAAKGGLLGRDLLTKLKAQIQFSTEGPQVTWEDRPAMCLVLNLEEEYRLHEKPVPPSIDPSWLQLFPMVWAEKAGMGLANQVPPVVVELKSDASPVAVRQYPMSKEAREGIRPHIQRFLDLGILVPCQSPWNTPLLPVKKPGTNDYRPVQDLREVNKRVQDIHPTVPNPYNLLSSLPPSHTWYSVLDLKDAFFCLKLHPNSQPLFAFEWRDPEKGNTGQLTWTRLPQGFKNSPTLFDEALHRDLASFRALNPQVVMLQYVDDLLVAAPTYRDCKEGTRRLLQELSKLGYRVSAKKAQLCREEVTYLGYLLKGGKRWLTPARKATVMKIPTPTTPRQVREFLGTAGFCRLWIPGFASLAAPLYPLTREKVPFTWTEAHQEAFGRIKEALLSAPALALPDLTKPFALYVDEKEGVARGVLTQTLGPWRRPVAYLSKKLDPVASGWPTCLKAIAAVALLLKDADKLTLGQNVLVIAPHNLESIVRQPPDRWMTNARMTHYQSLLLNERVSFAPPAILNPATLLPVESDDTPIHICSEILAEETGTRPDLRDQPLPGVPAWYTDGSSFIMDGRRQAGAAIVDNKRTVWASNLPEGTSAQKAELIALTQALRLAEGKSINIYTDSRYAFATAHVHGAIYKQRGLLTSAGKDIKNKEEILALLEAIHLPKRVAIIHCPGHQRGTDPVATGNRKADEAAKQAAQSTRILTETTKNAGKRTADGSEFEKRTADGSEFESPKKKAKVE

SEQ ID NO: 6891 - protein, 2218 aa, synthetic construct
MPAAKRVKLDGGDKKYSIGLDIGTNSVGWAVITDEYKVPSKKFKVLGNTDRHSIKKNLIGALLFDSGETAEATRLKRTARRRYTRRKNRICYLQEIFSNEMAKVDDSFFHRLEESFLVEEDKKHERHPIFGNIVDEVAYHEKYPTIYHLRKKLVDSTDKADLRLIYLALAHMIKFRGHFLIEGDLNPDNSDVDKLFIQLVQTYNQLFEENPINASGVDAKAILSARLSKSRRLENLIAQLPGEKKNGLFGNLIALSLGLTPNFKSNFDLAEDAKLQLSKDTYDDDLDNLLAQIGDQYADLFLAAKNLSDAILLSDILRVNTEITKAPLSASMIKRYDEHHQDLTLLKALVRQQLPEKYKEIFFDQSKNGYAGYIDGGASQEEFYKFIKPILEKMDGTEELLVKLNREDLLRKQRTFDNGSIPHQIHLGELHAILRRQEDFYPFLKDNREKIEKILTFRIPYYVGPLARGNSRFAWMTRKSEETITPWNFEEVVDKGASAQSFIERMTNFDKNLPNEKVLPKHSLLYEYFTVYNELTKVKYVTEGMRKPAFLSGEQKKAIVDLLFKTNRKVTVKQLKEDYFKKIECFDSVEISGVEDRFNASLGTYHDLLKIIKDKDFLDNEENEDILEDIVLTLTLFEDREMIEERLKTYAHLFDDKVMKQLKRRRYTGWGRLSRKLINGIRDKQSGKTILDFLKSDGFANRNFMQLIHDDSLTFKEDIQKAQVSGQGDSLHEHIANLAGSPAIKKGILQTVKVVDELVKVMGRHKPENIVIEMARENQTTQKGQKNSRERMKRIEEGIKELGSQILKEHPVENTQLQNEKLYLYYLQNGRDMYVDQELDINRLSDYDVDHIVPQSFLKDDSIDNKVLTRSDKARGKSDNVPSEEVVKKMKNYWRQLLNAKLITQRKFDNLTKAERGGLSELDKAGFIKRQLVETRQITKHVAQILDSRMNTKYDENDKLIREVKVITLKSKLVSDFRKDFQFYKVREINNYHHAHDAYLNAVVGTALIKKYPKLESEFVYGDYKVYDVRKMIAKSEQEIGKATAKYFFYSNIMNFFKTEITLANGEIRKRPLIETNGETGEIVWDKGRDFATVRKVLSMPQVNIVKKTEVQTGGFSKESILPKRNSDKLIARKKDWDPKKYGGFDSPTVAYSVLVVAKVEKGKSKKLKSVKELLGITIMERSSFEKNPIDFLEAKGYKEVKKDLIIKLPKYSLFELENGRKRMLASAGELQKGNELALPSKYVNFLYLASHYEKLKGSPEDNEQKQLFVEQHKHYLDEIIEQISEFSKRVILADANLDKVLSAYNKHRDKPIREQAENIIHLFTLTNLGAPAAFKYFDTTIDRKRYTSTKEVLDATLIHQSITGLYETRIDLSQLGGDGGGGSGGGEAAAKGGTLGDQGSRGSDPLPEPRVTLTVEGIPTEFLVNTGAEHSVLTKPMGKMGSKRTVVAGATGSKVYPWTTKRLLKIGQKQVTHSFLVIPECPAPLLGRDLLTKLKAQIQFSTEGPQVTWEDRPAMCLVLNLEEEYRLHEKPVPPSIDPSWLQLFPMVWAEKAGMGLANQVPPVVVELKSDASPVAVRQYPMSKEAREGIRPHIQRFLDLGILVPCQSPWNTPLLPVKKPGTNDYRPVQDLREVNKRVQDIHPTVPNPYNLLSSLPPSHTWYSVLDLKDAFFCLKLHPNSQPLFAFEWRDPEKGNTGQLTWTRLPQGFKNSPTLFNEALHRDLASFRALNPQVVMLQYVDDLLVAAPTYRDCKEGTRRLLQELSKLGYRVSAKKAQLCREEVTYLGYLLKGGKRWLTPARKATVMKIPTPTTPRQVREFLGKAGFCRLFIPGFASLAAPLYPLTRPKVPFTWTEAHQEAFGRIKEALLSAPALALPDLTKPFALYVDEKEGVARGVLTQTLGPWRRPVAYLSKKLDPVASGWPTCLKAIAAVALLLKDADKLTLGQNVLVIAPHNLESIVRQPPDRWMTNARMTHYQSLLLNERVSFAPPAILNPATLLPVESDDTPIHICSEILAEETGTRPDLRDQPLPGVPAWYTDGSSFIMDGRRQAGAAIVDNKRTVWASNLPEGTSAQKAELIALTQALRLAEGKSINIYTDSRYAFATAHVHGAIYKQRGWLTSAGKDIKNKEEILALLEAIHLPKRVAIIHCPGHQRGTDPVATGNRKADEAAKQAAQSTRILTETTKNAGKRTADGSEFEKRTADGSEFESPKKKAKVE

SEQ ID NO: 6892 - protein, 2096 aa, synthetic construct
MPAAKRVKLDGGDKKYSIGLDIGTNSVGWAVITDEYKVPSKKFKVLGNTDRHSIKKNLIGALLFDSGETAEATRLKRTARRRYTRRKNRICYLQEIFSNEMAKVDDSFFHRLEESFLVEEDKKHERHPIFGNIVDEVAYHEKYPTIYHLRKKLVDSTDKADLRLIYLALAHMIKFRGHFLIEGDLNPDNSDVDKLFIQLVQTYNQLFEENPINASGVDAKAILSARLSKSRRLENLIAQLPGEKKNGLFGNLIALSLGLTPNFKSNFDLAEDAKLQLSKDTYDDDLDNLLAQIGDQYADLFLAAKNLSDAILLSDILRVNTEITKAPLSASMIKRYDEHHQDLTLLKALVRQQLPEKYKEIFFDQSKNGYAGYIDGGASQEEFYKFIKPILEKMDGTEELLVKLNREDLLRKQRTFDNGSIPHQIHLGELHAILRRQEDFYPFLKDNREKIEKILTFRIPYYVGPLARGNSRFAWMTRKSEETITPWNFEEVVDKGASAQSFIERMTNFDKNLPNEKVLPKHSLLYEYFTVYNELTKVKYVTEGMRKPAFLSGEQKKAIVDLLFKTNRKVTVKQLKEDYFKKIECFDSVEISGVEDRFNASLGTYHDLLKIIKDKDFLDNEENEDILEDIVLTLTLFEDREMIEERLKTYAHLFDDKVMKQLKRRRYTGWGRLSRKLINGIRDKQSGKTILDFLKSDGFANRNFMQLIHDDSLTFKEDIQKAQVSGQGDSLHEHIANLAGSPAIKKGILQTVKVVDELVKVMGRHKPENIVIEMARENQTTQKGQKNSRERMKRIEEGIKELGSQILKEHPVENTQLQNEKLYLYYLQNGRDMYVDQELDINRLSDYDVDHIVPQSFLKDDSIDNKVLTRSDKARGKSDNVPSEEVVKKMKNYWRQLLNAKLITQRKFDNLTKAERGGLSELDKAGFIKRQLVETRQITKHVAQILDSRMNTKYDENDKLIREVKVITLKSKLVSDFRKDFQFYKVREINNYHHAHDAYLNAVVGTALIKKYPKLESEFVYGDYKVYDVRKMIAKSEQEIGKATAKYFFYSNIMNFFKTEITLANGEIRKRPLIETNGETGEIVWDKGRDFATVRKVLSMPQVNIVKKTEVQTGGFSKESILPKRNSDKLIARKKDWDPKKYGGFDSPTVAYSVLVVAKVEKGKSKKLKSVKELLGITIMERSSFEKNPIDFLEAKGYKEVKKDLIIKLPKYSLFELENGRKRMLASAGELQKGNELALPSKYVNFLYLASHYEKLKGSPEDNEQKQLFVEQHKHYLDEIIEQISEFSKRVILADANLDKVLSAYNKHRDKPIREQAENIIHLFTLTNLGAPAAFKYFDTTIDRKRYTSTKEVLDATLIHQSITGLYETRIDLSQLGGDGGGGSGGGEAAAKGGTLNLEDEYRLYETSAEPEVSPGSTWLSDFPQAWAETGGMGLAVRQAPLIIPLKATSTPVSIKQYPMSQEAKLGIKPHIQRLLDQGILVPCQSPWNTPLLPVKKPGTNDYRPVQDLREVNKRVEDIHPTVPNPYNLLSGLPPSHRWYTVLDLKDAFFCLRLHPTSQPLFAFEWRDPGMGISGQLTWTRLPQGFKNSPTLFNEALHRDLADFRIQHPDLILLQYVDDILLAATSELDCQQGTRALLLTLGNLGYRASAKKAQLCQKQVKYLGYLLKEGQRWLTEARKETVMGQPTPKTPRQLREFLGKAGFCRLFIPGFAEMAAPLYPLTKPGTLFNWGPDQQKAYQEIKQALLTAPALGLPDLTKPFELFVDEKQGYAKGVLTQKLGPWRRPVAYLSKKLDPVAAGWPPCLRMVAAIAVLRKDAGKLTMGQPLVILAPHAVEALVKQPPDRWLSNARMTHYQAMLLDTDRVQFGPVVALNPATLLPLPEEGAPHDCLEILAETHGTRPDLTDQPIPDADHTWYTDGSSFLQEGQRKAGAAVTTETEVIWARALPAGTSAQRAELIALTQALKMAEGKRLNVYTDSRYAFATAHIHGEIYRRRGWLTSEGREIKNKSEILALLKALFLPKRLSIIHCLGHQKGDSAEARGNRLADQAAREAAIKTPPDTSTLLAGKRTADGSEFEKRTADGSEFESPKKKAKVE

SEQ ID NO: 6893 - protein, 2096 aa, synthetic construct
MPAAKRVKLDGGDKKYSIGLDIGTNSVGWAVITDEYKVPSKKFKVLGNTDRHSIKKNLIGALLFDSGETAEATRLKRTARRRYTRRKNRICYLQEIFSNEMAKVDDSFFHRLEESFLVEEDKKHERHPIFGNIVDEVAYHEKYPTIYHLRKKLVDSTDKADLRLIYLALAHMIKFRGHFLIEGDLNPDNSDVDKLFIQLVQTYNQLFEENPINASGVDAKAILSARLSKSRRLENLIAQLPGEKKNGLFGNLIALSLGLTPNFKSNFDLAEDAKLQLSKDTYDDDLDNLLAQIGDQYADLFLAAKNLSDAILLSDILRVNTEITKAPLSASMIKRYDEHHQDLTLLKALVRQQLPEKYKEIFFDQSKNGYAGYIDGGASQEEFYKFIKPILEKMDGTEELLVKLNREDLLRKQRTFDNGSIPHQIHLGELHAILRRQEDFYPFLKDNREKIEKILTFRIPYYVGPLARGNSRFAWMTRKSEETITPWNFEEVVDKGASAQSFIERMTNFDKNLPNEKVLPKHSLLYEYFTVYNELTKVKYVTEGMRKPAFLSGEQKKAIVDLLFKTNRKVTVKQLKEDYFKKIECFDSVEISGVEDRFNASLGTYHDLLKIIKDKDFLDNEENEDILEDIVLTLTLFEDREMIEERLKTYAHLFDDKVMKQLKRRRYTGWGRLSRKLINGIRDKQSGKTILDFLKSDGFANRNFMQLIHDDSLTFKEDIQKAQVSGQGDSLHEHIANLAGSPAIKKGILQTVKVVDELVKVMGRHKPENIVIEMARENQTTQKGQKNSRERMKRIEEGIKELGSQILKEHPVENTQLQNEKLYLYYLQNGRDMYVDQELDINRLSDYDVDHIVPQSFLKDDSIDNKVLTRSDKARGKSDNVPSEEVVKKMKNYWRQLLNAKLITQRKFDNLTKAERGGLSELDKAGFIKRQLVETRQITKHVAQILDSRMNTKYDENDKLIREVKVITLKSKLVSDFRKDFQFYKVREINNYHHAHDAYLNAVVGTALIKKYPKLESEFVYGDYKVYDVRKMIAKSEQEIGKATAKYFFYSNIMNFFKTEITLANGEIRKRPLIETNGETGEIVWDKGRDFATVRKVLSMPQVNIVKKTEVQTGGFSKESILPKRNSDKLIARKKDWDPKKYGGFDSPTVAYSVLVVAKVEKGKSKKLKSVKELLGITIMERSSFEKNPIDFLEAKGYKEVKKDLIIKLPKYSLFELENGRKRMLASAGELQKGNELALPSKYVNFLYLASHYEKLKGSPEDNEQKQLFVEQHKHYLDEIIEQISEFSKRVILADANLDKVLSAYNKHRDKPIREQAENIIHLFTLTNLGAPAAFKYFDTTIDRKRYTSTKEVLDATLIHQSITGLYETRIDLSQLGGDGGGGSGGGEAAAKGGTLNIEDEYRLHEISTEPDVSPGSTWLSDFPQAWAETGGMGLAVRQAPLIIPLKATSTPVSIKQYPMSQEAKLGIKPHIQRLLDQGILVPCQSPWNTPLLPVKKPGTNDYRPVQGLREVNKRVEDIHPTVPNPYNLLSGLPTSHRWYTVLDLKDAFFCLRLHPTSQPLFASEWRDPGMGISGQLTWTRLPQGFKNSPTLFNEALHRGLADFRIQHPDLILLQYVDDLLLAATSELDCQQGTRALLKTLGNLGYRASAKKAQICQKQVKYLGYLLREGQRWLTEARKETVMGQPTPKTPRQLREFLGTAGFCRLWIPRFAEMAAPLYPLTKPGTLFNWGPDQQKAYHEIKQALLTAPALGLPDLTKPFELFVDEKQGYAKGVLTQKLGPWRRPVAYLSKKLDPVAAGWPPCLRMVAAIAVLTKDAGKLTMGQPLVILAPHAVEALVKQPPDRWLSNARMTHYQAMLLDTDRVQFGPVVALNPATLLPLPEEGAPHDCLEILAETHGTEPDLTDQPIPDADHTWYTDGSSFLQEGQRKAGAAVTTETEVIWARALPAGTSAQRAELIALTQALKMAEGKRLNVYTDSRYAFATAHIHGEIYKRRGWLTSEGREIKNKSEILALLKALFLPKRLSIIHCLGHQKGDSAEARGNRLADQAAREAAIKTPPDTSTLLAGKRTADGSEFEKRTADGSEFESPKKKAKVE

SEQ ID NO: 6894 - protein, 2087 aa, synthetic construct
MPAAKRVKLDGGDKKYSIGLDIGTNSVGWAVITDEYKVPSKKFKVLGNTDRHSIKKNLIGALLFDSGETAEATRLKRTARRRYTRRKNRICYLQEIFSNEMAKVDDSFFHRLEESFLVEEDKKHERHPIFGNIVDEVAYHEKYPTIYHLRKKLVDSTDKADLRLIYLALAHMIKFRGHFLIEGDLNPDNSDVDKLFIQLVQTYNQLFEENPINASGVDAKAILSARLSKSRRLENLIAQLPGEKKNGLFGNLIALSLGLTPNFKSNFDLAEDAKLQLSKDTYDDDLDNLLAQIGDQYADLFLAAKNLSDAILLSDILRVNTEITKAPLSASMIKRYDEHHQDLTLLKALVRQQLPEKYKEIFFDQSKNGYAGYIDGGASQEEFYKFIKPILEKMDGTEELLVKLNREDLLRKQRTFDNGSIPHQIHLGELHAILRRQEDFYPFLKDNREKIEKILTFRIPYYVGPLARGNSRFAWMTRKSEETITPWNFEEVVDKGASAQSFIERMTNFDKNLPNEKVLPKHSLLYEYFTVYNELTKVKYVTEGMRKPAFLSGEQKKAIVDLLFKTNRKVTVKQLKEDYFKKIECFDSVEISGVEDRFNASLGTYHDLLKIIKDKDFLDNEENEDILEDIVLTLTLFEDREMIEERLKTYAHLFDDKVMKQLKRRRYTGWGRLSRKLINGIRDKQSGKTILDFLKSDGFANRNFMQLIHDDSLTFKEDIQKAQVSGQGDSLHEHIANLAGSPAIKKGILQTVKVVDELVKVMGRHKPENIVIEMARENQTTQKGQKNSRERMKRIEEGIKELGSQILKEHPVENTQLQNEKLYLYYLQNGRDMYVDQELDINRLSDYDVDHIVPQSFLKDDSIDNKVLTRSDKARGKSDNVPSEEVVKKMKNYWRQLLNAKLITQRKFDNLTKAERGGLSELDKAGFIKRQLVETRQITKHVAQILDSRMNTKYDENDKLIREVKVITLKSKLVSDFRKDFQFYKVREINNYHHAHDAYLNAVVGTALIKKYPKLESEFVYGDYKVYDVRKMIAKSEQEIGKATAKYFFYSNIMNFFKTEITLANGEIRKRPLIETNGETGEIVWDKGRDFATVRKVLSMPQVNIVKKTEVQTGGFSKESILPKRNSDKLIARKKDWDPKKYGGFDSPTVAYSVLVVAKVEKGKSKKLKSVKELLGITIMERSSFEKNPIDFLEAKGYKEVKKDLIIKLPKYSLFELENGRKRMLASAGELQKGNELALPSKYVNFLYLASHYEKLKGSPEDNEQKQLFVEQHKHYLDEIIEQISEFSKRVILADANLDKVLSAYNKHRDKPIREQAENIIHLFTLTNLGAPAAFKYFDTTIDRKRYTSTKEVLDATLIHQSITGLYETRIDLSQLGGDGGGGSGGGEAAAKGGIPWLMKKPLQLTTLVPLQEYEERLLKQTMLTGSYKEKLQSLFLKYDALWQHWENQVGHRRIKPHHIATGTVNPRPQKQYPINPKAKASIQTVINDLLKQGVLIQQNSIMNTPVYPVPKPDGKWRMVLDYREVNKTIPLIAAQNQHSAGILSSIFRGKYKTTLDLSNGFWAHSITPESYWLTAFTWLGQQYCWTRLPQGFLNSPALFNADVVDLLKEVPNVQVYVDDIYISHDDPREHLEQLEKVFSLLLNAGYVVSLKKSEIAQHEVEFLGFNITKEGRGLTETFKQKLLNITPPRDLKQLQSILGLLNFARNFIPNFSELVKPLYNIIATAPGKYITWTTDNSQQLQNIISMLNSAENLEERNPEVRLIMKVNTSPSAGYIRFYNEFAKRPIMYLNYVYTKAEVKFTNTEKLLTTIHKGLIKALDLGMGQEILVYSPIVSMTKIQKTPLPERKALPIRWITWMSYLEDPRIQFHYDKTLPELQQVPTVTDDIIAKIKHPSEFSMVFYTDGSAIKHPNVNKSHNAGMGIAQVQFKPEFTVINTWSIPLGDHTAQLAEVAAVEFACKKALKIDGPVLIVTDSFYVAESVNKELPYWQSNGFFNNKKKPLKHVSKWKSIADCIQLKPDIIIIHEKGHQPTASTFHTEGNNLADKLATQGSYVVNAGKRTADGSEFEKRTADGSEFESPKKKAKVE

SEQ ID NO: 6895 - protein, 2176 aa, synthetic construct
MPAAKRVKLDGGDKKYSIGLDIGTNSVGWAVITDEYKVPSKKFKVLGNTDRHSIKKNLIGALLFDSGETAEATRLKRTARRRYTRRKNRICYLQEIFSNEMAKVDDSFFHRLEESFLVEEDKKHERHPIFGNIVDEVAYHEKYPTIYHLRKKLVDSTDKADLRLIYLALAHMIKFRGHFLIEGDLNPDNSDVDKLFIQLVQTYNQLFEENPINASGVDAKAILSARLSKSRRLENLIAQLPGEKKNGLFGNLIALSLGLTPNFKSNFDLAEDAKLQLSKDTYDDDLDNLLAQIGDQYADLFLAAKNLSDAILLSDILRVNTEITKAPLSASMIKRYDEHHQDLTLLKALVRQQLPEKYKEIFFDQSKNGYAGYIDGGASQEEFYKFIKPILEKMDGTEELLVKLNREDLLRKQRTFDNGSIPHQIHLGELHAILRRQEDFYPFLKDNREKIEKILTFRIPYYVGPLARGNSRFAWMTRKSEETITPWNFEEVVDKGASAQSFIERMTNFDKNLPNEKVLPKHSLLYEYFTVYNELTKVKYVTEGMRKPAFLSGEQKKAIVDLLFKTNRKVTVKQLKEDYFKKIECFDSVEISGVEDRFNASLGTYHDLLKIIKDKDFLDNEENEDILEDIVLTLTLFEDREMIEERLKTYAHLFDDKVMKQLKRRRYTGWGRLSRKLINGIRDKQSGKTILDFLKSDGFANRNFMQLIHDDSLTFKEDIQKAQVSGQGDSLHEHIANLAGSPAIKKGILQTVKVVDELVKVMGRHKPENIVIEMARENQTTQKGQKNSRERMKRIEEGIKELGSQILKEHPVENTQLQNEKLYLYYLQNGRDMYVDQELDINRLSDYDVDHIVPQSFLKDDSIDNKVLTRSDKARGKSDNVPSEEVVKKMKNYWRQLLNAKLITQRKFDNLTKAERGGLSELDKAGFIKRQLVETRQITKHVAQILDSRMNTKYDENDKLIREVKVITLKSKLVSDFRKDFQFYKVREINNYHHAHDAYLNAVVGTALIKKYPKLESEFVYGDYKVYDVRKMIAKSEQEIGKATAKYFFYSNIMNFFKTEITLANGEIRKRPLIETNGETGEIVWDKGRDFATVRKVLSMPQVNIVKKTEVQTGGFSKESILPKRNSDKLIARKKDWDPKKYGGFDSPTVAYSVLVVAKVEKGKSKKLKSVKELLGITIMERSSFEKNPIDFLEAKGYKEVKKDLIIKLPKYSLFELENGRKRMLASAGELQKGNELALPSKYVNFLYLASHYEKLKGSPEDNEQKQLFVEQHKHYLDEIIEQISEFSKRVILADANLDKVLSAYNKHRDKPIREQAENIIHLFTLTNLGAPAAFKYFDTTIDRKRYTSTKEVLDATLIHQSITGLYETRIDLSQLGGDGGGGSGGGEAAAKGGMDPLQLLQPLEAEIKGTKLKAHWNSGATITCVPQAFLEEEVPIKNIWIKTIHGEKEQPVYYLTFKIQGRKVEAEVISSPYDYILVSPSDIPWLMKKPLQLTTLVPLQEYEERLLKQTMLTGSYKEKLQSLFLKYDALWQHWENQVGHRRIKPHHIATGTVNPRPQKQYPINPKAKASIQTVINDLLKQGVLIQQNSIMNTPVYPVPKPDGKWRMVLDYREVNKTIPLIAAQNQHSAGILSSIFRGKYKTTLDLSNGFWAHSITPESYWLTAFTWLGQQYCWTRLPQGFLNSPALFNADVVDLLKEVPNVQVYVDDIYISHDDPREHLEQLEKVFSLLLNAGYVVSLKKSEIAQHEVEFLGFNITKEGRGLTETFKQKLLNITPPRDLKQLQSILGLLNFARNFIPNFSELVKPLYNIIATAPGKYITWTTDNSQQLQNIISMLNSAENLEERNPEVRLIMKVNTSPSAGYIRFYNEFAKRPIMYLNYVYTKAEVKFTNTEKLLTTIHKGLIKALDLGMGQEILVYSPIVSMTKIQKTPLPERKALPIRWITWMSYLEDPRIQFHYDKTLPELQQVPTVTDDIIAKIKHPSEFSMVFYTDGSAIKHPNVNKSHNAGMGIAQVQFKPEFTVINTWSIPLGDHTAQLAEVAAVEFACKKALKIDGPVLIVTDSFYVAESVNKELPYWQSNGFFNNKKKPLKHVSKWKSIADCIQLKPDIIIIHEKGHQPTASTFHTEGNNLADKLATQGSYVVNAGKRTADGSEFEKRTADGSEFESPKKKAKVE

SEQ ID NO: 6896 - protein, 2094 aa, synthetic construct
MPAAKRVKLDGGDKKYSIGLDIGTNSVGWAVITDEYKVPSKKFKVLGNTDRHSIKKNLIGALLFDSGETAEATRLKRTARRRYTRRKNRICYLQEIFSNEMAKVDDSFFHRLEESFLVEEDKKHERHPIFGNIVDEVAYHEKYPTIYHLRKKLVDSTDKADLRLIYLALAHMIKFRGHFLIEGDLNPDNSDVDKLFIQLVQTYNQLFEENPINASGVDAKAILSARLSKSRRLENLIAQLPGEKKNGLFGNLIALSLGLTPNFKSNFDLAEDAKLQLSKDTYDDDLDNLLAQIGDQYADLFLAAKNLSDAILLSDILRVNTEITKAPLSASMIKRYDEHHQDLTLLKALVRQQLPEKYKEIFFDQSKNGYAGYIDGGASQEEFYKFIKPILEKMDGTEELLVKLNREDLLRKQRTFDNGSIPHQIHLGELHAILRRQEDFYPFLKDNREKIEKILTFRIPYYVGPLARGNSRFAWMTRKSEETITPWNFEEVVDKGASAQSFIERMTNFDKNLPNEKVLPKHSLLYEYFTVYNELTKVKYVTEGMRKPAFLSGEQKKAIVDLLFKTNRKVTVKQLKEDYFKKIECFDSVEISGVEDRFNASLGTYHDLLKIIKDKDFLDNEENEDILEDIVLTLTLFEDREMIEERLKTYAHLFDDKVMKQLKRRRYTGWGRLSRKLINGIRDKQSGKTILDFLKSDGFANRNFMQLIHDDSLTFKEDIQKAQVSGQGDSLHEHIANLAGSPAIKKGILQTVKVVDELVKVMGRHKPENIVIEMARENQTTQKGQKNSRERMKRIEEGIKELGSQILKEHPVENTQLQNEKLYLYYLQNGRDMYVDQELDINRLSDYDVDHIVPQSFLKDDSIDNKVLTRSDKARGKSDNVPSEEVVKKMKNYWRQLLNAKLITQRKFDNLTKAERGGLSELDKAGFIKRQLVETRQITKHVAQILDSRMNTKYDENDKLIREVKVITLKSKLVSDFRKDFQFYKVREINNYHHAHDAYLNAVVGTALIKKYPKLESEFVYGDYKVYDVRKMIAKSEQEIGKATAKYFFYSNIMNFFKTEITLANGEIRKRPLIETNGETGEIVWDKGRDFATVRKVLSMPQVNIVKKTEVQTGGFSKESILPKRNSDKLIARKKDWDPKKYGGFDSPTVAYSVLVVAKVEKGKSKKLKSVKELLGITIMERSSFEKNPIDFLEAKGYKEVKKDLIIKLPKYSLFELENGRKRMLASAGELQKGNELALPSKYVNFLYLASHYEKLKGSPEDNEQKQLFVEQHKHYLDEIIEQISEFSKRVILADANLDKVLSAYNKHRDKPIREQAENIIHLFTLTNLGAPAAFKYFDTTIDRKRYTSTKEVLDATLIHQSITGLYETRIDLSQLGGDGGGGSGGGEAAAKGGVLNLEEEYRLHEKPVPSSIDPSWLQLFPTVWAERAGMGLANQVPPVVVELRSGASPVAVRQYPMSKEAREGIRPHIQRFLDLGVLVPCQSPWNTPLLPVKKPGTNDYRPVQDLREINKRVQDIHPTVPNPYNLLSSLPPSHTWYSVLDLKDAFFCLKLHPNSQPLFAFEWRDPEKGNTGQLTWTRLPQGFKNSPTLFNEALHRDLAPFRALNPQVVLLQYVDDLLVAAPTYRDCKEGTQKLLQELSKLGYRVSAKKAQLCQKEVTYLGYLLKEGKRWLTPARKATVMKIPPPTTPRQVREFLGKAGFCRLFIPGFASLAAPLYPLTKPSIPFIWTEEHQKAFDRIKEALLSAPALALPDLTKPFTLYVDERAGVARGVLTQTLGPWRRPVAYLSKKLDPVASGWPTCLKAVAAVALLLKDADKLTLGQNVTVIASHSLESIVRQPPDRWMTNARMTHYQSLLLNERVSFAPPAVLNPATLLPVESEATPVHRCSEILAEETGTRRDLKDQPLPGVPAWYTDGSSFIAEGKRRAGAAIVDGKRTVWASSLPEGTSAQKAELVALTQALRLAEGKDINIYTDSRYAFATAHIHGAIYKQRGWLTSAGKDIKNKEEILALLEAIHLPKRVAIIHCPGHQKGNDPVATGNRRADEAAKQAALSTRVLAETTKPAGKRTADGSEFEKRTADGSEFESPKKKAKVE

SEQ ID NO: 6897 - protein, 2096 aa, synthetic construct
MPAAKRVKLDGGDKKYSIGLDIGTNSVGWAVITDEYKVPSKKFKVLGNTDRHSIKKNLIGALLFDSGETAEATRLKRTARRRYTRRKNRICYLQEIFSNEMAKVDDSFFHRLEESFLVEEDKKHERHPIFGNIVDEVAYHEKYPTIYHLRKKLVDSTDKADLRLIYLALAHMIKFRGHFLIEGDLNPDNSDVDKLFIQLVQTYNQLFEENPINASGVDAKAILSARLSKSRRLENLIAQLPGEKKNGLFGNLIALSLGLTPNFKSNFDLAEDAKLQLSKDTYDDDLDNLLAQIGDQYADLFLAAKNLSDAILLSDILRVNTEITKAPLSASMIKRYDEHHQDLTLLKALVRQQLPEKYKEIFFDQSKNGYAGYIDGGASQEEFYKFIKPILEKMDGTEELLVKLNREDLLRKQRTFDNGSIPHQIHLGELHAILRRQEDFYPFLKDNREKIEKILTFRIPYYVGPLARGNSRFAWMTRKSEETITPWNFEEVVDKGASAQSFIERMTNFDKNLPNEKVLPKHSLLYEYFTVYNELTKVKYVTEGMRKPAFLSGEQKKAIVDLLFKTNRKVTVKQLKEDYFKKIECFDSVEISGVEDRFNASLGTYHDLLKIIKDKDFLDNEENEDILEDIVLTLTLFEDREMIEERLKTYAHLFDDKVMKQLKRRRYTGWGRLSRKLINGIRDKQSGKTILDFLKSDGFANRNFMQLIHDDSLTFKEDIQKAQVSGQGDSLHEHIANLAGSPAIKKGILQTVKVVDELVKVMGRHKPENIVIEMARENQTTQKGQKNSRERMKRIEEGIKELGSQILKEHPVENTQLQNEKLYLYYLQNGRDMYVDQELDINRLSDYDVDHIVPQSFLKDDSIDNKVLTRSDKARGKSDNVPSEEVVKKMKNYWRQLLNAKLITQRKFDNLTKAERGGLSELDKAGFIKRQLVETRQITKHVAQILDSRMNTKYDENDKLIREVKVITLKSKLVSDFRKDFQFYKVREINNYHHAHDAYLNAVVGTALIKKYPKLESEFVYGDYKVYDVRKMIAKSEQEIGKATAKYFFYSNIMNFFKTEITLANGEIRKRPLIETNGETGEIVWDKGRDFATVRKVLSMPQVNIVKKTEVQTGGFSKESILPKRNSDKLIARKKDWDPKKYGGFDSPTVAYSVLVVAKVEKGKSKKLKSVKELLGITIMERSSFEKNPIDFLEAKGYKEVKKDLIIKLPKYSLFELENGRKRMLASAGELQKGNELALPSKYVNFLYLASHYEKLKGSPEDNEQKQLFVEQHKHYLDEIIEQISEFSKRVILADANLDKVLSAYNKHRDKPIREQAENIIHLFTLTNLGAPAAFKYFDTTIDRKRYTSTKEVLDATLIHQSITGLYETRIDLSQLGGDGGGGSGGGEAAAKGGTLNIEDEYRLHETSKEPDVPLGSTWLSDFPQAWAETGGMGLAVRQAPLIIPLKATSTPVSIKQYPMSQEARLGIKPHIQRLLDQGILVPCQSPWNTPLLPVKKPGTNDYRPVQDLREVNKRVEDIHPTVPNPYNLLSGLPPSHQWYTVLDLKDAFFCLRLHPTSQPLFAFEWRDPEMGISGQLTWTRLPQGFKNSPTLFNEALHRDLADFRIQHPDLILLQYVDDLLLAATSEQDCQRGTRALLQTLGNLGYRASAKKAQICQKQVKYLGYLLKEGQRWLTEARKETVMGQPTPKTPRQLREFLGTAGFCRLWIPGFAEMAAPLYPLTKPGTLFNWGPDQQKAYQEIKQALLTAPALGLPDLTKPFELFVDEKQGYAKGVLTQKLGPWRRPVAYLSKKLDPVAAGWPPCLRMVAAIAVLTKDAGKLTMGQPLVILAPHAVEALVKQPPDRWLSNARMTHYQAMLLDTDRVQFGPVVALNPATLLPLPEKEAPHDCLEILAETHGTRPDLTDQPIPDADYTWYTDGSSFLQEGQRRAGAAVTTETEVIWARALPAGTSAQRAELIALTQALKMAEGKKLNVYTDSRYAFATAHVHGEIYRRRGWLTSEGREIKNKNEILALLKALFLPKRLSIIHCPGHQKGNSAEARGNRMADQAAREAAMKAVLETSTLLAGKRTADGSEFEKRTADGSEFESPKKKAKVE

SEQ ID NO: 6898 - protein, 2098 aa, synthetic construct
MPAAKRVKLDGGDKKYSIGLDIGTNSVGWAVITDEYKVPSKKFKVLGNTDRHSIKKNLIGALLFDSGETAEATRLKRTARRRYTRRKNRICYLQEIFSNEMAKVDDSFFHRLEESFLVEEDKKHERHPIFGNIVDEVAYHEKYPTIYHLRKKLVDSTDKADLRLIYLALAHMIKFRGHFLIEGDLNPDNSDVDKLFIQLVQTYNQLFEENPINASGVDAKAILSARLSKSRRLENLIAQLPGEKKNGLFGNLIALSLGLTPNFKSNFDLAEDAKLQLSKDTYDDDLDNLLAQIGDQYADLFLAAKNLSDAILLSDILRVNTEITKAPLSASMIKRYDEHHQDLTLLKALVRQQLPEKYKEIFFDQSKNGYAGYIDGGASQEEFYKFIKPILEKMDGTEELLVKLNREDLLRKQRTFDNGSIPHQIHLGELHAILRRQEDFYPFLKDNREKIEKILTFRIPYYVGPLARGNSRFAWMTRKSEETITPWNFEEVVDKGASAQSFIERMTNFDKNLPNEKVLPKHSLLYEYFTVYNELTKVKYVTEGMRKPAFLSGEQKKAIVDLLFKTNRKVTVKQLKEDYFKKIECFDSVEISGVEDRFNASLGTYHDLLKIIKDKDFLDNEENEDILEDIVLTLTLFEDREMIEERLKTYAHLFDDKVMKQLKRRRYTGWGRLSRKLINGIRDKQSGKTILDFLKSDGFANRNFMQLIHDDSLTFKEDIQKAQVSGQGDSLHEHIANLAGSPAIKKGILQTVKVVDELVKVMGRHKPENIVIEMARENQTTQKGQKNSRERMKRIEEGIKELGSQILKEHPVENTQLQNEKLYLYYLQNGRDMYVDQELDINRLSDYDVDHIVPQSFLKDDSIDNKVLTRSDKARGKSDNVPSEEVVKKMKNYWRQLLNAKLITQRKFDNLTKAERGGLSELDKAGFIKRQLVETRQITKHVAQILDSRMNTKYDENDKLIREVKVITLKSKLVSDFRKDFQFYKVREINNYHHAHDAYLNAVVGTALIKKYPKLESEFVYGDYKVYDVRKMIAKSEQEIGKATAKYFFYSNIMNFFKTEITLANGEIRKRPLIETNGETGEIVWDKGRDFATVRKVLSMPQVNIVKKTEVQTGGFSKESILPKRNSDKLIARKKDWDPKKYGGFDSPTVAYSVLVVAKVEKGKSKKLKSVKELLGITIMERSSFEKNPIDFLEAKGYKEVKKDLIIKLPKYSLFELENGRKRMLASAGELQKGNELALPSKYVNFLYLASHYEKLKGSPEDNEQKQLFVEQHKHYLDEIIEQISEFSKRVILADANLDKVLSAYNKHRDKPIREQAENIIHLFTLTNLGAPAAFKYFDTTIDRKRYTSTKEVLDATLIHQSITGLYETRIDLSQLGGDGGGGSEAAAKGGGGGTAPLEEEYRLFLEAPIQNVTLLEQWKREIPKVWAEINPPGLASTQAPIHVQLLSTALPVRVRQYPITLEAKRSLRETIRKFRAAGILRPVHSPWNTPLLPVRKSGTSEYRMVQDLREVNKRVETIHPTVPNPYTLLSLLPPDRIWYSVLDLKDAFFCIPLAPESQLIFAFEWADAEEGESGQLTWTRLPQGFKNSPTLFNEALNRDLQGFRLDHPSVSLLQYVDDLLIAADTQAACLSATRDLLMTLAELGYRVSGKKAQLCQEEVTYLGFKIHKGSRSLSNSRTQAILQIPVPKTKRQVREFLGTIGYCRLWIPGFAELAQPLYAATRPGNDPLVWGEKEEEAFQSLKLALTQPPALALPSLDKPFQLFVEETSGAAKGVLTQALGPWKRPVAYLSKRLDPVAAGWPRCLRAIAAAALLTREASKLTFGQDIEITSSHNLESLLRSPPDKWLTNARITQYQVLLLDPPRVRFKQTAALNPATLLPETDDTLPIHHCLDTLDSLTSTRPDLTDQPLAQAEATLFTDGSSYIRDGKRYAGAAVVTLDSVIWAEPLPIGTSAQKAELIALTKALEWSKDKSVNIYTDSRYAFATLHVHGMIYRERGWLTAGGKAIKNAPEILALLTAVWLPKRVAVMHCKGHQKDDAPTSTGNRRADEVAREVAIRPLSTQATISAGKRTADGSEFEKRTADGSEFESPKKKAKVE

SEQ ID NO: 6899 - protein, 2102 aa, synthetic construct
MPAAKRVKLDGGDKKYSIGLDIGTNSVGWAVITDEYKVPSKKFKVLGNTDRHSIKKNLIGALLFDSGETAEATRLKRTARRRYTRRKNRICYLQEIFSNEMAKVDDSFFHRLEESFLVEEDKKHERHPIFGNIVDEVAYHEKYPTIYHLRKKLVDSTDKADLRLIYLALAHMIKFRGHFLIEGDLNPDNSDVDKLFIQLVQTYNQLFEENPINASGVDAKAILSARLSKSRRLENLIAQLPGEKKNGLFGNLIALSLGLTPNFKSNFDLAEDAKLQLSKDTYDDDLDNLLAQIGDQYADLFLAAKNLSDAILLSDILRVNTEITKAPLSASMIKRYDEHHQDLTLLKALVRQQLPEKYKEIFFDQSKNGYAGYIDGGASQEEFYKFIKPILEKMDGTEELLVKLNREDLLRKQRTFDNGSIPHQIHLGELHAILRRQEDFYPFLKDNREKIEKILTFRIPYYVGPLARGNSRFAWMTRKSEETITPWNFEEVVDKGASAQSFIERMTNFDKNLPNEKVLPKHSLLYEYFTVYNELTKVKYVTEGMRKPAFLSGEQKKAIVDLLFKTNRKVTVKQLKEDYFKKIECFDSVEISGVEDRFNASLGTYHDLLKIIKDKDFLDNEENEDILEDIVLTLTLFEDREMIEERLKTYAHLFDDKVMKQLKRRRYTGWGRLSRKLINGIRDKQSGKTILDFLKSDGFANRNFMQLIHDDSLTFKEDIQKAQVSGQGDSLHEHIANLAGSPAIKKGILQTVKVVDELVKVMGRHKPENIVIEMARENQTTQKGQKNSRERMKRIEEGIKELGSQILKEHPVENTQLQNEKLYLYYLQNGRDMYVDQELDINRLSDYDVDHIVPQSFLKDDSIDNKVLTRSDKARGKSDNVPSEEVVKKMKNYWRQLLNAKLITQRKFDNLTKAERGGLSELDKAGFIKRQLVETRQITKHVAQILDSRMNTKYDENDKLIREVKVITLKSKLVSDFRKDFQFYKVREINNYHHAHDAYLNAVVGTALIKKYPKLESEFVYGDYKVYDVRKMIAKSEQEIGKATAKYFFYSNIMNFFKTEITLANGEIRKRPLIETNGETGEIVWDKGRDFATVRKVLSMPQVNIVKKTEVQTGGFSKESILPKRNSDKLIARKKDWDPKKYGGFDSPTVAYSVLVVAKVEKGKSKKLKSVKELLGITIMERSSFEKNPIDFLEAKGYKEVKKDLIIKLPKYSLFELENGRKRMLASAGELQKGNELALPSKYVNFLYLASHYEKLKGSPEDNEQKQLFVEQHKHYLDEIIEQISEFSKRVILADANLDKVLSAYNKHRDKPIREQAENIIHLFTLTNLGAPAAFKYFDTTIDRKRYTSTKEVLDATLIHQSITGLYETRIDLSQLGGDGGGGSEAAAKGGGGGTVSLQDEHRLFDIPVTTSLPDVWLQDFPQAWAETGGLGRAKCQAPIIIDLKPTAVPVSIKQYPMSLEAHMGIRQHIIKFLELGVLRPCRSPWNTPLLPVKKPGTQDYRPVQDLREINKRTVDIHPTVPNPYNLLSTLKPDYSWYTVLDLKDAFFCLPLAPQSQELFAFEWKDPERGISGQLTWTRLPQGFKNSPTLFNEALHRDLTDFRTQHPEVTLLQYVDDLLLAAPTKKACTQGTRHLLQELGEKGYRASAKKAQICQTKVTYLGYILSEGKRWLTPGRIETVARIPPPRNPREVREFLGTAGFCRLWIPGFAELAAPLYALTKPSTPFTWQTEHQLAFEALKKALLSAPALGLPDTSKPFTLFLDERQGIAKGVLTQKLGPWKRPVAYLSKKLDPVAAGWPPCLRIMAATAMLVKDSAKLTLGQPLTVITPHTLEAIVRQPPDRWITNARLTHYQALLLDTDRVQFGPPVTLNPATLLPVPENQPSPHDCRQVLAETHGTREDLKDQELPDADHTWYTDGSSYLDSGTRRAGAAVVDGHNTIWAQSLPPGTSAQKAELIALTKALELSKGKKANIYTDSRYAFATAHTHGSIYERRGWLTSEGKEIKNKAEIIALLKALFLPQEVAIIHCPGHQKGQDPVAVGNRQADRVARQAAMAEVLTLATEPDNTSHITAGKRTADGSEFEKRTADGSEFESPKKKAKVE

SEQ ID NO: 6900 - protein, 2087 aa, synthetic construct
MPAAKRVKLDGGDKKYSIGLDIGTNSVGWAVITDEYKVPSKKFKVLGNTDRHSIKKNLIGALLFDSGETAEATRLKRTARRRYTRRKNRICYLQEIFSNEMAKVDDSFFHRLEESFLVEEDKKHERHPIFGNIVDEVAYHEKYPTIYHLRKKLVDSTDKADLRLIYLALAHMIKFRGHFLIEGDLNPDNSDVDKLFIQLVQTYNQLFEENPINASGVDAKAILSARLSKSRRLENLIAQLPGEKKNGLFGNLIALSLGLTPNFKSNFDLAEDAKLQLSKDTYDDDLDNLLAQIGDQYADLFLAAKNLSDAILLSDILRVNTEITKAPLSASMIKRYDEHHQDLTLLKALVRQQLPEKYKEIFFDQSKNGYAGYIDGGASQEEFYKFIKPILEKMDGTEELLVKLNREDLLRKQRTFDNGSIPHQIHLGELHAILRRQEDFYPFLKDNREKIEKILTFRIPYYVGPLARGNSRFAWMTRKSEETITPWNFEEVVDKGASAQSFIERMTNFDKNLPNEKVLPKHSLLYEYFTVYNELTKVKYVTEGMRKPAFLSGEQKKAIVDLLFKTNRKVTVKQLKEDYFKKIECFDSVEISGVEDRFNASLGTYHDLLKIIKDKDFLDNEENEDILEDIVLTLTLFEDREMIEERLKTYAHLFDDKVMKQLKRRRYTGWGRLSRKLINGIRDKQSGKTILDFLKSDGFANRNFMQLIHDDSLTFKEDIQKAQVSGQGDSLHEHIANLAGSPAIKKGILQTVKVVDELVKVMGRHKPENIVIEMARENQTTQKGQKNSRERMKRIEEGIKELGSQILKEHPVENTQLQNEKLYLYYLQNGRDMYVDQELDINRLSDYDVDHIVPQSFLKDDSIDNKVLTRSDKARGKSDNVPSEEVVKKMKNYWRQLLNAKLITQRKFDNLTKAERGGLSELDKAGFIKRQLVETRQITKHVAQILDSRMNTKYDENDKLIREVKVITLKSKLVSDFRKDFQFYKVREINNYHHAHDAYLNAVVGTALIKKYPKLESEFVYGDYKVYDVRKMIAKSEQEIGKATAKYFFYSNIMNFFKTEITLANGEIRKRPLIETNGETGEIVWDKGRDFATVRKVLSMPQVNIVKKTEVQTGGFSKESILPKRNSDKLIARKKDWDPKKYGGFDSPTVAYSVLVVAKVEKGKSKKLKSVKELLGITIMERSSFEKNPIDFLEAKGYKEVKKDLIIKLPKYSLFELENGRKRMLASAGELQKGNELALPSKYVNFLYLASHYEKLKGSPEDNEQKQLFVEQHKHYLDEIIEQISEFSKRVILADANLDKVLSAYNKHRDKPIREQAENIIHLFTLTNLGAPAAFKYFDTTIDRKRYTSTKEVLDATLIHQSITGLYETRIDLSQLGGDGGGGSEAAAKGGGGGVPWILKKPLELTIKLDLEEQQGTLLNNSILSKKGKEELKQLFEKYSALWQSWENQVGHRRIRPHKIATGTVKPTPQKQYHINPKAKPDIQIVINDLLKQGVLIQKESTMNTPVYPVPKPNGRWRMVLDYRAVNKVTPLIAVQNQHSYGILGSLFKGRYKTTIDLSNGFWAHPIVPEDYWITAFTWQGKQYCWTVLPQGFLNSPGLFTGDVVDLLQGIPNVEVYVDDVYISHDSEKEHLEYLDILFNRLKEAGYIISLKKSNIANSIVDFLGFQITNEGRGLTDTFKEKLENITAPTTLKQLQSILGLLNFARNFIPDFTELIAPLYALIPKSTKNYVPWQIEHSTTLETLITKLNGAEYLQGRKGDKTLIMKVNASYTTGYIRYYNEGEKKPISYVSIVFSKTELKFTELEKLLTTVHKGLLKALDLSMGQNIHVYSPIVSMQNIQKTPQTAKKALASRWLSWLSYLEDPRIRFFYDPQMPALKDLPAVDTGKDNKKHPSNFQHIFYTDGSAITSPTKEGHLNAGMGIVYFINKDGNLQKQQEWSISLGNHTAQFAEIAAFEFALKKCLPLGGNILVVTDSNYVAKAYNEELDVWASNGFVNNRKKPLKHISKWKSVADLKRLRPDVVVTHEPGHQKLDSSPHAYGNNLADQLATQASFKVHAGKRTADGSEFEKRTADGSEFESPKKKAKVE

SEQ ID NO: 6901 - protein, 2096 aa, synthetic construct
MPAAKRVKLDGGDKKYSIGLDIGTNSVGWAVITDEYKVPSKKFKVLGNTDRHSIKKNLIGALLFDSGETAEATRLKRTARRRYTRRKNRICYLQEIFSNEMAKVDDSFFHRLEESFLVEEDKKHERHPIFGNIVDEVAYHEKYPTIYHLRKKLVDSTDKADLRLIYLALAHMIKFRGHFLIEGDLNPDNSDVDKLFIQLVQTYNQLFEENPINASGVDAKAILSARLSKSRRLENLIAQLPGEKKNGLFGNLIALSLGLTPNFKSNFDLAEDAKLQLSKDTYDDDLDNLLAQIGDQYADLFLAAKNLSDAILLSDILRVNTEITKAPLSASMIKRYDEHHQDLTLLKALVRQQLPEKYKEIFFDQSKNGYAGYIDGGASQEEFYKFIKPILEKMDGTEELLVKLNREDLLRKQRTFDNGSIPHQIHLGELHAILRRQEDFYPFLKDNREKIEKILTFRIPYYVGPLARGNSRFAWMTRKSEETITPWNFEEVVDKGASAQSFIERMTNFDKNLPNEKVLPKHSLLYEYFTVYNELTKVKYVTEGMRKPAFLSGEQKKAIVDLLFKTNRKVTVKQLKEDYFKKIECFDSVEISGVEDRFNASLGTYHDLLKIIKDKDFLDNEENEDILEDIVLTLTLFEDREMIEERLKTYAHLFDDKVMKQLKRRRYTGWGRLSRKLINGIRDKQSGKTILDFLKSDGFANRNFMQLIHDDSLTFKEDIQKAQVSGQGDSLHEHIANLAGSPAIKKGILQTVKVVDELVKVMGRHKPENIVIEMARENQTTQKGQKNSRERMKRIEEGIKELGSQILKEHPVENTQLQNEKLYLYYLQNGRDMYVDQELDINRLSDYDVDHIVPQSFLKDDSIDNKVLTRSDKARGKSDNVPSEEVVKKMKNYWRQLLNAKLITQRKFDNLTKAERGGLSELDKAGFIKRQLVETRQITKHVAQILDSRMNTKYDENDKLIREVKVITLKSKLVSDFRKDFQFYKVREINNYHHAHDAYLNAVVGTALIKKYPKLESEFVYGDYKVYDVRKMIAKSEQEIGKATAKYFFYSNIMNFFKTEITLANGEIRKRPLIETNGETGEIVWDKGRDFATVRKVLSMPQVNIVKKTEVQTGGFSKESILPKRNSDKLIARKKDWDPKKYGGFDSPTVAYSVLVVAKVEKGKSKKLKSVKELLGITIMERSSFEKNPIDFLEAKGYKEVKKDLIIKLPKYSLFELENGRKRMLASAGELQKGNELALPSKYVNFLYLASHYEKLKGSPEDNEQKQLFVEQHKHYLDEIIEQISEFSKRVILADANLDKVLSAYNKHRDKPIREQAENIIHLFTLTNLGAPAAFKYFDTTIDRKRYTSTKEVLDATLIHQSITGLYETRIDLSQLGGDGGGGSEAAAKGGGGGTLNLEDEYRLYETSAEPEVSPGSTWLSDFPQAWAETGGMGLAVRQAPLIIPLKATSTPVSIKQYPMSQEAKLGIKPHIQRLLDQGILVPCQSPWNTPLLPVKKPGTNDYRPVQDLREVNKRVEDIHPTVPNPYNLLSGLPPSHRWYTVLDLKDAFFCLRLHPTSQPLFAFEWRDPGMGISGQLTWTRLPQGFKNSPTLFNEALHRDLADFRIQHPDLILLQYVDDILLAATSELDCQQGTRALLLTLGNLGYRASAKKAQLCQKQVKYLGYLLKEGQRWLTEARKETVMGQPTPKTPRQLREFLGTAGFCRLWIPGFAEMAAPLYPLTKPGTLFNWGPDQQKAYQEIKQALLTAPALGLPDLTKPFELFVDEKQGYAKGVLTQKLGPWRRPVAYLSKKLDPVAAGWPPCLRMVAAIAVLRKDAGKLTMGQPLVILAPHAVEALVKQPPDRWLSNARMTHYQAMLLDTDRVQFGPVVALNPATLLPLPEEGAPHDCLEILAETHGTRPDLTDQPIPDADHTWYTDGSSFLQEGQRKAGAAVTTETEVIWARALPAGTSAQRAELIALTQALKMAEGKRLNVYTDSRYAFATAHIHGEIYRRRGWLTSEGREIKNKSEILALLKALFLPKRLSIIHCLGHQKGDSAEARGNRLADQAAREAAIKTPPDTSTLLAGKRTADGSEFEKRTADGSEFESPKKKAKVE

SEQ ID NO: 6902 - protein, 2096 aa, synthetic construct
MPAAKRVKLDGGDKKYSIGLDIGTNSVGWAVITDEYKVPSKKFKVLGNTDRHSIKKNLIGALLFDSGETAEATRLKRTARRRYTRRKNRICYLQEIFSNEMAKVDDSFFHRLEESFLVEEDKKHERHPIFGNIVDEVAYHEKYPTIYHLRKKLVDSTDKADLRLIYLALAHMIKFRGHFLIEGDLNPDNSDVDKLFIQLVQTYNQLFEENPINASGVDAKAILSARLSKSRRLENLIAQLPGEKKNGLFGNLIALSLGLTPNFKSNFDLAEDAKLQLSKDTYDDDLDNLLAQIGDQYADLFLAAKNLSDAILLSDILRVNTEITKAPLSASMIKRYDEHHQDLTLLKALVRQQLPEKYKEIFFDQSKNGYAGYIDGGASQEEFYKFIKPILEKMDGTEELLVKLNREDLLRKQRTFDNGSIPHQIHLGELHAILRRQEDFYPFLKDNREKIEKILTFRIPYYVGPLARGNSRFAWMTRKSEETITPWNFEEVVDKGASAQSFIERMTNFDKNLPNEKVLPKHSLLYEYFTVYNELTKVKYVTEGMRKPAFLSGEQKKAIVDLLFKTNRKVTVKQLKEDYFKKIECFDSVEISGVEDRFNASLGTYHDLLKIIKDKDFLDNEENEDILEDIVLTLTLFEDREMIEERLKTYAHLFDDKVMKQLKRRRYTGWGRLSRKLINGIRDKQSGKTILDFLKSDGFANRNFMQLIHDDSLTFKEDIQKAQVSGQGDSLHEHIANLAGSPAIKKGILQTVKVVDELVKVMGRHKPENIVIEMARENQTTQKGQKNSRERMKRIEEGIKELGSQILKEHPVENTQLQNEKLYLYYLQNGRDMYVDQELDINRLSDYDVDHIVPQSFLKDDSIDNKVLTRSDKARGKSDNVPSEEVVKKMKNYWRQLLNAKLITQRKFDNLTKAERGGLSELDKAGFIKRQLVETRQITKHVAQILDSRMNTKYDENDKLIREVKVITLKSKLVSDFRKDFQFYKVREINNYHHAHDAYLNAVVGTALIKKYPKLESEFVYGDYKVYDVRKMIAKSEQEIGKATAKYFFYSNIMNFFKTEITLANGEIRKRPLIETNGETGEIVWDKGRDFATVRKVLSMPQVNIVKKTEVQTGGFSKESILPKRNSDKLIARKKDWDPKKYGGFDSPTVAYSVLVVAKVEKGKSKKLKSVKELLGITIMERSSFEKNPIDFLEAKGYKEVKKDLIIKLPKYSLFELENGRKRMLASAGELQKGNELALPSKYVNFLYLASHYEKLKGSPEDNEQKQLFVEQHKHYLDEIIEQISEFSKRVILADANLDKVLSAYNKHRDKPIREQAENIIHLFTLTNLGAPAAFKYFDTTIDRKRYTSTKEVLDATLIHQSITGLYETRIDLSQLGGDGGGGSEAAAKGGGGGTLNIEDEYRLHETSKGPDVPLGSTWLSDFPQAWAETGGMGLAVRQAPLIIPLKATSTPVSIKQYPMSQEARLGIKPHIQRLLDQGILVPCQSPWNTPLLPVKKPGTNDYRPVQDLREVNKRVEDIHPTVPNPYNLLSGLPPSHQWYTVLDLKDAFFCLRLHPTSQSLFAFEWRDPEMGISGQLTWTRLPQGFKNSPTLFNEALHRDLADFRIQHPDLILLQYVDDLLLAATSELDCQQGTRALLQTLGDLGYRASAKKAQICQKQVKYLGYLLKEGQRWLTEARKETVMGQPTPKTPRQLREFLGTAGFCRLWIPGFAEMAAPLYPLTKPGTLFEWGPDQQKAYQEIKQALLTAPALGLPDLTKPFELFVDEKQGYAKGVLTQKLGPWRRPVAYLSKKLDPVAAGWPPCLRMVAAIAVLTKDAGKLTMGQPLVILAPHAVEALVKQPPDRWLSNARMTHYQALLLDTDRVQFGPIVALNPATLLPLPEEGLQHDCLDILAEAHGTRPDLTDQPLPDADHTWYTDGSSFLQEGQRKAGAAVTTETEVVWAKALPAGTSAQRAELIALTQALKMAEGKKLNVYTDSRYAFATAHIHGEIYRRRGWLTSEGKEIKNKDEILALLKALFLPKRLSIIHCPGHQKGNRAEARGNRMADQAAREVATRETPETSTLLAGKRTADGSEFEKRTADGSEFESPKKKAKVE

SEQ ID NO: 6903 - protein, 2096 aa, synthetic construct
MPAAKRVKLDGGDKKYSIGLDIGTNSVGWAVITDEYKVPSKKFKVLGNTDRHSIKKNLIGALLFDSGETAEATRLKRTARRRYTRRKNRICYLQEIFSNEMAKVDDSFFHRLEESFLVEEDKKHERHPIFGNIVDEVAYHEKYPTIYHLRKKLVDSTDKADLRLIYLALAHMIKFRGHFLIEGDLNPDNSDVDKLFIQLVQTYNQLFEENPINASGVDAKAILSARLSKSRRLENLIAQLPGEKKNGLFGNLIALSLGLTPNFKSNFDLAEDAKLQLSKDTYDDDLDNLLAQIGDQYADLFLAAKNLSDAILLSDILRVNTEITKAPLSASMIKRYDEHHQDLTLLKALVRQQLPEKYKEIFFDQSKNGYAGYIDGGASQEEFYKFIKPILEKMDGTEELLVKLNREDLLRKQRTFDNGSIPHQIHLGELHAILRRQEDFYPFLKDNREKIEKILTFRIPYYVGPLARGNSRFAWMTRKSEETITPWNFEEVVDKGASAQSFIERMTNFDKNLPNEKVLPKHSLLYEYFTVYNELTKVKYVTEGMRKPAFLSGEQKKAIVDLLFKTNRKVTVKQLKEDYFKKIECFDSVEISGVEDRFNASLGTYHDLLKIIKDKDFLDNEENEDILEDIVLTLTLFEDREMIEERLKTYAHLFDDKVMKQLKRRRYTGWGRLSRKLINGIRDKQSGKTILDFLKSDGFANRNFMQLIHDDSLTFKEDIQKAQVSGQGDSLHEHIANLAGSPAIKKGILQTVKVVDELVKVMGRHKPENIVIEMARENQTTQKGQKNSRERMKRIEEGIKELGSQILKEHPVENTQLQNEKLYLYYLQNGRDMYVDQELDINRLSDYDVDHIVPQSFLKDDSIDNKVLTRSDKARGKSDNVPSEEVVKKMKNYWRQLLNAKLITQRKFDNLTKAERGGLSELDKAGFIKRQLVETRQITKHVAQILDSRMNTKYDENDKLIREVKVITLKSKLVSDFRKDFQFYKVREINNYHHAHDAYLNAVVGTALIKKYPKLESEFVYGDYKVYDVRKMIAKSEQEIGKATAKYFFYSNIMNFFKTEITLANGEIRKRPLIETNGETGEIVWDKGRDFATVRKVLSMPQVNIVKKTEVQTGGFSKESILPKRNSDKLIARKKDWDPKKYGGFDSPTVAYSVLVVAKVEKGKSKKLKSVKELLGITIMERSSFEKNPIDFLEAKGYKEVKKDLIIKLPKYSLFELENGRKRMLASAGELQKGNELALPSKYVNFLYLASHYEKLKGSPEDNEQKQLFVEQHKHYLDEIIEQISEFSKRVILADANLDKVLSAYNKHRDKPIREQAENIIHLFTLTNLGAPAAFKYFDTTIDRKRYTSTKEVLDATLIHQSITGLYETRIDLSQLGGDGGGGSEAAAKGGGGGTLNIEDEYRLHEISTEPDVSPGSTWLSDFPQAWAETGGMGLAVRQAPLIIPLKATSTPVSIKQYPMSQEAKLGIKPHIQRLLDQGILVPCQSPWNTPLLPVKKPGTNDYRPVQGLREVNKRVEDIHPTVPNPYNLLSGLPTSHRWYTVLDLKDAFFCLRLHPTSQPLFASEWRDPGMGISGQLTWTRLPQGFKNSPTLFNEALHRGLADFRIQHPDLILLQYVDDLLLAATSELDCQQGTRALLKTLGNLGYRASAKKAQICQKQVKYLGYLLREGQRWLTEARKETVMGQPTPKTPRQLREFLGTAGFCRLWIPRFAEMAAPLYPLTKPGTLFNWGPDQQKAYHEIKQALLTAPALGLPDLTKPFELFVDEKQGYAKGVLTQKLGPWRRPVAYLSKKLDPVAAGWPPCLRMVAAIAVLTKDAGKLTMGQPLVILAPHAVEALVKQPPDRWLSNARMTHYQAMLLDTDRVQFGPVVALNPATLLPLPEEGAPHDCLEILAETHGTEPDLTDQPIPDADHTWYTDGSSFLQEGQRKAGAAVTTETEVIWARALPAGTSAQRAELIALTQALKMAEGKRLNVYTDSRYAFATAHIHGEIYKRRGWLTSEGREIKNKSEILALLKALFLPKRLSIIHCLGHQKGDSAEARGNRLADQAAREAAIKTPPDTSTLLAGKRTADGSEFEKRTADGSEFESPKKKAKVE

SEQ ID NO: 6904 - protein, 2090 aa, synthetic construct
MPAAKRVKLDGGDKKYSIGLDIGTNSVGWAVITDEYKVPSKKFKVLGNTDRHSIKKNLIGALLFDSGETAEATRLKRTARRRYTRRKNRICYLQEIFSNEMAKVDDSFFHRLEESFLVEEDKKHERHPIFGNIVDEVAYHEKYPTIYHLRKKLVDSTDKADLRLIYLALAHMIKFRGHFLIEGDLNPDNSDVDKLFIQLVQTYNQLFEENPINASGVDAKAILSARLSKSRRLENLIAQLPGEKKNGLFGNLIALSLGLTPNFKSNFDLAEDAKLQLSKDTYDDDLDNLLAQIGDQYADLFLAAKNLSDAILLSDILRVNTEITKAPLSASMIKRYDEHHQDLTLLKALVRQQLPEKYKEIFFDQSKNGYAGYIDGGASQEEFYKFIKPILEKMDGTEELLVKLNREDLLRKQRTFDNGSIPHQIHLGELHAILRRQEDFYPFLKDNREKIEKILTFRIPYYVGPLARGNSRFAWMTRKSEETITPWNFEEVVDKGASAQSFIERMTNFDKNLPNEKVLPKHSLLYEYFTVYNELTKVKYVTEGMRKPAFLSGEQKKAIVDLLFKTNRKVTVKQLKEDYFKKIECFDSVEISGVEDRFNASLGTYHDLLKIIKDKDFLDNEENEDILEDIVLTLTLFEDREMIEERLKTYAHLFDDKVMKQLKRRRYTGWGRLSRKLINGIRDKQSGKTILDFLKSDGFANRNFMQLIHDDSLTFKEDIQKAQVSGQGDSLHEHIANLAGSPAIKKGILQTVKVVDELVKVMGRHKPENIVIEMARENQTTQKGQKNSRERMKRIEEGIKELGSQILKEHPVENTQLQNEKLYLYYLQNGRDMYVDQELDINRLSDYDVDHIVPQSFLKDDSIDNKVLTRSDKARGKSDNVPSEEVVKKMKNYWRQLLNAKLITQRKFDNLTKAERGGLSELDKAGFIKRQLVETRQITKHVAQILDSRMNTKYDENDKLIREVKVITLKSKLVSDFRKDFQFYKVREINNYHHAHDAYLNAVVGTALIKKYPKLESEFVYGDYKVYDVRKMIAKSEQEIGKATAKYFFYSNIMNFFKTEITLANGEIRKRPLIETNGETGEIVWDKGRDFATVRKVLSMPQVNIVKKTEVQTGGFSKESILPKRNSDKLIARKKDWDPKKYGGFDSPTVAYSVLVVAKVEKGKSKKLKSVKELLGITIMERSSFEKNPIDFLEAKGYKEVKKDLIIKLPKYSLFELENGRKRMLASAGELQKGNELALPSKYVNFLYLASHYEKLKGSPEDNEQKQLFVEQHKHYLDEIIEQISEFSKRVILADANLDKVLSAYNKHRDKPIREQAENIIHLFTLTNLGAPAAFKYFDTTIDRKRYTSTKEVLDATLIHQSITGLYETRIDLSQLGGDGGGGSEAAAKGGGGGTLQLDDEYRLYSPLVKPDQNIQFWLEQFPQAWAETAGMGLAKQVPPQVIQLKASATPVSVRQYPLSKEAQEGIRPHVQRLIQQGILVPVQSPWNTPLLPVRKPGTNDYRPVQDLREVNKRVQDIHPTVPNPYNLLCALPPQRSWYTVLDLKDAFFCLRLHPTSQPLFAFEWRDPGTGRTGQLTWTRLPQGFKNSPTIFDEALHRDLANFRIQHPQVTLLQYVDDLLLAGATKQDCLEGTKALLLELSDLGYRASAKKAQICRREVTYLGYSLRDGQRWLTEARKKTVVQIPAPTTAKQVREFLGTAGFCRLWIPGFATLAAPLYPLTKEKGEFSWAPEHQKAFDAIKKALLSAPALALPDVTKPFTLYVDERKGVARGVLTQTLGPWRRPVAYLSKKLDPVASGWPVCLKAIAAVAILVKDADKLTLGQNITVIAPHALENIVRQPPDRWMTNARMTHYQSLLLTERVTFAPPAALNPATLLPEETDEPVTHDCHQLLIEETGVRKDLTDIPLTGEVLTWFTDGSSYVVEGKRMAGAAVVDGTRTIWASSLPEGTSAQKAELMALTQALRLAEGKSINIYTDSRYAFATAHVHGAIYKQRGLLTSAGREIKNKEEILSLLEALHLPKRLAIIHCPGHQKAKDPISRGNQMADRVAKQAAQGVNLLAGKRTADGSEFEKRTADGSEFESPKKKAKVE

SEQ ID NO: 6905 - protein, 2096 aa, synthetic construct
MPAAKRVKLDGGDKKYSIGLDIGTNSVGWAVITDEYKVPSKKFKVLGNTDRHSIKKNLIGALLFDSGETAEATRLKRTARRRYTRRKNRICYLQEIFSNEMAKVDDSFFHRLEESFLVEEDKKHERHPIFGNIVDEVAYHEKYPTIYHLRKKLVDSTDKADLRLIYLALAHMIKFRGHFLIEGDLNPDNSDVDKLFIQLVQTYNQLFEENPINASGVDAKAILSARLSKSRRLENLIAQLPGEKKNGLFGNLIALSLGLTPNFKSNFDLAEDAKLQLSKDTYDDDLDNLLAQIGDQYADLFLAAKNLSDAILLSDILRVNTEITKAPLSASMIKRYDEHHQDLTLLKALVRQQLPEKYKEIFFDQSKNGYAGYIDGGASQEEFYKFIKPILEKMDGTEELLVKLNREDLLRKQRTFDNGSIPHQIHLGELHAILRRQEDFYPFLKDNREKIEKILTFRIPYYVGPLARGNSRFAWMTRKSEETITPWNFEEVVDKGASAQSFIERMTNFDKNLPNEKVLPKHSLLYEYFTVYNELTKVKYVTEGMRKPAFLSGEQKKAIVDLLFKTNRKVTVKQLKEDYFKKIECFDSVEISGVEDRFNASLGTYHDLLKIIKDKDFLDNEENEDILEDIVLTLTLFEDREMIEERLKTYAHLFDDKVMKQLKRRRYTGWGRLSRKLINGIRDKQSGKTILDFLKSDGFANRNFMQLIHDDSLTFKEDIQKAQVSGQGDSLHEHIANLAGSPAIKKGILQTVKVVDELVKVMGRHKPENIVIEMARENQTTQKGQKNSRERMKRIEEGIKELGSQILKEHPVENTQLQNEKLYLYYLQNGRDMYVDQELDINRLSDYDVDHIVPQSFLKDDSIDNKVLTRSDKARGKSDNVPSEEVVKKMKNYWRQLLNAKLITQRKFDNLTKAERGGLSELDKAGFIKRQLVETRQITKHVAQILDSRMNTKYDENDKLIREVKVITLKSKLVSDFRKDFQFYKVREINNYHHAHDAYLNAVVGTALIKKYPKLESEFVYGDYKVYDVRKMIAKSEQEIGKATAKYFFYSNIMNFFKTEITLANGEIRKRPLIETNGETGEIVWDKGRDFATVRKVLSMPQVNIVKKTEVQTGGFSKESILPKRNSDKLIARKKDWDPKKYGGFDSPTVAYSVLVVAKVEKGKSKKLKSVKELLGITIMERSSFEKNPIDFLEAKGYKEVKKDLIIKLPKYSLFELENGRKRMLASAGELQKGNELALPSKYVNFLYLASHYEKLKGSPEDNEQKQLFVEQHKHYLDEIIEQISEFSKRVILADANLDKVLSAYNKHRDKPIREQAENIIHLFTLTNLGAPAAFKYFDTTIDRKRYTSTKEVLDATLIHQSITGLYETRIDLSQLGGDGGGGSEAAAKGGGGGTLNIEDEYRLHETSKEPDVPLGSTWLSDFPQAWAETGGMGLAVRQAPLIIPLKATSTPVSIKQYPMSQEARLGIKPHIQRLLDQGILVPCQSPWNTPLLPVKKPGTNDYRPVQDLREVNKRVEDIHPTVPNPYNLLSGLPPSHQWYTVLDLKDAFFCLRLHPTSQPLFAFEWRDPEMGISGQLTWTRLPQGFKNSPTLFDEALHRDLADFRIQHPDLILLQYVDDLLLAATSEQDCQRGTRALLQTLGNLGYRASAKKAQICQKQVKYLGYLLKEGQRWLTEARKETVMGQPTPKTPRQLREFLGTAGFCRLWIPGFAEMAAPLYPLTKTGTLFNWGPDQQKAYQEIKQALLTAPALGLPDLTKPFELFVDEKQGYAKGVLTQKLGPWRRPVAYLSKKLDPVAAGWPPCLRMVAAIAVLTKDAGKLTMGQPLVILAPHAVEALVKQPPDRWLSNARMTHYQAMLLDTDRVQFGPVVALNPATLLPLPEKEAPHDCLEILAETHGTRPDLTDQPIPDADYTWYTDGSSFLQEGQRRAGAAVTTETEVIWARALPAGTSAQRAELIALTQALKMAEGKKLNVYTDSRYAFATAHVHGEIYRRRGLLTSEGREIKNKNEILALLKALFLPKRLSIIHCPGHQKGNSAEARGNRMADQAAREAAMKAVLETSTLLAGKRTADGSEFEKRTADGSEFESPKKKAKVE

SEQ ID NO: 6906 - protein, 2096 aa, synthetic construct
MPAAKRVKLDGGDKKYSIGLDIGTNSVGWAVITDEYKVPSKKFKVLGNTDRHSIKKNLIGALLFDSGETAEATRLKRTARRRYTRRKNRICYLQEIFSNEMAKVDDSFFHRLEESFLVEEDKKHERHPIFGNIVDEVAYHEKYPTIYHLRKKLVDSTDKADLRLIYLALAHMIKFRGHFLIEGDLNPDNSDVDKLFIQLVQTYNQLFEENPINASGVDAKAILSARLSKSRRLENLIAQLPGEKKNGLFGNLIALSLGLTPNFKSNFDLAEDAKLQLSKDTYDDDLDNLLAQIGDQYADLFLAAKNLSDAILLSDILRVNTEITKAPLSASMIKRYDEHHQDLTLLKALVRQQLPEKYKEIFFDQSKNGYAGYIDGGASQEEFYKFIKPILEKMDGTEELLVKLNREDLLRKQRTFDNGSIPHQIHLGELHAILRRQEDFYPFLKDNREKIEKILTFRIPYYVGPLARGNSRFAWMTRKSEETITPWNFEEVVDKGASAQSFIERMTNFDKNLPNEKVLPKHSLLYEYFTVYNELTKVKYVTEGMRKPAFLSGEQKKAIVDLLFKTNRKVTVKQLKEDYFKKIECFDSVEISGVEDRFNASLGTYHDLLKIIKDKDFLDNEENEDILEDIVLTLTLFEDREMIEERLKTYAHLFDDKVMKQLKRRRYTGWGRLSRKLINGIRDKQSGKTILDFLKSDGFANRNFMQLIHDDSLTFKEDIQKAQVSGQGDSLHEHIANLAGSPAIKKGILQTVKVVDELVKVMGRHKPENIVIEMARENQTTQKGQKNSRERMKRIEEGIKELGSQILKEHPVENTQLQNEKLYLYYLQNGRDMYVDQELDINRLSDYDVDHIVPQSFLKDDSIDNKVLTRSDKARGKSDNVPSEEVVKKMKNYWRQLLNAKLITQRKFDNLTKAERGGLSELDKAGFIKRQLVETRQITKHVAQILDSRMNTKYDENDKLIREVKVITLKSKLVSDFRKDFQFYKVREINNYHHAHDAYLNAVVGTALIKKYPKLESEFVYGDYKVYDVRKMIAKSEQEIGKATAKYFFYSNIMNFFKTEITLANGEIRKRPLIETNGETGEIVWDKGRDFATVRKVLSMPQVNIVKKTEVQTGGFSKESILPKRNSDKLIARKKDWDPKKYGGFDSPTVAYSVLVVAKVEKGKSKKLKSVKELLGITIMERSSFEKNPIDFLEAKGYKEVKKDLIIKLPKYSLFELENGRKRMLASAGELQKGNELALPSKYVNFLYLASHYEKLKGSPEDNEQKQLFVEQHKHYLDEIIEQISEFSKRVILADANLDKVLSAYNKHRDKPIREQAENIIHLFTLTNLGAPAAFKYFDTTIDRKRYTSTKEVLDATLIHQSITGLYETRIDLSQLGGDGGGGSEAAAKGGGGGTLNIEDEYRLHETSKEPDVPLGSTWLSDFPQAWAETGGMGLAVRQAPLIIPLKATSTPVSIKQYPMSQEARLGIKPHIQRLLDQGILVPCQSPWNTPLLPVKKPGTNDYRPVQDLREVNKRVEDIHPTVPNPYNLLSGLPPSHQWYTVLDLKDAFFCLRLHPTSQPLFAFEWRDPEMGISGQLTWTRLPQGFKNSPTLFNEALHRDLADFRIQHPDLILLQYVDDLLLAATSEQDCQRGTRALLQTLGNLGYRASAKKAQICQKQVKYLGYLLKEGQRWLTEARKETVMGQPTPKTPRQLREFLGTAGFCRLWIPGFAEMAAPLYPLTKPGTLFNWGPDQQKAYQEIKQALLTAPALGLPDLTKPFELFVDEKQGYAKGVLTQKLGPWRRPVAYLSKKLDPVAAGWPPCLRMVAAIAVLTKDAGKLTMGQPLVILAPHAVEALVKQPPDRWLSNARMTHYQAMLLDTDRVQFGPVVALNPATLLPLPEKEAPHDCLEILAETHGTRPDLTDQPIPDADYTWYTDGSSFLQEGQRRAGAAVTTETEVIWARALPAGTSAQRAELIALTQALKMAEGKKLNVYTDSRYAFATAHVHGEIYRRRGWLTSEGREIKNKNEILALLKALFLPKRLSIIHCPGHQKGNSAEARGNRMADQAAREAAMKAVLETSTLLAGKRTADGSEFEKRTADGSEFESPKKKAKVE

SEQ ID NO: 6907 - protein, 2098 aa, synthetic construct
MPAAKRVKLDGGDKKYSIGLDIGTNSVGWAVITDEYKVPSKKFKVLGNTDRHSIKKNLIGALLFDSGETAEATRLKRTARRRYTRRKNRICYLQEIFSNEMAKVDDSFFHRLEESFLVEEDKKHERHPIFGNIVDEVAYHEKYPTIYHLRKKLVDSTDKADLRLIYLALAHMIKFRGHFLIEGDLNPDNSDVDKLFIQLVQTYNQLFEENPINASGVDAKAILSARLSKSRRLENLIAQLPGEKKNGLFGNLIALSLGLTPNFKSNFDLAEDAKLQLSKDTYDDDLDNLLAQIGDQYADLFLAAKNLSDAILLSDILRVNTEITKAPLSASMIKRYDEHHQDLTLLKALVRQQLPEKYKEIFFDQSKNGYAGYIDGGASQEEFYKFIKPILEKMDGTEELLVKLNREDLLRKQRTFDNGSIPHQIHLGELHAILRRQEDFYPFLKDNREKIEKILTFRIPYYVGPLARGNSRFAWMTRKSEETITPWNFEEVVDKGASAQSFIERMTNFDKNLPNEKVLPKHSLLYEYFTVYNELTKVKYVTEGMRKPAFLSGEQKKAIVDLLFKTNRKVTVKQLKEDYFKKIECFDSVEISGVEDRFNASLGTYHDLLKIIKDKDFLDNEENEDILEDIVLTLTLFEDREMIEERLKTYAHLFDDKVMKQLKRRRYTGWGRLSRKLINGIRDKQSGKTILDFLKSDGFANRNFMQLIHDDSLTFKEDIQKAQVSGQGDSLHEHIANLAGSPAIKKGILQTVKVVDELVKVMGRHKPENIVIEMARENQTTQKGQKNSRERMKRIEEGIKELGSQILKEHPVENTQLQNEKLYLYYLQNGRDMYVDQELDINRLSDYDVDHIVPQSFLKDDSIDNKVLTRSDKARGKSDNVPSEEVVKKMKNYWRQLLNAKLITQRKFDNLTKAERGGLSELDKAGFIKRQLVETRQITKHVAQILDSRMNTKYDENDKLIREVKVITLKSKLVSDFRKDFQFYKVREINNYHHAHDAYLNAVVGTALIKKYPKLESEFVYGDYKVYDVRKMIAKSEQEIGKATAKYFFYSNIMNFFKTEITLANGEIRKRPLIETNGETGEIVWDKGRDFATVRKVLSMPQVNIVKKTEVQTGGFSKESILPKRNSDKLIARKKDWDPKKYGGFDSPTVAYSVLVVAKVEKGKSKKLKSVKELLGITIMERSSFEKNPIDFLEAKGYKEVKKDLIIKLPKYSLFELENGRKRMLASAGELQKGNELALPSKYVNFLYLASHYEKLKGSPEDNEQKQLFVEQHKHYLDEIIEQISEFSKRVILADANLDKVLSAYNKHRDKPIREQAENIIHLFTLTNLGAPAAFKYFDTTIDRKRYTSTKEVLDATLIHQSITGLYETRIDLSQLGGDGGGGGGGSEAAAKGGTAPLEEEYRLFLEAPIQNVTLLEQWKREIPKVWAEINPPGLASTQAPIHVQLLSTALPVRVRQYPITLEAKRSLRETIRKFRAAGILRPVHSPWNTPLLPVRKSGTSEYRMVQDLREVNKRVETIHPTVPNPYTLLSLLPPDRIWYSVLDLKDAFFCIPLAPESQLIFAFEWADAEEGESGQLTWTRLPQGFKNSPTLFDEALNRDLQGFRLDHPSVSLLQYVDDLLIAADTQAACLSATRDLLMTLAELGYRVSGKKAQLCQEEVTYLGFKIHKGSRSLSNSRTQAILQIPVPKTKRQVREFLGTIGYCRLWIPGFAELAQPLYAATRGGNDPLVWGEKEEEAFQSLKLALTQPPALALPSLDKPFQLFVEETSGAAKGVLTQALGPWKRPVAYLSKRLDPVAAGWPRCLRAIAAAALLTREASKLTFGQDIEITSSHNLESLLRSPPDKWLTNARITQYQVLLLDPPRVRFKQTAALNPATLLPETDDTLPIHHCLDTLDSLTSTRPDLTDQPLAQAEATLFTDGSSYIRDGKRYAGAAVVTLDSVIWAEPLPIGTSAQKAELIALTKALEWSKDKSVNIYTDSRYAFATLHVHGMIYRERGLLTAGGKAIKNAPEILALLTAVWLPKRVAVMHCKGHQKDDAPTSTGNRRADEVAREVAIRPLSTQATISAGKRTADGSEFEKRTADGSEFESPKKKAKVE

SEQ ID NO: 6908 - protein, 2098 aa, synthetic construct
MPAAKRVKLDGGDKKYSIGLDIGTNSVGWAVITDEYKVPSKKFKVLGNTDRHSIKKNLIGALLFDSGETAEATRLKRTARRRYTRRKNRICYLQEIFSNEMAKVDDSFFHRLEESFLVEEDKKHERHPIFGNIVDEVAYHEKYPTIYHLRKKLVDSTDKADLRLIYLALAHMIKFRGHFLIEGDLNPDNSDVDKLFIQLVQTYNQLFEENPINASGVDAKAILSARLSKSRRLENLIAQLPGEKKNGLFGNLIALSLGLTPNFKSNFDLAEDAKLQLSKDTYDDDLDNLLAQIGDQYADLFLAAKNLSDAILLSDILRVNTEITKAPLSASMIKRYDEHHQDLTLLKALVRQQLPEKYKEIFFDQSKNGYAGYIDGGASQEEFYKFIKPILEKMDGTEELLVKLNREDLLRKQRTFDNGSIPHQIHLGELHAILRRQEDFYPFLKDNREKIEKILTFRIPYYVGPLARGNSRFAWMTRKSEETITPWNFEEVVDKGASAQSFIERMTNFDKNLPNEKVLPKHSLLYEYFTVYNELTKVKYVTEGMRKPAFLSGEQKKAIVDLLFKTNRKVTVKQLKEDYFKKIECFDSVEISGVEDRFNASLGTYHDLLKIIKDKDFLDNEENEDILEDIVLTLTLFEDREMIEERLKTYAHLFDDKVMKQLKRRRYTGWGRLSRKLINGIRDKQSGKTILDFLKSDGFANRNFMQLIHDDSLTFKEDIQKAQVSGQGDSLHEHIANLAGSPAIKKGILQTVKVVDELVKVMGRHKPENIVIEMARENQTTQKGQKNSRERMKRIEEGIKELGSQILKEHPVENTQLQNEKLYLYYLQNGRDMYVDQELDINRLSDYDVDHIVPQSFLKDDSIDNKVLTRSDKARGKSDNVPSEEVVKKMKNYWRQLLNAKLITQRKFDNLTKAERGGLSELDKAGFIKRQLVETRQITKHVAQILDSRMNTKYDENDKLIREVKVITLKSKLVSDFRKDFQFYKVREINNYHHAHDAYLNAVVGTALIKKYPKLESEFVYGDYKVYDVRKMIAKSEQEIGKATAKYFFYSNIMNFFKTEITLANGEIRKRPLIETNGETGEIVWDKGRDFATVRKVLSMPQVNIVKKTEVQTGGFSKESILPKRNSDKLIARKKDWDPKKYGGFDSPTVAYSVLVVAKVEKGKSKKLKSVKELLGITIMERSSFEKNPIDFLEAKGYKEVKKDLIIKLPKYSLFELENGRKRMLASAGELQKGNELALPSKYVNFLYLASHYEKLKGSPEDNEQKQLFVEQHKHYLDEIIEQISEFSKRVILADANLDKVLSAYNKHRDKPIREQAENIIHLFTLTNLGAPAAFKYFDTTIDRKRYTSTKEVLDATLIHQSITGLYETRIDLSQLGGDGGGGGGGSEAAAKGGTAPLEEEYRLFLEAPIQNVTLLEQWKREIPKVWAEINPPGLASTQAPIHVQLLSTALPVRVRQYPITLEAKRSLRETIRKFRAAGILRPVHSPWNTPLLPVRKSGTSEYRMVQDLREVNKRVETIHPTVPNPYTLLSLLPPDRIWYSVLDLKDAFFCIPLAPESQLIFAFEWADAEEGESGQLTWTRLPQGFKNSPTLFNEALNRDLQGFRLDHPSVSLLQYVDDLLIAADTQAACLSATRDLLMTLAELGYRVSGKKAQLCQEEVTYLGFKIHKGSRSLSNSRTQAILQIPVPKTKRQVREFLGTIGYCRLWIPGFAELAQPLYAATRPGNDPLVWGEKEEEAFQSLKLALTQPPALALPSLDKPFQLFVEETSGAAKGVLTQALGPWKRPVAYLSKRLDPVAAGWPRCLRAIAAAALLTREASKLTFGQDIEITSSHNLESLLRSPPDKWLTNARITQYQVLLLDPPRVRFKQTAALNPATLLPETDDTLPIHHCLDTLDSLTSTRPDLTDQPLAQAEATLFTDGSSYIRDGKRYAGAAVVTLDSVIWAEPLPIGTSAQKAELIALTKALEWSKDKSVNIYTDSRYAFATLHVHGMIYRERGWLTAGGKAIKNAPEILALLTAVWLPKRVAVMHCKGHQKDDAPTSTGNRRADEVAREVAIRPLSTQATISAGKRTADGSEFEKRTADGSEFESPKKKAKVE

SEQ ID NO: 6909 - protein, 2102 aa, synthetic construct
MPAAKRVKLDGGDKKYSIGLDIGTNSVGWAVITDEYKVPSKKFKVLGNTDRHSIKKNLIGALLFDSGETAEATRLKRTARRRYTRRKNRICYLQEIFSNEMAKVDDSFFHRLEESFLVEEDKKHERHPIFGNIVDEVAYHEKYPTIYHLRKKLVDSTDKADLRLIYLALAHMIKFRGHFLIEGDLNPDNSDVDKLFIQLVQTYNQLFEENPINASGVDAKAILSARLSKSRRLENLIAQLPGEKKNGLFGNLIALSLGLTPNFKSNFDLAEDAKLQLSKDTYDDDLDNLLAQIGDQYADLFLAAKNLSDAILLSDILRVNTEITKAPLSASMIKRYDEHHQDLTLLKALVRQQLPEKYKEIFFDQSKNGYAGYIDGGASQEEFYKFIKPILEKMDGTEELLVKLNREDLLRKQRTFDNGSIPHQIHLGELHAILRRQEDFYPFLKDNREKIEKILTFRIPYYVGPLARGNSRFAWMTRKSEETITPWNFEEVVDKGASAQSFIERMTNFDKNLPNEKVLPKHSLLYEYFTVYNELTKVKYVTEGMRKPAFLSGEQKKAIVDLLFKTNRKVTVKQLKEDYFKKIECFDSVEISGVEDRFNASLGTYHDLLKIIKDKDFLDNEENEDILEDIVLTLTLFEDREMIEERLKTYAHLFDDKVMKQLKRRRYTGWGRLSRKLINGIRDKQSGKTILDFLKSDGFANRNFMQLIHDDSLTFKEDIQKAQVSGQGDSLHEHIANLAGSPAIKKGILQTVKVVDELVKVMGRHKPENIVIEMARENQTTQKGQKNSRERMKRIEEGIKELGSQILKEHPVENTQLQNEKLYLYYLQNGRDMYVDQELDINRLSDYDVDHIVPQSFLKDDSIDNKVLTRSDKARGKSDNVPSEEVVKKMKNYWRQLLNAKLITQRKFDNLTKAERGGLSELDKAGFIKRQLVETRQITKHVAQILDSRMNTKYDENDKLIREVKVITLKSKLVSDFRKDFQFYKVREINNYHHAHDAYLNAVVGTALIKKYPKLESEFVYGDYKVYDVRKMIAKSEQEIGKATAKYFFYSNIMNFFKTEITLANGEIRKRPLIETNGETGEIVWDKGRDFATVRKVLSMPQVNIVKKTEVQTGGFSKESILPKRNSDKLIARKKDWDPKKYGGFDSPTVAYSVLVVAKVEKGKSKKLKSVKELLGITIMERSSFEKNPIDFLEAKGYKEVKKDLIIKLPKYSLFELENGRKRMLASAGELQKGNELALPSKYVNFLYLASHYEKLKGSPEDNEQKQLFVEQHKHYLDEIIEQISEFSKRVILADANLDKVLSAYNKHRDKPIREQAENIIHLFTLTNLGAPAAFKYFDTTIDRKRYTSTKEVLDATLIHQSITGLYETRIDLSQLGGDGGGGGGGSEAAAKGGTVSLQDEHRLFDIPVTTSLPDVWLQDFPQAWAETGGLGRAKCQAPIIIDLKPTAVPVSIKQYPMSLEAHMGIRQHIIKFLELGVLRPCRSPWNTPLLPVKKPGTQDYRPVQDLREINKRTVDIHPTVPNPYNLLSTLKPDYSWYTVLDLKDAFFCLPLAPQSQELFAFEWKDPERGISGQLTWTRLPQGFKNSPTLFNEALHRDLTDFRTQHPEVTLLQYVDDLLLAAPTKKACTQGTRHLLQELGEKGYRASAKKAQICQTKVTYLGYILSEGKRWLTPGRIETVARIPPPRNPREVREFLGTAGFCRLWIPGFAELAAPLYALTKPSTPFTWQTEHQLAFEALKKALLSAPALGLPDTSKPFTLFLDERQGIAKGVLTQKLGPWKRPVAYLSKKLDPVAAGWPPCLRIMAATAMLVKDSAKLTLGQPLTVITPHTLEAIVRQPPDRWITNARLTHYQALLLDTDRVQFGPPVTLNPATLLPVPENQPSPHDCRQVLAETHGTREDLKDQELPDADHTWYTDGSSYLDSGTRRAGAAVVDGHNTIWAQSLPPGTSAQKAELIALTKALELSKGKKANIYTDSRYAFATAHTHGSIYERRGWLTSEGKEIKNKAEIIALLKALFLPQEVAIIHCPGHQKGQDPVAVGNRQADRVARQAAMAEVLTLATEPDNTSHITAGKRTADGSEFEKRTADGSEFESPKKKAKVE

SEQ ID NO: 6910 - protein, 2173 aa, synthetic construct
MPAAKRVKLDGGDKKYSIGLDIGTNSVGWAVITDEYKVPSKKFKVLGNTDRHSIKKNLIGALLFDSGETAEATRLKRTARRRYTRRKNRICYLQEIFSNEMAKVDDSFFHRLEESFLVEEDKKHERHPIFGNIVDEVAYHEKYPTIYHLRKKLVDSTDKADLRLIYLALAHMIKFRGHFLIEGDLNPDNSDVDKLFIQLVQTYNQLFEENPINASGVDAKAILSARLSKSRRLENLIAQLPGEKKNGLFGNLIALSLGLTPNFKSNFDLAEDAKLQLSKDTYDDDLDNLLAQIGDQYADLFLAAKNLSDAILLSDILRVNTEITKAPLSASMIKRYDEHHQDLTLLKALVRQQLPEKYKEIFFDQSKNGYAGYIDGGASQEEFYKFIKPILEKMDGTEELLVKLNREDLLRKQRTFDNGSIPHQIHLGELHAILRRQEDFYPFLKDNREKIEKILTFRIPYYVGPLARGNSRFAWMTRKSEETITPWNFEEVVDKGASAQSFIERMTNFDKNLPNEKVLPKHSLLYEYFTVYNELTKVKYVTEGMRKPAFLSGEQKKAIVDLLFKTNRKVTVKQLKEDYFKKIECFDSVEISGVEDRFNASLGTYHDLLKIIKDKDFLDNEENEDILEDIVLTLTLFEDREMIEERLKTYAHLFDDKVMKQLKRRRYTGWGRLSRKLINGIRDKQSGKTILDFLKSDGFANRNFMQLIHDDSLTFKEDIQKAQVSGQGDSLHEHIANLAGSPAIKKGILQTVKVVDELVKVMGRHKPENIVIEMARENQTTQKGQKNSRERMKRIEEGIKELGSQILKEHPVENTQLQNEKLYLYYLQNGRDMYVDQELDINRLSDYDVDHIVPQSFLKDDSIDNKVLTRSDKARGKSDNVPSEEVVKKMKNYWRQLLNAKLITQRKFDNLTKAERGGLSELDKAGFIKRQLVETRQITKHVAQILDSRMNTKYDENDKLIREVKVITLKSKLVSDFRKDFQFYKVREINNYHHAHDAYLNAVVGTALIKKYPKLESEFVYGDYKVYDVRKMIAKSEQEIGKATAKYFFYSNIMNFFKTEITLANGEIRKRPLIETNGETGEIVWDKGRDFATVRKVLSMPQVNIVKKTEVQTGGFSKESILPKRNSDKLIARKKDWDPKKYGGFDSPTVAYSVLVVAKVEKGKSKKLKSVKELLGITIMERSSFEKNPIDFLEAKGYKEVKKDLIIKLPKYSLFELENGRKRMLASAGELQKGNELALPSKYVNFLYLASHYEKLKGSPEDNEQKQLFVEQHKHYLDEIIEQISEFSKRVILADANLDKVLSAYNKHRDKPIREQAENIIHLFTLTNLGAPAAFKYFDTTIDRKRYTSTKEVLDATLIHQSITGLYETRIDLSQLGGDGGGGGGGSEAAAKGGMDLLKPLTVERKGVKIKGYWNSQADITCVPKDLLQGEEPVRQQNVTTIHGTQEGDVYYVNLKIDGRRINTEVIGTTLDYAIITPGDVPWILKKPLELTIKLDLEEQQGTLLNNSILSKKGKEELKQLFEKYSALWQSWENQVGHRRIRPHKIATGTVKPTPQKQYHINPKAKPDIQIVINDLLKQGVLIQKESTMNTPVYPVPKPNGRWRMVLDYRAVNKVTPLIAVQNQHSYGILGSLFKGRYKTTIDLSNGFWAHPIVPEDYWITAFTWQGKQYCWTVLPQGFLNSPGLFTGDVVDLLQGIPNVEVYVDDVYISHDSEKEHLEYLDILFNRLKEAGYIISLKKSNIANSIVDFLGFQITNEGRGLTDTFKEKLENITAPTTLKQLQSILGLLNFARNFIPDFTELIAPLYALIPKSTKNYVPWQIEHSTTLETLITKLNGAEYLQGRKGDKTLIMKVNASYTTGYIRYYNEGEKKPISYVSIVFSKTELKFTELEKLLTTVHKGLLKALDLSMGQNIHVYSPIVSMQNIQKTPQTAKKALASRWLSWLSYLEDPRIRFFYDPQMPALKDLPAVDTGKDNKKHPSNFQHIFYTDGSAITSPTKEGHLNAGMGIVYFINKDGNLQKQQEWSISLGNHTAQFAEIAAFEFALKKCLPLGGNILVVTDSNYVAKAYNEELDVWASNGFVNNRKKPLKHISKWKSVADLKRLRPDVVVTHEPGHQKLDSSPHAYGNNLADQLATQASFKVHAGKRTADGSEFEKRTADGSEFESPKKKAKVE

SEQ ID NO: 6911 - protein, 2095 aa, synthetic construct
MPAAKRVKLDGGDKKYSIGLDIGTNSVGWAVITDEYKVPSKKFKVLGNTDRHSIKKNLIGALLFDSGETAEATRLKRTARRRYTRRKNRICYLQEIFSNEMAKVDDSFFHRLEESFLVEEDKKHERHPIFGNIVDEVAYHEKYPTIYHLRKKLVDSTDKADLRLIYLALAHMIKFRGHFLIEGDLNPDNSDVDKLFIQLVQTYNQLFEENPINASGVDAKAILSARLSKSRRLENLIAQLPGEKKNGLFGNLIALSLGLTPNFKSNFDLAEDAKLQLSKDTYDDDLDNLLAQIGDQYADLFLAAKNLSDAILLSDILRVNTEITKAPLSASMIKRYDEHHQDLTLLKALVRQQLPEKYKEIFFDQSKNGYAGYIDGGASQEEFYKFIKPILEKMDGTEELLVKLNREDLLRKQRTFDNGSIPHQIHLGELHAILRRQEDFYPFLKDNREKIEKILTFRIPYYVGPLARGNSRFAWMTRKSEETITPWNFEEVVDKGASAQSFIERMTNFDKNLPNEKVLPKHSLLYEYFTVYNELTKVKYVTEGMRKPAFLSGEQKKAIVDLLFKTNRKVTVKQLKEDYFKKIECFDSVEISGVEDRFNASLGTYHDLLKIIKDKDFLDNEENEDILEDIVLTLTLFEDREMIEERLKTYAHLFDDKVMKQLKRRRYTGWGRLSRKLINGIRDKQSGKTILDFLKSDGFANRNFMQLIHDDSLTFKEDIQKAQVSGQGDSLHEHIANLAGSPAIKKGILQTVKVVDELVKVMGRHKPENIVIEMARENQTTQKGQKNSRERMKRIEEGIKELGSQILKEHPVENTQLQNEKLYLYYLQNGRDMYVDQELDINRLSDYDVDHIVPQSFLKDDSIDNKVLTRSDKARGKSDNVPSEEVVKKMKNYWRQLLNAKLITQRKFDNLTKAERGGLSELDKAGFIKRQLVETRQITKHVAQILDSRMNTKYDENDKLIREVKVITLKSKLVSDFRKDFQFYKVREINNYHHAHDAYLNAVVGTALIKKYPKLESEFVYGDYKVYDVRKMIAKSEQEIGKATAKYFFYSNIMNFFKTEITLANGEIRKRPLIETNGETGEIVWDKGRDFATVRKVLSMPQVNIVKKTEVQTGGFSKESILPKRNSDKLIARKKDWDPKKYGGFDSPTVAYSVLVVAKVEKGKSKKLKSVKELLGITIMERSSFEKNPIDFLEAKGYKEVKKDLIIKLPKYSLFELENGRKRMLASAGELQKGNELALPSKYVNFLYLASHYEKLKGSPEDNEQKQLFVEQHKHYLDEIIEQISEFSKRVILADANLDKVLSAYNKHRDKPIREQAENIIHLFTLTNLGAPAAFKYFDTTIDRKRYTSTKEVLDATLIHQSITGLYETRIDLSQLGGDGGGGGGGSEAAAKGGTLQLEEEYRLFEPESTQKQEMDIWLKNFPQAWAETGGMGTAHCQAPVLIQLKATATPISIRQYPMPHEAYQGIKPHIRRMLDQGILKPCQSPWNTPLLPVKKPGTEDYRPVQDLREVNKRVEDIHPTVPNPYNLLSTLPPSHPWYTVLDLKDAFFCLRLHSESQLLFAFEWRDPEIGLSGQLTWTRLPQGFKNSPTLFNEALHSDLADFRVRYPALVLLQYVDDLLLAAATRTECLEGTKALLETLGNKGYRASAKKAQICLQEVTYLGYSLKDGQRWLTKARKEAILSIPVPKNSRQVREFLGKAGYCRLFIPGFAELAAPLYPLTRPGTLFQWGTEQQLAFEDIKKALLSSPALGLPDITKPFELFIDENSGFAKGVLVQKLGPWKRPVAYLSKKLDTVASGWPPCLRMVAAIAILVKDAGKLTLGQPLTILTSHPVEALVRQPPNKWLSNARMTHYQAMLLDAERVHFGPTVSLNPATLLPLPSGGNHHDCLQILAETHGTRPDLTDQPLPDADLTWYTDGSSFIRNGEREAGAAVTTESEVIWAAPLPPGTSAQRAELIALTQALKMAEGKKLTVYTDSRYAFATTHVHGEIYRRRGWLTSEGKEIKNKNEILALLEALFLPKRLSIIHCPGHQKGDSPQAKGNRLADDTAKKAATETHSSLTVLPAGKRTADGSEFEKRTADGSEFESPKKKAKVE

SEQ ID NO: 6912 - protein, 2176 aa, synthetic construct
MPAAKRVKLDGGDKKYSIGLDIGTNSVGWAVITDEYKVPSKKFKVLGNTDRHSIKKNLIGALLFDSGETAEATRLKRTARRRYTRRKNRICYLQEIFSNEMAKVDDSFFHRLEESFLVEEDKKHERHPIFGNIVDEVAYHEKYPTIYHLRKKLVDSTDKADLRLIYLALAHMIKFRGHFLIEGDLNPDNSDVDKLFIQLVQTYNQLFEENPINASGVDAKAILSARLSKSRRLENLIAQLPGEKKNGLFGNLIALSLGLTPNFKSNFDLAEDAKLQLSKDTYDDDLDNLLAQIGDQYADLFLAAKNLSDAILLSDILRVNTEITKAPLSASMIKRYDEHHQDLTLLKALVRQQLPEKYKEIFFDQSKNGYAGYIDGGASQEEFYKFIKPILEKMDGTEELLVKLNREDLLRKQRTFDNGSIPHQIHLGELHAILRRQEDFYPFLKDNREKIEKILTFRIPYYVGPLARGNSRFAWMTRKSEETITPWNFEEVVDKGASAQSFIERMTNFDKNLPNEKVLPKHSLLYEYFTVYNELTKVKYVTEGMRKPAFLSGEQKKAIVDLLFKTNRKVTVKQLKEDYFKKIECFDSVEISGVEDRFNASLGTYHDLLKIIKDKDFLDNEENEDILEDIVLTLTLFEDREMIEERLKTYAHLFDDKVMKQLKRRRYTGWGRLSRKLINGIRDKQSGKTILDFLKSDGFANRNFMQLIHDDSLTFKEDIQKAQVSGQGDSLHEHIANLAGSPAIKKGILQTVKVVDELVKVMGRHKPENIVIEMARENQTTQKGQKNSRERMKRIEEGIKELGSQILKEHPVENTQLQNEKLYLYYLQNGRDMYVDQELDINRLSDYDVDHIVPQSFLKDDSIDNKVLTRSDKARGKSDNVPSEEVVKKMKNYWRQLLNAKLITQRKFDNLTKAERGGLSELDKAGFIKRQLVETRQITKHVAQILDSRMNTKYDENDKLIREVKVITLKSKLVSDFRKDFQFYKVREINNYHHAHDAYLNAVVGTALIKKYPKLESEFVYGDYKVYDVRKMIAKSEQEIGKATAKYFFYSNIMNFFKTEITLANGEIRKRPLIETNGETGEIVWDKGRDFATVRKVLSMPQVNIVKKTEVQTGGFSKESILPKRNSDKLIARKKDWDPKKYGGFDSPTVAYSVLVVAKVEKGKSKKLKSVKELLGITIMERSSFEKNPIDFLEAKGYKEVKKDLIIKLPKYSLFELENGRKRMLASAGELQKGNELALPSKYVNFLYLASHYEKLKGSPEDNEQKQLFVEQHKHYLDEIIEQISEFSKRVILADANLDKVLSAYNKHRDKPIREQAENIIHLFTLTNLGAPAAFKYFDTTIDRKRYTSTKEVLDATLIHQSITGLYETRIDLSQLGGDGGGGGGGSEAAAKGGMNPLQLLQPLPAEIKGTKLLAHWNSGATITCIPESFLEDEQPIKKTLIKTIHGEKQQNVYYVTFKVKGRKVEAEVIASPYEYILLSPTDVPWLTQQPLQLTILVPLQEYQEKILSKTALPEDQKQQLKTLFVKYDNLWQHWENQVGHRKIRPHNIATGDYPPRPQKQYPINPKAKPSIQIVIDDLLKQGVLTPQNSTMNTPVYPVPKPDGRWRMVLDYREVNKTIPLTAAQNQHSAGILATIVRQKYKTTLDLANGFWAHPITPESYWLTAFTWQGKQYCWTRLPQGFLNSPALFTADVVDLLKEIPNVQVYVDDIYLSHDDPKEHVQQLEKVFQILLQAGYVVSLKKSEIGQKTVEFLGFNITKEGRGLTDTFKTKLLNITPPKDLKQLQSILGLLNFARNFIPNFAELVQPLYNLIASAKGKYIEWSEENTKQLNMVIEALNTASNLEERLPEQRLVIKVNTSPSAGYVRYYNETGKKPIMYLNYVFSKAELKFSMLEKLLTTMHKALIKAMDLAMGQEILVYSPIVSMTKIQKTPLPERKALPIRWITWMTYLEDPRIQFHYDKTLPELKHIPDVYTSSQSPVKHPSQYEGVFYTDGSAIKSPDPTKSNNAGMGIVHATYKPEYQVLNQWSIPLGNHTAQMAEIAAVEFACKKALKIPGPVLVITDSFYVAESANKELPYWKSNGFVNNKKKPLKHISKWKSIAECLSMKPDITIQHEKGISLQIPVFILKGNALADKLATQGSYVVNAGKRTADGSEFEKRTADGSEFESPKKKAKVE

SEQ ID NO: 6913 - protein, 2176 aa, synthetic construct
MPAAKRVKLDGGDKKYSIGLDIGTNSVGWAVITDEYKVPSKKFKVLGNTDRHSIKKNLIGALLFDSGETAEATRLKRTARRRYTRRKNRICYLQEIFSNEMAKVDDSFFHRLEESFLVEEDKKHERHPIFGNIVDEVAYHEKYPTIYHLRKKLVDSTDKADLRLIYLALAHMIKFRGHFLIEGDLNPDNSDVDKLFIQLVQTYNQLFEENPINASGVDAKAILSARLSKSRRLENLIAQLPGEKKNGLFGNLIALSLGLTPNFKSNFDLAEDAKLQLSKDTYDDDLDNLLAQIGDQYADLFLAAKNLSDAILLSDILRVNTEITKAPLSASMIKRYDEHHQDLTLLKALVRQQLPEKYKEIFFDQSKNGYAGYIDGGASQEEFYKFIKPILEKMDGTEELLVKLNREDLLRKQRTFDNGSIPHQIHLGELHAILRRQEDFYPFLKDNREKIEKILTFRIPYYVGPLARGNSRFAWMTRKSEETITPWNFEEVVDKGASAQSFIERMTNFDKNLPNEKVLPKHSLLYEYFTVYNELTKVKYVTEGMRKPAFLSGEQKKAIVDLLFKTNRKVTVKQLKEDYFKKIECFDSVEISGVEDRFNASLGTYHDLLKIIKDKDFLDNEENEDILEDIVLTLTLFEDREMIEERLKTYAHLFDDKVMKQLKRRRYTGWGRLSRKLINGIRDKQSGKTILDFLKSDGFANRNFMQLIHDDSLTFKEDIQKAQVSGQGDSLHEHIANLAGSPAIKKGILQTVKVVDELVKVMGRHKPENIVIEMARENQTTQKGQKNSRERMKRIEEGIKELGSQILKEHPVENTQLQNEKLYLYYLQNGRDMYVDQELDINRLSDYDVDHIVPQSFLKDDSIDNKVLTRSDKARGKSDNVPSEEVVKKMKNYWRQLLNAKLITQRKFDNLTKAERGGLSELDKAGFIKRQLVETRQITKHVAQILDSRMNTKYDENDKLIREVKVITLKSKLVSDFRKDFQFYKVREINNYHHAHDAYLNAVVGTALIKKYPKLESEFVYGDYKVYDVRKMIAKSEQEIGKATAKYFFYSNIMNFFKTEITLANGEIRKRPLIETNGETGEIVWDKGRDFATVRKVLSMPQVNIVKKTEVQTGGFSKESILPKRNSDKLIARKKDWDPKKYGGFDSPTVAYSVLVVAKVEKGKSKKLKSVKELLGITIMERSSFEKNPIDFLEAKGYKEVKKDLIIKLPKYSLFELENGRKRMLASAGELQKGNELALPSKYVNFLYLASHYEKLKGSPEDNEQKQLFVEQHKHYLDEIIEQISEFSKRVILADANLDKVLSAYNKHRDKPIREQAENIIHLFTLTNLGAPAAFKYFDTTIDRKRYTSTKEVLDATLIHQSITGLYETRIDLSQLGGDGGGGGGGSEAAAKGGMNPLQLLQPLPAEIKGTKLLAHWNSGATITCIPESFLEDEQPIKKTLIKTIHGEKQQNVYYVTFKVKGRKVEAEVIASPYEYILLSPTDVPWLTQQPLQLTILVPLQEYQEKILSKTALPEDQKQQLKTLFVKYDNLWQHWENQVGHRKIRPHNIATGDYPPRPQKQYPINPKAKPSIQIVIDDLLKQGVLTPQNSTMNTPVYPVPKPDGRWRMVLDYREVNKTIPLTAAQNQHSAGILATIVRQKYKTTLDLANGFWAHPITPESYWLTAFTWQGKQYCWTRLPQGFLNSPALFNADVVDLLKEIPNVQVYVDDIYLSHDDPKEHVQQLEKVFQILLQAGYVVSLKKSEIGQKTVEFLGFNITKEGRGLTDTFKTKLLNITPPKDLKQLQSILGKLNFARNFIPNFAELVQPLYNLIAPAKGKYIEWSEENTKQLNMVIEALNTASNLEERLPEQRLVIKVNTSPSAGYVRYYNETGKKPIMYLNYVFSKAELKFSMLEKLLTTMHKALIKAMDLAMGQEILVYSPIVSMTKIQKTPLPERKALPIRWITWMTYLEDPRIQFHYDKTLPELKHIPDVYTSSQSPVKHPSQYEGVFYTDGSAIKSPDPTKSNNAGMGIVHATYKPEYQVLNQWSIPLGNHTAQMAEIAAVEFACKKALKIPGPVLVITDSFYVAESANKELPYWKSNGFVNNKKKPLKHISKWKSIAECLSMKPDITIQHEKGISLQIPVFILKGNALADKLATQGSYVVNAGKRTADGSEFEKRTADGSEFESPKKKAKVE

SEQ ID NO: 6914 - protein, 2218 aa, synthetic construct
MPAAKRVKLDGGDKKYSIGLDIGTNSVGWAVITDEYKVPSKKFKVLGNTDRHSIKKNLIGALLFDSGETAEATRLKRTARRRYTRRKNRICYLQEIFSNEMAKVDDSFFHRLEESFLVEEDKKHERHPIFGNIVDEVAYHEKYPTIYHLRKKLVDSTDKADLRLIYLALAHMIKFRGHFLIEGDLNPDNSDVDKLFIQLVQTYNQLFEENPINASGVDAKAILSARLSKSRRLENLIAQLPGEKKNGLFGNLIALSLGLTPNFKSNFDLAEDAKLQLSKDTYDDDLDNLLAQIGDQYADLFLAAKNLSDAILLSDILRVNTEITKAPLSASMIKRYDEHHQDLTLLKALVRQQLPEKYKEIFFDQSKNGYAGYIDGGASQEEFYKFIKPILEKMDGTEELLVKLNREDLLRKQRTFDNGSIPHQIHLGELHAILRRQEDFYPFLKDNREKIEKILTFRIPYYVGPLARGNSRFAWMTRKSEETITPWNFEEVVDKGASAQSFIERMTNFDKNLPNEKVLPKHSLLYEYFTVYNELTKVKYVTEGMRKPAFLSGEQKKAIVDLLFKTNRKVTVKQLKEDYFKKIECFDSVEISGVEDRFNASLGTYHDLLKIIKDKDFLDNEENEDILEDIVLTLTLFEDREMIEERLKTYAHLFDDKVMKQLKRRRYTGWGRLSRKLINGIRDKQSGKTILDFLKSDGFANRNFMQLIHDDSLTFKEDIQKAQVSGQGDSLHEHIANLAGSPAIKKGILQTVKVVDELVKVMGRHKPENIVIEMARENQTTQKGQKNSRERMKRIEEGIKELGSQILKEHPVENTQLQNEKLYLYYLQNGRDMYVDQELDINRLSDYDVDHIVPQSFLKDDSIDNKVLTRSDKARGKSDNVPSEEVVKKMKNYWRQLLNAKLITQRKFDNLTKAERGGLSELDKAGFIKRQLVETRQITKHVAQILDSRMNTKYDENDKLIREVKVITLKSKLVSDFRKDFQFYKVREINNYHHAHDAYLNAVVGTALIKKYPKLESEFVYGDYKVYDVRKMIAKSEQEIGKATAKYFFYSNIMNFFKTEITLANGEIRKRPLIETNGETGEIVWDKGRDFATVRKVLSMPQVNIVKKTEVQTGGFSKESILPKRNSDKLIARKKDWDPKKYGGFDSPTVAYSVLVVAKVEKGKSKKLKSVKELLGITIMERSSFEKNPIDFLEAKGYKEVKKDLIIKLPKYSLFELENGRKRMLASAGELQKGNELALPSKYVNFLYLASHYEKLKGSPEDNEQKQLFVEQHKHYLDEIIEQISEFSKRVILADANLDKVLSAYNKHRDKPIREQAENIIHLFTLTNLGAPAAFKYFDTTIDRKRYTSTKEVLDATLIHQSITGLYETRIDLSQLGGDGGGGGGGSEAAAKGGTLGDQGSRGSDPLPEPRVTLTVEGIPTEFLVNTGAEHSVLTKPMGKMGSKRTVVAGATGSKVYPWTTKRLLKIGQKQVTHSFLVIPECPAPLLGRDLLTKLKAQIQFSTEGPQVTWEDRPAMCLVLNLEEEYRLHEKPVPPSIDPSWLQLFPMVWAEKAGMGLANQVPPVVVELKSDASPVAVRQYPMSKEAREGIRPHIQRFLDLGILVPCQSPWNTPLLPVKKPGTNDYRPVQDLREVNKRVQDIHPTVPNPYNLLSSLPPSHTWYSVLDLKDAFFCLKLHPNSQPLFAFEWRDPEKGNTGQLTWTRLPQGFKNSPTLFDEALHRDLASFRALNPQVVMLQYVDDLLVAAPTYRDCKEGTRRLLQELSKLGYRVSAKKAQLCREEVTYLGYLLKGGKRWLTPARKATVMKIPTPTTPRQVREFLGTAGFCRLWIPGFASLAAPLYPLTREKVPFTWTEAHQEAFGRIKEALLSAPALALPDLTKPFALYVDEKEGVARGVLTQTLGPWRRPVAYLSKKLDPVASGWPTCLKAIAAVALLLKDADKLTLGQNVLVIAPHNLESIVRQPPDRWMTNARMTHYQSLLLNERVSFAPPAILNPATLLPVESDDTPIHICSEILAEETGTRPDLRDQPLPGVPAWYTDGSSFIMDGRRQAGAAIVDNKRTVWASNLPEGTSAQKAELIALTQALRLAEGKSINIYTDSRYAFATAHVHGAIYKQRGLLTSAGKDIKNKEEILALLEAIHLPKRVAIIHCPGHQRGTDPVATGNRKADEAAKQAAQSTRILTETTKNAGKRTADGSEFEKRTADGSEFESPKKKAKVE

SEQ ID NO: 6915 - protein, 2127 aa, synthetic construct
MPAAKRVKLDGGDKKYSIGLDIGTNSVGWAVITDEYKVPSKKFKVLGNTDRHSIKKNLIGALLFDSGETAEATRLKRTARRRYTRRKNRICYLQEIFSNEMAKVDDSFFHRLEESFLVEEDKKHERHPIFGNIVDEVAYHEKYPTIYHLRKKLVDSTDKADLRLIYLALAHMIKFRGHFLIEGDLNPDNSDVDKLFIQLVQTYNQLFEENPINASGVDAKAILSARLSKSRRLENLIAQLPGEKKNGLFGNLIALSLGLTPNFKSNFDLAEDAKLQLSKDTYDDDLDNLLAQIGDQYADLFLAAKNLSDAILLSDILRVNTEITKAPLSASMIKRYDEHHQDLTLLKALVRQQLPEKYKEIFFDQSKNGYAGYIDGGASQEEFYKFIKPILEKMDGTEELLVKLNREDLLRKQRTFDNGSIPHQIHLGELHAILRRQEDFYPFLKDNREKIEKILTFRIPYYVGPLARGNSRFAWMTRKSEETITPWNFEEVVDKGASAQSFIERMTNFDKNLPNEKVLPKHSLLYEYFTVYNELTKVKYVTEGMRKPAFLSGEQKKAIVDLLFKTNRKVTVKQLKEDYFKKIECFDSVEISGVEDRFNASLGTYHDLLKIIKDKDFLDNEENEDILEDIVLTLTLFEDREMIEERLKTYAHLFDDKVMKQLKRRRYTGWGRLSRKLINGIRDKQSGKTILDFLKSDGFANRNFMQLIHDDSLTFKEDIQKAQVSGQGDSLHEHIANLAGSPAIKKGILQTVKVVDELVKVMGRHKPENIVIEMARENQTTQKGQKNSRERMKRIEEGIKELGSQILKEHPVENTQLQNEKLYLYYLQNGRDMYVDQELDINRLSDYDVDHIVPQSFLKDDSIDNKVLTRSDKARGKSDNVPSEEVVKKMKNYWRQLLNAKLITQRKFDNLTKAERGGLSELDKAGFIKRQLVETRQITKHVAQILDSRMNTKYDENDKLIREVKVITLKSKLVSDFRKDFQFYKVREINNYHHAHDAYLNAVVGTALIKKYPKLESEFVYGDYKVYDVRKMIAKSEQEIGKATAKYFFYSNIMNFFKTEITLANGEIRKRPLIETNGETGEIVWDKGRDFATVRKVLSMPQVNIVKKTEVQTGGFSKESILPKRNSDKLIARKKDWDPKKYGGFDSPTVAYSVLVVAKVEKGKSKKLKSVKELLGITIMERSSFEKNPIDFLEAKGYKEVKKDLIIKLPKYSLFELENGRKRMLASAGELQKGNELALPSKYVNFLYLASHYEKLKGSPEDNEQKQLFVEQHKHYLDEIIEQISEFSKRVILADANLDKVLSAYNKHRDKPIREQAENIIHLFTLTNLGAPAAFKYFDTTIDRKRYTSTKEVLDATLIHQSITGLYETRIDLSQLGGDGGGGGGGSEAAAKGGLLGRDLLTKLKAQIQFSTEGPQVTWEDRPAMCLVLNLEEEYRLHEKPVPPSIDPSWLQLFPMVWAEKAGMGLANQVPPVVVELKSDASPVAVRQYPMSKEAREGIRPHIQRFLDLGILVPCQSPWNTPLLPVKKPGTNDYRPVQDLREVNKRVQDIHPTVPNPYNLLSSLPPSHTWYSVLDLKDAFFCLKLHPNSQPLFAFEWRDPEKGNTGQLTWTRLPQGFKNSPTLFNEALHRDLASFRALNPQVVMLQYVDDLLVAAPTYRDCKEGTRRLLQELSKLGYRVSAKKAQLCREEVTYLGYLLKGGKRWLTPARKATVMKIPTPTTPRQVREFLGTAGFCRLWIPGFASLAAPLYPLTRPKVPFTWTEAHQEAFGRIKEALLSAPALALPDLTKPFALYVDEKEGVARGVLTQTLGPWRRPVAYLSKKLDPVASGWPTCLKAIAAVALLLKDADKLTLGQNVLVIAPHNLESIVRQPPDRWMTNARMTHYQSLLLNERVSFAPPAILNPATLLPVESDDTPIHICSEILAEETGTRPDLRDQPLPGVPAWYTDGSSFIMDGRRQAGAAIVDNKRTVWASNLPEGTSAQKAELIALTQALRLAEGKSINIYTDSRYAFATAHVHGAIYKQRGWLTSAGKDIKNKEEILALLEAIHLPKRVAIIHCPGHQRGTDPVATGNRKADEAAKQAAQSTRILTETTKNAGKRTADGSEFEKRTADGSEFESPKKKAKVE

SEQ ID NO: 6916 - protein, 2218 aa, synthetic construct
MPAAKRVKLDGGDKKYSIGLDIGTNSVGWAVITDEYKVPSKKFKVLGNTDRHSIKKNLIGALLFDSGETAEATRLKRTARRRYTRRKNRICYLQEIFSNEMAKVDDSFFHRLEESFLVEEDKKHERHPIFGNIVDEVAYHEKYPTIYHLRKKLVDSTDKADLRLIYLALAHMIKFRGHFLIEGDLNPDNSDVDKLFIQLVQTYNQLFEENPINASGVDAKAILSARLSKSRRLENLIAQLPGEKKNGLFGNLIALSLGLTPNFKSNFDLAEDAKLQLSKDTYDDDLDNLLAQIGDQYADLFLAAKNLSDAILLSDILRVNTEITKAPLSASMIKRYDEHHQDLTLLKALVRQQLPEKYKEIFFDQSKNGYAGYIDGGASQEEFYKFIKPILEKMDGTEELLVKLNREDLLRKQRTFDNGSIPHQIHLGELHAILRRQEDFYPFLKDNREKIEKILTFRIPYYVGPLARGNSRFAWMTRKSEETITPWNFEEVVDKGASAQSFIERMTNFDKNLPNEKVLPKHSLLYEYFTVYNELTKVKYVTEGMRKPAFLSGEQKKAIVDLLFKTNRKVTVKQLKEDYFKKIECFDSVEISGVEDRFNASLGTYHDLLKIIKDKDFLDNEENEDILEDIVLTLTLFEDREMIEERLKTYAHLFDDKVMKQLKRRRYTGWGRLSRKLINGIRDKQSGKTILDFLKSDGFANRNFMQLIHDDSLTFKEDIQKAQVSGQGDSLHEHIANLAGSPAIKKGILQTVKVVDELVKVMGRHKPENIVIEMARENQTTQKGQKNSRERMKRIEEGIKELGSQILKEHPVENTQLQNEKLYLYYLQNGRDMYVDQELDINRLSDYDVDHIVPQSFLKDDSIDNKVLTRSDKARGKSDNVPSEEVVKKMKNYWRQLLNAKLITQRKFDNLTKAERGGLSELDKAGFIKRQLVETRQITKHVAQILDSRMNTKYDENDKLIREVKVITLKSKLVSDFRKDFQFYKVREINNYHHAHDAYLNAVVGTALIKKYPKLESEFVYGDYKVYDVRKMIAKSEQEIGKATAKYFFYSNIMNFFKTEITLANGEIRKRPLIETNGETGEIVWDKGRDFATVRKVLSMPQVNIVKKTEVQTGGFSKESILPKRNSDKLIARKKDWDPKKYGGFDSPTVAYSVLVVAKVEKGKSKKLKSVKELLGITIMERSSFEKNPIDFLEAKGYKEVKKDLIIKLPKYSLFELENGRKRMLASAGELQKGNELALPSKYVNFLYLASHYEKLKGSPEDNEQKQLFVEQHKHYLDEIIEQISEFSKRVILADANLDKVLSAYNKHRDKPIREQAENIIHLFTLTNLGAPAAFKYFDTTIDRKRYTSTKEVLDATLIHQSITGLYETRIDLSQLGGDGGGGGGGSEAAAKGGTLGDQGSRGSDPLPEPRVTLTVEGIPTEFLVNTGAEHSVLTKPMGKMGSKRTVVAGATGSKVYPWTTKRLLKIGQKQVTHSFLVIPECPAPLLGRDLLTKLKAQIQFSTEGPQVTWEDRPAMCLVLNLEEEYRLHEKPVPPSIDPSWLQLFPMVWAEKAGMGLANQVPPVVVELKSDASPVAVRQYPMSKEAREGIRPHIQRFLDLGILVPCQSPWNTPLLPVKKPGTNDYRPVQDLREVNKRVQDIHPTVPNPYNLLSSLPPSHTWYSVLDLKDAFFCLKLHPNSQPLFAFEWRDPEKGNTGQLTWTRLPQGFKNSPTLFNEALHRDLASFRALNPQVVMLQYVDDLLVAAPTYRDCKEGTRRLLQELSKLGYRVSAKKAQLCREEVTYLGYLLKGGKRWLTPARKATVMKIPTPTTPRQVREFLGTAGFCRLWIPGFASLAAPLYPLTRPKVPFTWTEAHQEAFGRIKEALLSAPALALPDLTKPFALYVDEKEGVARGVLTQTLGPWRRPVAYLSKKLDPVASGWPTCLKAIAAVALLLKDADKLTLGQNVLVIAPHNLESIVRQPPDRWMTNARMTHYQSLLLNERVSFAPPAILNPATLLPVESDDTPIHICSEILAEETGTRPDLRDQPLPGVPAWYTDGSSFIMDGRRQAGAAIVDNKRTVWASNLPEGTSAQKAELIALTQALRLAEGKSINIYTDSRYAFATAHVHGAIYKQRGWLTSAGKDIKNKEEILALLEAIHLPKRVAIIHCPGHQRGTDPVATGNRKADEAAKQAAQSTRILTETTKNAGKRTADGSEFEKRTADGSEFESPKKKAKVE

SEQ ID NO: 6917 - protein, 2096 aa, synthetic construct
MPAAKRVKLDGGDKKYSIGLDIGTNSVGWAVITDEYKVPSKKFKVLGNTDRHSIKKNLIGALLFDSGETAEATRLKRTARRRYTRRKNRICYLQEIFSNEMAKVDDSFFHRLEESFLVEEDKKHERHPIFGNIVDEVAYHEKYPTIYHLRKKLVDSTDKADLRLIYLALAHMIKFRGHFLIEGDLNPDNSDVDKLFIQLVQTYNQLFEENPINASGVDAKAILSARLSKSRRLENLIAQLPGEKKNGLFGNLIALSLGLTPNFKSNFDLAEDAKLQLSKDTYDDDLDNLLAQIGDQYADLFLAAKNLSDAILLSDILRVNTEITKAPLSASMIKRYDEHHQDLTLLKALVRQQLPEKYKEIFFDQSKNGYAGYIDGGASQEEFYKFIKPILEKMDGTEELLVKLNREDLLRKQRTFDNGSIPHQIHLGELHAILRRQEDFYPFLKDNREKIEKILTFRIPYYVGPLARGNSRFAWMTRKSEETITPWNFEEVVDKGASAQSFIERMTNFDKNLPNEKVLPKHSLLYEYFTVYNELTKVKYVTEGMRKPAFLSGEQKKAIVDLLFKTNRKVTVKQLKEDYFKKIECFDSVEISGVEDRFNASLGTYHDLLKIIKDKDFLDNEENEDILEDIVLTLTLFEDREMIEERLKTYAHLFDDKVMKQLKRRRYTGWGRLSRKLINGIRDKQSGKTILDFLKSDGFANRNFMQLIHDDSLTFKEDIQKAQVSGQGDSLHEHIANLAGSPAIKKGILQTVKVVDELVKVMGRHKPENIVIEMARENQTTQKGQKNSRERMKRIEEGIKELGSQILKEHPVENTQLQNEKLYLYYLQNGRDMYVDQELDINRLSDYDVDHIVPQSFLKDDSIDNKVLTRSDKARGKSDNVPSEEVVKKMKNYWRQLLNAKLITQRKFDNLTKAERGGLSELDKAGFIKRQLVETRQITKHVAQILDSRMNTKYDENDKLIREVKVITLKSKLVSDFRKDFQFYKVREINNYHHAHDAYLNAVVGTALIKKYPKLESEFVYGDYKVYDVRKMIAKSEQEIGKATAKYFFYSNIMNFFKTEITLANGEIRKRPLIETNGETGEIVWDKGRDFATVRKVLSMPQVNIVKKTEVQTGGFSKESILPKRNSDKLIARKKDWDPKKYGGFDSPTVAYSVLVVAKVEKGKSKKLKSVKELLGITIMERSSFEKNPIDFLEAKGYKEVKKDLIIKLPKYSLFELENGRKRMLASAGELQKGNELALPSKYVNFLYLASHYEKLKGSPEDNEQKQLFVEQHKHYLDEIIEQISEFSKRVILADANLDKVLSAYNKHRDKPIREQAENIIHLFTLTNLGAPAAFKYFDTTIDRKRYTSTKEVLDATLIHQSITGLYETRIDLSQLGGDGGGGGGGSEAAAKGGTLNLEDEYRLYETSAEPEVSPGSTWLSDFPQAWAETGGMGLAVRQAPLIIPLKATSTPVSIKQYPMSQEAKLGIKPHIQRLLDQGILVPCQSPWNTPLLPVKKPGTNDYRPVQDLREVNKRVEDIHPTVPNPYNLLSGLPPSHRWYTVLDLKDAFFCLRLHPTSQPLFAFEWRDPGMGISGQLTWTRLPQGFKNSPTLFNEALHRDLADFRIQHPDLILLQYVDDILLAATSELDCQQGTRALLLTLGNLGYRASAKKAQLCQKQVKYLGYLLKEGQRWLTEARKETVMGQPTPKTPRQLREFLGTAGFCRLWIPGFAEMAAPLYPLTKPGTLFNWGPDQQKAYQEIKQALLTAPALGLPDLTKPFELFVDEKQGYAKGVLTQKLGPWRRPVAYLSKKLDPVAAGWPPCLRMVAAIAVLRKDAGKLTMGQPLVILAPHAVEALVKQPPDRWLSNARMTHYQAMLLDTDRVQFGPVVALNPATLLPLPEEGAPHDCLEILAETHGTRPDLTDQPIPDADHTWYTDGSSFLQEGQRKAGAAVTTETEVIWARALPAGTSAQRAELIALTQALKMAEGKRLNVYTDSRYAFATAHIHGEIYRRRGWLTSEGREIKNKSEILALLKALFLPKRLSIIHCLGHQKGDSAEARGNRLADQAAREAAIKTPPDTSTLLAGKRTADGSEFEKRTADGSEFESPKKKAKVE

SEQ ID NO: 6918 - protein, 2096 aa, synthetic construct
MPAAKRVKLDGGDKKYSIGLDIGTNSVGWAVITDEYKVPSKKFKVLGNTDRHSIKKNLIGALLFDSGETAEATRLKRTARRRYTRRKNRICYLQEIFSNEMAKVDDSFFHRLEESFLVEEDKKHERHPIFGNIVDEVAYHEKYPTIYHLRKKLVDSTDKADLRLIYLALAHMIKFRGHFLIEGDLNPDNSDVDKLFIQLVQTYNQLFEENPINASGVDAKAILSARLSKSRRLENLIAQLPGEKKNGLFGNLIALSLGLTPNFKSNFDLAEDAKLQLSKDTYDDDLDNLLAQIGDQYADLFLAAKNLSDAILLSDILRVNTEITKAPLSASMIKRYDEHHQDLTLLKALVRQQLPEKYKEIFFDQSKNGYAGYIDGGASQEEFYKFIKPILEKMDGTEELLVKLNREDLLRKQRTFDNGSIPHQIHLGELHAILRRQEDFYPFLKDNREKIEKILTFRIPYYVGPLARGNSRFAWMTRKSEETITPWNFEEVVDKGASAQSFIERMTNFDKNLPNEKVLPKHSLLYEYFTVYNELTKVKYVTEGMRKPAFLSGEQKKAIVDLLFKTNRKVTVKQLKEDYFKKIECFDSVEISGVEDRFNASLGTYHDLLKIIKDKDFLDNEENEDILEDIVLTLTLFEDREMIEERLKTYAHLFDDKVMKQLKRRRYTGWGRLSRKLINGIRDKQSGKTILDFLKSDGFANRNFMQLIHDDSLTFKEDIQKAQVSGQGDSLHEHIANLAGSPAIKKGILQTVKVVDELVKVMGRHKPENIVIEMARENQTTQKGQKNSRERMKRIEEGIKELGSQILKEHPVENTQLQNEKLYLYYLQNGRDMYVDQELDINRLSDYDVDHIVPQSFLKDDSIDNKVLTRSDKARGKSDNVPSEEVVKKMKNYWRQLLNAKLITQRKFDNLTKAERGGLSELDKAGFIKRQLVETRQITKHVAQILDSRMNTKYDENDKLIREVKVITLKSKLVSDFRKDFQFYKVREINNYHHAHDAYLNAVVGTALIKKYPKLESEFVYGDYKVYDVRKMIAKSEQEIGKATAKYFFYSNIMNFFKTEITLANGEIRKRPLIETNGETGEIVWDKGRDFATVRKVLSMPQVNIVKKTEVQTGGFSKESILPKRNSDKLIARKKDWDPKKYGGFDSPTVAYSVLVVAKVEKGKSKKLKSVKELLGITIMERSSFEKNPIDFLEAKGYKEVKKDLIIKLPKYSLFELENGRKRMLASAGELQKGNELALPSKYVNFLYLASHYEKLKGSPEDNEQKQLFVEQHKHYLDEIIEQISEFSKRVILADANLDKVLSAYNKHRDKPIREQAENIIHLFTLTNLGAPAAFKYFDTTIDRKRYTSTKEVLDATLIHQSITGLYETRIDLSQLGGDGGGGGGGSEAAAKGGTLNIEDEYRLHETSKGPDVPLGSTWLSDFPQAWAETGGMGLAFRQAPLIISLKATSTPVSIKQYPMSQEARLGIKPHIQRLLDQGILVPCQSPWNTPLLPVKKPGTNDYRPVQDLREVNKRVEDIHPTVPNPYNLLSGLPPSHQWYTVLDLKDAFFCLRLHPTSQSLFAFEWKDPEMGISGQLTWTRLPQGFKNSPTLFDEALHRDLADFRIQHPDLILLQYVDDLLLAATSELDCQQGTRALLQTLGDLGYRASAKKAQICQKQVKYLGYLLKEGQRWLTEARKETVMGQPTPKTPRQLREFLGTAGLCRLWIPGFAEMAAPLYPLTKTGTLFKWGPDQQKAYQEIKQALLTAPALGLPDLTKPFELFVDEKQGYAKGVLTQKLGPWRRPVAYLSKKLDPVAAGWPPCLRMVAAIAVLTKDVGKLTMGQPLVILAPHAVEALVKQPPDRWLSNARMTHYQALLLDTDRVQFGPIVALNPATLLPLPEEGLQHDCLDILAEAHGTRPDLTDQPLPDADHTWYTDGSSFLQEGQRRAGAAVTTETEVIWAKALPAGTSAQRAELIALTQALKMAAGKKLNVYTDSRYAFATAHIHGEIYRRRGLLTSEGKEIKNKDEILALLKALFLPKRLSIIHCPGHQKGNHAEARGNRMADQAAREVATRETPETSTLLAGKRTADGSEFEKRTADGSEFESPKKKAKVE

SEQ ID NO: 6919 - protein, 2096 aa, synthetic construct
MPAAKRVKLDGGDKKYSIGLDIGTNSVGWAVITDEYKVPSKKFKVLGNTDRHSIKKNLIGALLFDSGETAEATRLKRTARRRYTRRKNRICYLQEIFSNEMAKVDDSFFHRLEESFLVEEDKKHERHPIFGNIVDEVAYHEKYPTIYHLRKKLVDSTDKADLRLIYLALAHMIKFRGHFLIEGDLNPDNSDVDKLFIQLVQTYNQLFEENPINASGVDAKAILSARLSKSRRLENLIAQLPGEKKNGLFGNLIALSLGLTPNFKSNFDLAEDAKLQLSKDTYDDDLDNLLAQIGDQYADLFLAAKNLSDAILLSDILRVNTEITKAPLSASMIKRYDEHHQDLTLLKALVRQQLPEKYKEIFFDQSKNGYAGYIDGGASQEEFYKFIKPILEKMDGTEELLVKLNREDLLRKQRTFDNGSIPHQIHLGELHAILRRQEDFYPFLKDNREKIEKILTFRIPYYVGPLARGNSRFAWMTRKSEETITPWNFEEVVDKGASAQSFIERMTNFDKNLPNEKVLPKHSLLYEYFTVYNELTKVKYVTEGMRKPAFLSGEQKKAIVDLLFKTNRKVTVKQLKEDYFKKIECFDSVEISGVEDRFNASLGTYHDLLKIIKDKDFLDNEENEDILEDIVLTLTLFEDREMIEERLKTYAHLFDDKVMKQLKRRRYTGWGRLSRKLINGIRDKQSGKTILDFLKSDGFANRNFMQLIHDDSLTFKEDIQKAQVSGQGDSLHEHIANLAGSPAIKKGILQTVKVVDELVKVMGRHKPENIVIEMARENQTTQKGQKNSRERMKRIEEGIKELGSQILKEHPVENTQLQNEKLYLYYLQNGRDMYVDQELDINRLSDYDVDHIVPQSFLKDDSIDNKVLTRSDKARGKSDNVPSEEVVKKMKNYWRQLLNAKLITQRKFDNLTKAERGGLSELDKAGFIKRQLVETRQITKHVAQILDSRMNTKYDENDKLIREVKVITLKSKLVSDFRKDFQFYKVREINNYHHAHDAYLNAVVGTALIKKYPKLESEFVYGDYKVYDVRKMIAKSEQEIGKATAKYFFYSNIMNFFKTEITLANGEIRKRPLIETNGETGEIVWDKGRDFATVRKVLSMPQVNIVKKTEVQTGGFSKESILPKRNSDKLIARKKDWDPKKYGGFDSPTVAYSVLVVAKVEKGKSKKLKSVKELLGITIMERSSFEKNPIDFLEAKGYKEVKKDLIIKLPKYSLFELENGRKRMLASAGELQKGNELALPSKYVNFLYLASHYEKLKGSPEDNEQKQLFVEQHKHYLDEIIEQISEFSKRVILADANLDKVLSAYNKHRDKPIREQAENIIHLFTLTNLGAPAAFKYFDTTIDRKRYTSTKEVLDATLIHQSITGLYETRIDLSQLGGDGGGGGGGSEAAAKGGTLNIEDEYRLHETSKGPDVPLGSTWLSDFPQAWAETGGMGLAVRQAPLIIPLKATSTPVSIKQYPMSQEARLGIKPHIQRLLDQGILVPCQSPWNTPLLPVKKPGTNDYRPVQDLREVNKRVEDIHPTVPNPYNLLSGLPPSHQWYTVLDLKDAFFCLRLHPTSQSLFAFEWRDPEMGISGQLTWTRLPQGFKNSPTLFNEALHRDLADFRIQHPDLILLQYVDDLLLAATSELDCQQGTRALLQTLGDLGYRASAKKAQICQKQVKYLGYLLKEGQRWLTEARKETVMGQPTPKTPRQLREFLGTAGFCRLWIPGFAEMAAPLYPLTKPGTLFEWGPDQQKAYQEIKQALLTAPALGLPDLTKPFELFVDEKQGYAKGVLTQKLGPWRRPVAYLSKKLDPVAAGWPPCLRMVAAIAVLTKDAGKLTMGQPLVILAPHAVEALVKQPPDRWLSNARMTHYQALLLDTDRVQFGPIVALNPATLLPLPEEGLQHDCLDILAEAHGTRPDLTDQPLPDADHTWYTDGSSFLQEGQRKAGAAVTTETEVVWAKALPAGTSAQRAELIALTQALKMAEGKKLNVYTDSRYAFATAHIHGEIYRRRGWLTSEGKEIKNKDEILALLKALFLPKRLSIIHCPGHQKGNRAEARGNRMADQAAREVATRETPETSTLLAGKRTADGSEFEKRTADGSEFESPKKKAKVE

SEQ ID NO: 6920 - protein, 2090 aa, synthetic construct
MPAAKRVKLDGGDKKYSIGLDIGTNSVGWAVITDEYKVPSKKFKVLGNTDRHSIKKNLIGALLFDSGETAEATRLKRTARRRYTRRKNRICYLQEIFSNEMAKVDDSFFHRLEESFLVEEDKKHERHPIFGNIVDEVAYHEKYPTIYHLRKKLVDSTDKADLRLIYLALAHMIKFRGHFLIEGDLNPDNSDVDKLFIQLVQTYNQLFEENPINASGVDAKAILSARLSKSRRLENLIAQLPGEKKNGLFGNLIALSLGLTPNFKSNFDLAEDAKLQLSKDTYDDDLDNLLAQIGDQYADLFLAAKNLSDAILLSDILRVNTEITKAPLSASMIKRYDEHHQDLTLLKALVRQQLPEKYKEIFFDQSKNGYAGYIDGGASQEEFYKFIKPILEKMDGTEELLVKLNREDLLRKQRTFDNGSIPHQIHLGELHAILRRQEDFYPFLKDNREKIEKILTFRIPYYVGPLARGNSRFAWMTRKSEETITPWNFEEVVDKGASAQSFIERMTNFDKNLPNEKVLPKHSLLYEYFTVYNELTKVKYVTEGMRKPAFLSGEQKKAIVDLLFKTNRKVTVKQLKEDYFKKIECFDSVEISGVEDRFNASLGTYHDLLKIIKDKDFLDNEENEDILEDIVLTLTLFEDREMIEERLKTYAHLFDDKVMKQLKRRRYTGWGRLSRKLINGIRDKQSGKTILDFLKSDGFANRNFMQLIHDDSLTFKEDIQKAQVSGQGDSLHEHIANLAGSPAIKKGILQTVKVVDELVKVMGRHKPENIVIEMARENQTTQKGQKNSRERMKRIEEGIKELGSQILKEHPVENTQLQNEKLYLYYLQNGRDMYVDQELDINRLSDYDVDHIVPQSFLKDDSIDNKVLTRSDKARGKSDNVPSEEVVKKMKNYWRQLLNAKLITQRKFDNLTKAERGGLSELDKAGFIKRQLVETRQITKHVAQILDSRMNTKYDENDKLIREVKVITLKSKLVSDFRKDFQFYKVREINNYHHAHDAYLNAVVGTALIKKYPKLESEFVYGDYKVYDVRKMIAKSEQEIGKATAKYFFYSNIMNFFKTEITLANGEIRKRPLIETNGETGEIVWDKGRDFATVRKVLSMPQVNIVKKTEVQTGGFSKESILPKRNSDKLIARKKDWDPKKYGGFDSPTVAYSVLVVAKVEKGKSKKLKSVKELLGITIMERSSFEKNPIDFLEAKGYKEVKKDLIIKLPKYSLFELENGRKRMLASAGELQKGNELALPSKYVNFLYLASHYEKLKGSPEDNEQKQLFVEQHKHYLDEIIEQISEFSKRVILADANLDKVLSAYNKHRDKPIREQAENIIHLFTLTNLGAPAAFKYFDTTIDRKRYTSTKEVLDATLIHQSITGLYETRIDLSQLGGDGGGGGGGSEAAAKGGTLQLDDEYRLYSPLVKPDQNIQFWLEQFPQAWAETAGMGLAKQVPPQVIQLKASATPVSVRQYPLSKEAQEGIRPHVQRLIQQGILVPVQSPWNTPLLPVRKPGTNDYRPVQDLREVNKRVQDIHPTVPNPYNLLCALPPQRSWYTVLDLKDAFFCLRLHPTSQPLFAFEWRDPGTGRTGQLTWTRLPQGFKNSPTIFDEALHRDLANFRIQHPQVTLLQYVDDLLLAGATKQDCLEGTKALLLELSDLGYRASAKKAQICRREVTYLGYSLRDGQRWLTEARKKTVVQIPAPTTAKQVREFLGTAGFCRLWIPGFATLAAPLYPLTKEKGEFSWAPEHQKAFDAIKKALLSAPALALPDVTKPFTLYVDERKGVARGVLTQTLGPWRRPVAYLSKKLDPVASGWPVCLKAIAAVAILVKDADKLTLGQNITVIAPHALENIVRQPPDRWMTNARMTHYQSLLLTERVTFAPPAALNPATLLPEETDEPVTHDCHQLLIEETGVRKDLTDIPLTGEVLTWFTDGSSYVVEGKRMAGAAVVDGTRTIWASSLPEGTSAQKAELMALTQALRLAEGKSINIYTDSRYAFATAHVHGAIYKQRGLLTSAGREIKNKEEILSLLEALHLPKRLAIIHCPGHQKAKDPISRGNQMADRVAKQAAQGVNLLAGKRTADGSEFEKRTADGSEFESPKKKAKVE

SEQ ID NO: 6921 - protein, 2087 aa, synthetic construct
MPAAKRVKLDGGDKKYSIGLDIGTNSVGWAVITDEYKVPSKKFKVLGNTDRHSIKKNLIGALLFDSGETAEATRLKRTARRRYTRRKNRICYLQEIFSNEMAKVDDSFFHRLEESFLVEEDKKHERHPIFGNIVDEVAYHEKYPTIYHLRKKLVDSTDKADLRLIYLALAHMIKFRGHFLIEGDLNPDNSDVDKLFIQLVQTYNQLFEENPINASGVDAKAILSARLSKSRRLENLIAQLPGEKKNGLFGNLIALSLGLTPNFKSNFDLAEDAKLQLSKDTYDDDLDNLLAQIGDQYADLFLAAKNLSDAILLSDILRVNTEITKAPLSASMIKRYDEHHQDLTLLKALVRQQLPEKYKEIFFDQSKNGYAGYIDGGASQEEFYKFIKPILEKMDGTEELLVKLNREDLLRKQRTFDNGSIPHQIHLGELHAILRRQEDFYPFLKDNREKIEKILTFRIPYYVGPLARGNSRFAWMTRKSEETITPWNFEEVVDKGASAQSFIERMTNFDKNLPNEKVLPKHSLLYEYFTVYNELTKVKYVTEGMRKPAFLSGEQKKAIVDLLFKTNRKVTVKQLKEDYFKKIECFDSVEISGVEDRFNASLGTYHDLLKIIKDKDFLDNEENEDILEDIVLTLTLFEDREMIEERLKTYAHLFDDKVMKQLKRRRYTGWGRLSRKLINGIRDKQSGKTILDFLKSDGFANRNFMQLIHDDSLTFKEDIQKAQVSGQGDSLHEHIANLAGSPAIKKGILQTVKVVDELVKVMGRHKPENIVIEMARENQTTQKGQKNSRERMKRIEEGIKELGSQILKEHPVENTQLQNEKLYLYYLQNGRDMYVDQELDINRLSDYDVDHIVPQSFLKDDSIDNKVLTRSDKARGKSDNVPSEEVVKKMKNYWRQLLNAKLITQRKFDNLTKAERGGLSELDKAGFIKRQLVETRQITKHVAQILDSRMNTKYDENDKLIREVKVITLKSKLVSDFRKDFQFYKVREINNYHHAHDAYLNAVVGTALIKKYPKLESEFVYGDYKVYDVRKMIAKSEQEIGKATAKYFFYSNIMNFFKTEITLANGEIRKRPLIETNGETGEIVWDKGRDFATVRKVLSMPQVNIVKKTEVQTGGFSKESILPKRNSDKLIARKKDWDPKKYGGFDSPTVAYSVLVVAKVEKGKSKKLKSVKELLGITIMERSSFEKNPIDFLEAKGYKEVKKDLIIKLPKYSLFELENGRKRMLASAGELQKGNELALPSKYVNFLYLASHYEKLKGSPEDNEQKQLFVEQHKHYLDEIIEQISEFSKRVILADANLDKVLSAYNKHRDKPIREQAENIIHLFTLTNLGAPAAFKYFDTTIDRKRYTSTKEVLDATLIHQSITGLYETRIDLSQLGGDGGGGGGGSEAAAKGGVPWLMKKPLQLTVLVPLHEYQERLLQQTALPKEQKELLQKLFLKYDALWQHWENQVGHRRIKPHNIATGTLAPRPQKQYPINPKAKPSIQIVIDDLLKQGVLIQQNSTMNTPVYPVPKPDGKWRMVLDYREVNKTIPLIAAQNQHSAGILSSIYRGKYKTTLDLTNGFWAHPITPESYWLTAFTWQGKQYCWTRLPQGFLNSPALFTADVVDLLKEIPNVQAYVDDIYISHDDPQEHLEQLEKIFSILLNAGYVVSLKKSEIAQREVEFLGFNITKEGRGLTDTFKQKLLNITPPKDLKQLQSILGLLNFARNFIPNYSELVKPLYTIVANANGKFISWTEDNSNQLQHIISVLNQADNLEERNPETRLIIKVNSSPSAGYIRYYNEGSKRPIMYVNYIFSKAEAKFTQTEKLLTTMHKGLIKAMDLAMGQEILVYSPIVSMTKIQRTPLPERKALPVRWITWMTYLEDPRIQFHYDKSLPELQQIPNVTEDVIAKTKHPSEFAMVFYTDGSAIKHPDVNKSHSAGMGIAQVQFIPEYKIVHQWSIPLGDHTAQLAEIAAVEFACKKALKISGPVLIVTDSFYVAESANKELPYWKSNGFLNNKKKPLRHVSKWKSIAECLQLKPDIIIMHEKGHQQPMTTLHTEGNNLADKLATQGSYVVHAGKRTADGSEFEKRTADGSEFESPKKKAKVE

SEQ ID NO: 6922 - protein, 2087 aa, synthetic construct
MPAAKRVKLDGGDKKYSIGLDIGTNSVGWAVITDEYKVPSKKFKVLGNTDRHSIKKNLIGALLFDSGETAEATRLKRTARRRYTRRKNRICYLQEIFSNEMAKVDDSFFHRLEESFLVEEDKKHERHPIFGNIVDEVAYHEKYPTIYHLRKKLVDSTDKADLRLIYLALAHMIKFRGHFLIEGDLNPDNSDVDKLFIQLVQTYNQLFEENPINASGVDAKAILSARLSKSRRLENLIAQLPGEKKNGLFGNLIALSLGLTPNFKSNFDLAEDAKLQLSKDTYDDDLDNLLAQIGDQYADLFLAAKNLSDAILLSDILRVNTEITKAPLSASMIKRYDEHHQDLTLLKALVRQQLPEKYKEIFFDQSKNGYAGYIDGGASQEEFYKFIKPILEKMDGTEELLVKLNREDLLRKQRTFDNGSIPHQIHLGELHAILRRQEDFYPFLKDNREKIEKILTFRIPYYVGPLARGNSRFAWMTRKSEETITPWNFEEVVDKGASAQSFIERMTNFDKNLPNEKVLPKHSLLYEYFTVYNELTKVKYVTEGMRKPAFLSGEQKKAIVDLLFKTNRKVTVKQLKEDYFKKIECFDSVEISGVEDRFNASLGTYHDLLKIIKDKDFLDNEENEDILEDIVLTLTLFEDREMIEERLKTYAHLFDDKVMKQLKRRRYTGWGRLSRKLINGIRDKQSGKTILDFLKSDGFANRNFMQLIHDDSLTFKEDIQKAQVSGQGDSLHEHIANLAGSPAIKKGILQTVKVVDELVKVMGRHKPENIVIEMARENQTTQKGQKNSRERMKRIEEGIKELGSQILKEHPVENTQLQNEKLYLYYLQNGRDMYVDQELDINRLSDYDVDHIVPQSFLKDDSIDNKVLTRSDKARGKSDNVPSEEVVKKMKNYWRQLLNAKLITQRKFDNLTKAERGGLSELDKAGFIKRQLVETRQITKHVAQILDSRMNTKYDENDKLIREVKVITLKSKLVSDFRKDFQFYKVREINNYHHAHDAYLNAVVGTALIKKYPKLESEFVYGDYKVYDVRKMIAKSEQEIGKATAKYFFYSNIMNFFKTEITLANGEIRKRPLIETNGETGEIVWDKGRDFATVRKVLSMPQVNIVKKTEVQTGGFSKESILPKRNSDKLIARKKDWDPKKYGGFDSPTVAYSVLVVAKVEKGKSKKLKSVKELLGITIMERSSFEKNPIDFLEAKGYKEVKKDLIIKLPKYSLFELENGRKRMLASAGELQKGNELALPSKYVNFLYLASHYEKLKGSPEDNEQKQLFVEQHKHYLDEIIEQISEFSKRVILADANLDKVLSAYNKHRDKPIREQAENIIHLFTLTNLGAPAAFKYFDTTIDRKRYTSTKEVLDATLIHQSITGLYETRIDLSQLGGDGGGGGGGSEAAAKGGVPWLMKKPLQLTVLVPLHEYQERLLQQTALPKEQKELLQKLFLKYDALWQHWENQVGHRRIKPHNIATGTLAPRPQKQYPINPKAKPSIQIVIDDLLKQGVLIQQNSTMNTPVYPVPKPDGKWRMVLDYREVNKTIPLIAAQNQHSAGILSSIYRGKYKTTLDLTNGFWAHPITPESYWLTAFTWQGKQYCWTRLPQGFLNSPALFNADVVDLLKEIPNVQAYVDDIYISHDDPQEHLEQLEKIFSILLNAGYVVSLKKSEIAQREVEFLGFNITKEGRGLTDTFKQKLLNITPPKDLKQLQSILGLLNFARNFIPNYSELVKPLYTIVAPANGKFISWTEDNSNQLQHIISVLNQADNLEERNPETRLIIKVNSSPSAGYIRYYNEGSKRPIMYVNYIFSKAEAKFTQTEKLLTTMHKGLIKAMDLAMGQEILVYSPIVSMTKIQRTPLPERKALPVRWITWMTYLEDPRIQFHYDKSLPELQQIPNVTEDVIAKTKHPSEFAMVFYTDGSAIKHPDVNKSHSAGMGIAQVQFIPEYKIVHQWSIPLGDHTAQLAEIAAVEFACKKALKISGPVLIVTDSFYVAESANKELPYWKSNGFLNNKKKPLRHVSKWKSIAECLQLKPDIIIMHEKGHQQPMTTLHTEGNNLADKLATQGSYVVHAGKRTADGSEFEKRTADGSEFESPKKKAKVE

SEQ ID NO: 6923 - protein, 2087 aa, synthetic construct
MPAAKRVKLDGGDKKYSIGLDIGTNSVGWAVITDEYKVPSKKFKVLGNTDRHSIKKNLIGALLFDSGETAEATRLKRTARRRYTRRKNRICYLQEIFSNEMAKVDDSFFHRLEESFLVEEDKKHERHPIFGNIVDEVAYHEKYPTIYHLRKKLVDSTDKADLRLIYLALAHMIKFRGHFLIEGDLNPDNSDVDKLFIQLVQTYNQLFEENPINASGVDAKAILSARLSKSRRLENLIAQLPGEKKNGLFGNLIALSLGLTPNFKSNFDLAEDAKLQLSKDTYDDDLDNLLAQIGDQYADLFLAAKNLSDAILLSDILRVNTEITKAPLSASMIKRYDEHHQDLTLLKALVRQQLPEKYKEIFFDQSKNGYAGYIDGGASQEEFYKFIKPILEKMDGTEELLVKLNREDLLRKQRTFDNGSIPHQIHLGELHAILRRQEDFYPFLKDNREKIEKILTFRIPYYVGPLARGNSRFAWMTRKSEETITPWNFEEVVDKGASAQSFIERMTNFDKNLPNEKVLPKHSLLYEYFTVYNELTKVKYVTEGMRKPAFLSGEQKKAIVDLLFKTNRKVTVKQLKEDYFKKIECFDSVEISGVEDRFNASLGTYHDLLKIIKDKDFLDNEENEDILEDIVLTLTLFEDREMIEERLKTYAHLFDDKVMKQLKRRRYTGWGRLSRKLINGIRDKQSGKTILDFLKSDGFANRNFMQLIHDDSLTFKEDIQKAQVSGQGDSLHEHIANLAGSPAIKKGILQTVKVVDELVKVMGRHKPENIVIEMARENQTTQKGQKNSRERMKRIEEGIKELGSQILKEHPVENTQLQNEKLYLYYLQNGRDMYVDQELDINRLSDYDVDHIVPQSFLKDDSIDNKVLTRSDKARGKSDNVPSEEVVKKMKNYWRQLLNAKLITQRKFDNLTKAERGGLSELDKAGFIKRQLVETRQITKHVAQILDSRMNTKYDENDKLIREVKVITLKSKLVSDFRKDFQFYKVREINNYHHAHDAYLNAVVGTALIKKYPKLESEFVYGDYKVYDVRKMIAKSEQEIGKATAKYFFYSNIMNFFKTEITLANGEIRKRPLIETNGETGEIVWDKGRDFATVRKVLSMPQVNIVKKTEVQTGGFSKESILPKRNSDKLIARKKDWDPKKYGGFDSPTVAYSVLVVAKVEKGKSKKLKSVKELLGITIMERSSFEKNPIDFLEAKGYKEVKKDLIIKLPKYSLFELENGRKRMLASAGELQKGNELALPSKYVNFLYLASHYEKLKGSPEDNEQKQLFVEQHKHYLDEIIEQISEFSKRVILADANLDKVLSAYNKHRDKPIREQAENIIHLFTLTNLGAPAAFKYFDTTIDRKRYTSTKEVLDATLIHQSITGLYETRIDLSQLGGDGGGGGGGSEAAAKGGIPWLMKKPLQLTTLVPLQEYEERLLKQTMLTGSYKEKLQSLFLKYDALWQHWENQVGHRRIKPHHIATGTVNPRPQKQYPINPKAKASIQTVINDLLKQGVLIQQNSIMNTPVYPVPKPDGKWRMVLDYREVNKTIPLIAAQNQHSAGILSSIFRGKYKTTLDLSNGFWAHSITPESYWLTAFTWLGQQYCWTRLPQGFLNSPALFNADVVDLLKEVPNVQVYVDDIYISHDDPREHLEQLEKVFSLLLNAGYVVSLKKSEIAQHEVEFLGFNITKEGRGLTETFKQKLLNITPPRDLKQLQSILGKLNFARNFIPNFSELVKPLYNIIATAPGKYITWTTDNSQQLQNIISMLNSAENLEERNPEVRLIMKVNTSPSAGYIRFYNEFAKRPIMYLNYVYTKAEVKFTNTEKLLTTIHKGLIKALDLGMGQEILVYSPIVSMTKIQKTPLPERKALPIRWITWMSYLEDPRIQFHYDKTLPELQQVPTVTDDIIAKIKHPSEFSMVFYTDGSAIKHPNVNKSHNAGMGIAQVQFKPEFTVINTWSIPLGDHTAQLAEVAAVEFACKKALKIDGPVLIVTDSFYVAESVNKELPYWQSNGFFNNKKKPLKHVSKWKSIADCIQLKPDIIIIHEKGHQPTASTFHTEGNNLADKLATQGSYVVNAGKRTADGSEFEKRTADGSEFESPKKKAKVE

SEQ ID NO: 6924 - protein, 2094 aa, synthetic construct
MPAAKRVKLDGGDKKYSIGLDIGTNSVGWAVITDEYKVPSKKFKVLGNTDRHSIKKNLIGALLFDSGETAEATRLKRTARRRYTRRKNRICYLQEIFSNEMAKVDDSFFHRLEESFLVEEDKKHERHPIFGNIVDEVAYHEKYPTIYHLRKKLVDSTDKADLRLIYLALAHMIKFRGHFLIEGDLNPDNSDVDKLFIQLVQTYNQLFEENPINASGVDAKAILSARLSKSRRLENLIAQLPGEKKNGLFGNLIALSLGLTPNFKSNFDLAEDAKLQLSKDTYDDDLDNLLAQIGDQYADLFLAAKNLSDAILLSDILRVNTEITKAPLSASMIKRYDEHHQDLTLLKALVRQQLPEKYKEIFFDQSKNGYAGYIDGGASQEEFYKFIKPILEKMDGTEELLVKLNREDLLRKQRTFDNGSIPHQIHLGELHAILRRQEDFYPFLKDNREKIEKILTFRIPYYVGPLARGNSRFAWMTRKSEETITPWNFEEVVDKGASAQSFIERMTNFDKNLPNEKVLPKHSLLYEYFTVYNELTKVKYVTEGMRKPAFLSGEQKKAIVDLLFKTNRKVTVKQLKEDYFKKIECFDSVEISGVEDRFNASLGTYHDLLKIIKDKDFLDNEENEDILEDIVLTLTLFEDREMIEERLKTYAHLFDDKVMKQLKRRRYTGWGRLSRKLINGIRDKQSGKTILDFLKSDGFANRNFMQLIHDDSLTFKEDIQKAQVSGQGDSLHEHIANLAGSPAIKKGILQTVKVVDELVKVMGRHKPENIVIEMARENQTTQKGQKNSRERMKRIEEGIKELGSQILKEHPVENTQLQNEKLYLYYLQNGRDMYVDQELDINRLSDYDVDHIVPQSFLKDDSIDNKVLTRSDKARGKSDNVPSEEVVKKMKNYWRQLLNAKLITQRKFDNLTKAERGGLSELDKAGFIKRQLVETRQITKHVAQILDSRMNTKYDENDKLIREVKVITLKSKLVSDFRKDFQFYKVREINNYHHAHDAYLNAVVGTALIKKYPKLESEFVYGDYKVYDVRKMIAKSEQEIGKATAKYFFYSNIMNFFKTEITLANGEIRKRPLIETNGETGEIVWDKGRDFATVRKVLSMPQVNIVKKTEVQTGGFSKESILPKRNSDKLIARKKDWDPKKYGGFDSPTVAYSVLVVAKVEKGKSKKLKSVKELLGITIMERSSFEKNPIDFLEAKGYKEVKKDLIIKLPKYSLFELENGRKRMLASAGELQKGNELALPSKYVNFLYLASHYEKLKGSPEDNEQKQLFVEQHKHYLDEIIEQISEFSKRVILADANLDKVLSAYNKHRDKPIREQAENIIHLFTLTNLGAPAAFKYFDTTIDRKRYTSTKEVLDATLIHQSITGLYETRIDLSQLGGDGGGGGGGSEAAAKGGVLNLEEEYRLHEKPVPSSIDPSWLQLFPTVWAERAGMGLANQVPPVVVELRSGASPVAVRQYPMSKEAREGIRPHIQRFLDLGVLVPCQSPWNTPLLPVKKPGTNDYRPVQDLREINKRVQDIHPTVPNPYNLLSSLPPSHTWYSVLDLKDAFFCLKLHPNSQPLFAFEWRDPEKGNTGQLTWTRLPQGFKNSPTLFNEALHRDLAPFRALNPQVVLLQYVDDLLVAAPTYRDCKEGTQKLLQELSKLGYRVSAKKAQLCQKEVTYLGYLLKEGKRWLTPARKATVMKIPPPTTPRQVREFLGKAGFCRLFIPGFASLAAPLYPLTKPSIPFIWTEEHQKAFDRIKEALLSAPALALPDLTKPFTLYVDERAGVARGVLTQTLGPWRRPVAYLSKKLDPVASGWPTCLKAVAAVALLLKDADKLTLGQNVTVIASHSLESIVRQPPDRWMTNARMTHYQSLLLNERVSFAPPAVLNPATLLPVESEATPVHRCSEILAEETGTRRDLKDQPLPGVPAWYTDGSSFIAEGKRRAGAAIVDGKRTVWASSLPEGTSAQKAELVALTQALRLAEGKDINIYTDSRYAFATAHIHGAIYKQRGWLTSAGKDIKNKEEILALLEAIHLPKRVAIIHCPGHQKGNDPVATGNRRADEAAKQAALSTRVLAETTKPAGKRTADGSEFEKRTADGSEFESPKKKAKVE

SEQ ID NO: 6925 - protein, 2096 aa, synthetic construct; identical to SEQ ID NO: 4519

SEQ ID NO: 6926 - protein, 2095 aa, synthetic construct
MPAAKRVKLDGGDKKYSIGLDIGTNSVGWAVITDEYKVPSKKFKVLGNTDRHSIKKNLIGALLFDSGETAEATRLKRTARRRYTRRKNRICYLQEIFSNEMAKVDDSFFHRLEESFLVEEDKKHERHPIFGNIVDEVAYHEKYPTIYHLRKKLVDSTDKADLRLIYLALAHMIKFRGHFLIEGDLNPDNSDVDKLFIQLVQTYNQLFEENPINASGVDAKAILSARLSKSRRLENLIAQLPGEKKNGLFGNLIALSLGLTPNFKSNFDLAEDAKLQLSKDTYDDDLDNLLAQIGDQYADLFLAAKNLSDAILLSDILRVNTEITKAPLSASMIKRYDEHHQDLTLLKALVRQQLPEKYKEIFFDQSKNGYAGYIDGGASQEEFYKFIKPILEKMDGTEELLVKLNREDLLRKQRTFDNGSIPHQIHLGELHAILRRQEDFYPFLKDNREKIEKILTFRIPYYVGPLARGNSRFAWMTRKSEETITPWNFEEVVDKGASAQSFIERMTNFDKNLPNEKVLPKHSLLYEYFTVYNELTKVKYVTEGMRKPAFLSGEQKKAIVDLLFKTNRKVTVKQLKEDYFKKIECFDSVEISGVEDRFNASLGTYHDLLKIIKDKDFLDNEENEDILEDIVLTLTLFEDREMIEERLKTYAHLFDDKVMKQLKRRRYTGWGRLSRKLINGIRDKQSGKTILDFLKSDGFANRNFMQLIHDDSLTFKEDIQKAQVSGQGDSLHEHIANLAGSPAIKKGILQTVKVVDELVKVMGRHKPENIVIEMARENQTTQKGQKNSRERMKRIEEGIKELGSQILKEHPVENTQLQNEKLYLYYLQNGRDMYVDQELDINRLSDYDVDHIVPQSFLKDDSIDNKVLTRSDKARGKSDNVPSEEVVKKMKNYWRQLLNAKLITQRKFDNLTKAERGGLSELDKAGFIKRQLVETRQITKHVAQILDSRMNTKYDENDKLIREVKVITLKSKLVSDFRKDFQFYKVREINNYHHAHDAYLNAVVGTALIKKYPKLESEFVYGDYKVYDVRKMIAKSEQEIGKATAKYFFYSNIMNFFKTEITLANGEIRKRPLIETNGETGEIVWDKGRDFATVRKVLSMPQVNIVKKTEVQTGGFSKESILPKRNSDKLIARKKDWDPKKYGGFDSPTVAYSVLVVAKVEKGKSKKLKSVKELLGITIMERSSFEKNPIDFLEAKGYKEVKKDLIIKLPKYSLFELENGRKRMLASAGELQKGNELALPSKYVNFLYLASHYEKLKGSPEDNEQKQLFVEQHKHYLDEIIEQISEFSKRVILADANLDKVLSAYNKHRDKPIREQAENIIHLFTLTNLGAPAAFKYFDTTIDRKRYTSTKEVLDATLIHQSITGLYETRIDLSQLGGDGGGGGEAAAKGGSGGTLQLEEEYRLFEPESTQKQEMDIWLKNFPQAWAETGGMGTAHCQAPVLIQLKATATPISIRQYPMPHEAYQGIKPHIRRMLDQGILKPCQSPWNTPLLPVKKPGTEDYRPVQDLREVNKRVEDIHPTVPNPYNLLSTLPPSHPWYTVLDLKDAFFCLRLHSESQLLFAFEWRDPEIGLSGQLTWTRLPQGFKNSPTLFNEALHSDLADFRVRYPALVLLQYVDDLLLAAATRTECLEGTKALLETLGNKGYRASAKKAQICLQEVTYLGYSLKDGQRWLTKARKEAILSIPVPKNSRQVREFLGTAGYCRLWIPGFAELAAPLYPLTRPGTLFQWGTEQQLAFEDIKKALLSSPALGLPDITKPFELFIDENSGFAKGVLVQKLGPWKRPVAYLSKKLDTVASGWPPCLRMVAAIAILVKDAGKLTLGQPLTILTSHPVEALVRQPPNKWLSNARMTHYQAMLLDAERVHFGPTVSLNPATLLPLPSGGNHHDCLQILAETHGTRPDLTDQPLPDADLTWYTDGSSFIRNGEREAGAAVTTESEVIWAAPLPPGTSAQRAELIALTQALKMAEGKKLTVYTDSRYAFATTHVHGEIYRRRGWLTSEGKEIKNKNEILALLEALFLPKRLSIIHCPGHQKGDSPQAKGNRLADDTAKKAATETHSSLTVLPAGKRTADGSEFEKRTADGSEFESPKKKAKVE

SEQ ID NO: 6927 - protein, 2094 aa, synthetic construct
MPAAKRVKLDGGDKKYSIGLDIGTNSVGWAVITDEYKVPSKKFKVLGNTDRHSIKKNLIGALLFDSGETAEATRLKRTARRRYTRRKNRICYLQEIFSNEMAKVDDSFFHRLEESFLVEEDKKHERHPIFGNIVDEVAYHEKYPTIYHLRKKLVDSTDKADLRLIYLALAHMIKFRGHFLIEGDLNPDNSDVDKLFIQLVQTYNQLFEENPINASGVDAKAILSARLSKSRRLENLIAQLPGEKKNGLFGNLIALSLGLTPNFKSNFDLAEDAKLQLSKDTYDDDLDNLLAQIGDQYADLFLAAKNLSDAILLSDILRVNTEITKAPLSASMIKRYDEHHQDLTLLKALVRQQLPEKYKEIFFDQSKNGYAGYIDGGASQEEFYKFIKPILEKMDGTEELLVKLNREDLLRKQRTFDNGSIPHQIHLGELHAILRRQEDFYPFLKDNREKIEKILTFRIPYYVGPLARGNSRFAWMTRKSEETITPWNFEEVVDKGASAQSFIERMTNFDKNLPNEKVLPKHSLLYEYFTVYNELTKVKYVTEGMRKPAFLSGEQKKAIVDLLFKTNRKVTVKQLKEDYFKKIECFDSVEISGVEDRFNASLGTYHDLLKIIKDKDFLDNEENEDILEDIVLTLTLFEDREMIEERLKTYAHLFDDKVMKQLKRRRYTGWGRLSRKLINGIRDKQSGKTILDFLKSDGFANRNFMQLIHDDSLTFKEDIQKAQVSGQGDSLHEHIANLAGSPAIKKGILQTVKVVDELVKVMGRHKPENIVIEMARENQTTQKGQKNSRERMKRIEEGIKELGSQILKEHPVENTQLQNEKLYLYYLQNGRDMYVDQELDINRLSDYDVDHIVPQSFLKDDSIDNKVLTRSDKARGKSDNVPSEEVVKKMKNYWRQLLNAKLITQRKFDNLTKAERGGLSELDKAGFIKRQLVETRQITKHVAQILDSRMNTKYDENDKLIREVKVITLKSKLVSDFRKDFQFYKVREINNYHHAHDAYLNAVVGTALIKKYPKLESEFVYGDYKVYDVRKMIAKSEQEIGKATAKYFFYSNIMNFFKTEITLANGEIRKRPLIETNGETGEIVWDKGRDFATVRKVLSMPQVNIVKKTEVQTGGFSKESILPKRNSDKLIARKKDWDPKKYGGFDSPTVAYSVLVVAKVEKGKSKKLKSVKELLGITIMERSSFEKNPIDFLEAKGYKEVKKDLIIKLPKYSLFELENGRKRMLASAGELQKGNELALPSKYVNFLYLASHYEKLKGSPEDNEQKQLFVEQHKHYLDEIIEQISEFSKRVILADANLDKVLSAYNKHRDKPIREQAENIIHLFTLTNLGAPAAFKYFDTTIDRKRYTSTKEVLDATLIHQSITGLYETRIDLSQLGGDGGGGGEAAAKGGSGGVLNLEEEYRLHEKPVPSSIDPSWLQLFPTVWAERAGMGLANQVPPVVVELRSGASPVAVRQYPMSKEAREGIRPHIQKFLDLGVLVPCRSPWNTPLLPVKKPGTNDYRPVQDLREINKRVQDIHPTVPNPYNLLSSLPPSYTWYSVLDLKDAFFCLRLHPNSQPLFAFEWKDPEKGNTGQLTWTRLPQGFKNSPTLFNEALHRDLAPFRALNPQVVLLQYVDDLLVAAPTYEDCKKGTQKLLQELSKLGYRVSAKKAQLCQREVTYLGYLLKEGKRWLTPARKATVMKIPVPTTPRQVREFLGKAGFCRLFIPGFASLAAPLYPLTKPSIPFIWTEEHQQAFDHIKKALLSAPALALPDLTKPFTLYIDERAGVARGVLTQTLGPWRRPVAYLSKKLDPVASGWPTCLKAVAAVALLLKDADKLTLGQNVTVIASHSLESIVRQPPDRWMTNARMTHYQSLLLNERVSFAPPAVLNPATLLPVESEATPVHRCSEILAEETGTRRDLEDQPLPGVPTWYTDGSSFITEGKRRAGAPIVDGKRTVWASSLPEGTSAQKAELVALTQALRLAEGKNINIYTDSRYAFATAHIHGAIYKQRGWLTSAGKDIKNKEEILALLEAIHLPRRVAIIHCPGHQRGSNPVATGNRRADEAAKQAALSTRVLAGTTKPAGKRTADGSEFEKRTADGSEFESPKKKAKVE

SEQ ID NO: 6928 - protein, 2218 aa, synthetic construct
MPAAKRVKLDGGDKKYSIGLDIGTNSVGWAVITDEYKVPSKKFKVLGNTDRHSIKKNLIGALLFDSGETAEATRLKRTARRRYTRRKNRICYLQEIFSNEMAKVDDSFFHRLEESFLVEEDKKHERHPIFGNIVDEVAYHEKYPTIYHLRKKLVDSTDKADLRLIYLALAHMIKFRGHFLIEGDLNPDNSDVDKLFIQLVQTYNQLFEENPINASGVDAKAILSARLSKSRRLENLIAQLPGEKKNGLFGNLIALSLGLTPNFKSNFDLAEDAKLQLSKDTYDDDLDNLLAQIGDQYADLFLAAKNLSDAILLSDILRVNTEITKAPLSASMIKRYDEHHQDLTLLKALVRQQLPEKYKEIFFDQSKNGYAGYIDGGASQEEFYKFIKPILEKMDGTEELLVKLNREDLLRKQRTFDNGSIPHQIHLGELHAILRRQEDFYPFLKDNREKIEKILTFRIPYYVGPLARGNSRFAWMTRKSEETITPWNFEEVVDKGASAQSFIERMTNFDKNLPNEKVLPKHSLLYEYFTVYNELTKVKYVTEGMRKPAFLSGEQKKAIVDLLFKTNRKVTVKQLKEDYFKKIECFDSVEISGVEDRFNASLGTYHDLLKIIKDKDFLDNEENEDILEDIVLTLTLFEDREMIEERLKTYAHLFDDKVMKQLKRRRYTGWGRLSRKLINGIRDKQSGKTILDFLKSDGFANRNFMQLIHDDSLTFKEDIQKAQVSGQGDSLHEHIANLAGSPAIKKGILQTVKVVDELVKVMGRHKPENIVIEMARENQTTQKGQKNSRERMKRIEEGIKELGSQILKEHPVENTQLQNEKLYLYYLQNGRDMYVDQELDINRLSDYDVDHIVPQSFLKDDSIDNKVLTRSDKARGKSDNVPSEEVVKKMKNYWRQLLNAKLITQRKFDNLTKAERGGLSELDKAGFIKRQLVETRQITKHVAQILDSRMNTKYDENDKLIREVKVITLKSKLVSDFRKDFQFYKVREINNYHHAHDAYLNAVVGTALIKKYPKLESEFVYGDYKVYDVRKMIAKSEQEIGKATAKYFFYSNIMNFFKTEITLANGEIRKRPLIETNGETGEIVWDKGRDFATVRKVLSMPQVNIVKKTEVQTGGFSKESILPKRNSDKLIARKKDWDPKKYGGFDSPTVAYSVLVVAKVEKGKSKKLKSVKELLGITIMERSSFEKNPIDFLEAKGYKEVKKDLIIKLPKYSLFELENGRKRMLASAGELQKGNELALPSKYVNFLYLASHYEKLKGSPEDNEQKQLFVEQHKHYLDEIIEQISEFSKRVILADANLDKVLSAYNKHRDKPIREQAENIIHLFTLTNLGAPAAFKYFDTTIDRKRYTSTKEVLDATLIHQSITGLYETRIDLSQLGGDGGGGGEAAAKGGSGGTLGDQGSRGSDPLPEPRVTLTVEGIPTEFLVNTGAEHSVLTKPMGKMGSKRTVVAGATGSKVYPWTTKRLLKIGQKQVTHSFLVIPECPAPLLGRDLLTKLKAQIQFSTEGPQVTWEDRPAMCLVLNLEEEYRLHEKPVPPSIDPSWLQLFPMVWAEKAGMGLANQVPPVVVELKSDASPVAVRQYPMSKEAREGIRPHIQRFLDLGILVPCQSPWNTPLLPVKKPGTNDYRPVQDLREVNKRVQDIHPTVPNPYNLLSSLPPSHTWYSVLDLKDAFFCLKLHPNSQPLFAFEWRDPEKGNTGQLTWTRLPQGFKNSPTLFNEALHRDLASFRALNPQVVMLQYVDDLLVAAPTYRDCKEGTRRLLQELSKLGYRVSAKKAQLCREEVTYLGYLLKGGKRWLTPARKATVMKIPTPTTPRQVREFLGTAGFCRLWIPGFASLAAPLYPLTRPKVPFTWTEAHQEAFGRIKEALLSAPALALPDLTKPFALYVDEKEGVARGVLTQTLGPWRRPVAYLSKKLDPVASGWPTCLKAIAAVALLLKDADKLTLGQNVLVIAPHNLESIVRQPPDRWMTNARMTHYQSLLLNERVSFAPPAILNPATLLPVESDDTPIHICSEILAEETGTRPDLRDQPLPGVPAWYTDGSSFIMDGRRQAGAAIVDNKRTVWASNLPEGTSAQKAELIALTQALRLAEGKSINIYTDSRYAFATAHVHGAIYKQRGWLTSAGKDIKNKEEILALLEAIHLPKRVAIIHCPGHQRGTDPVATGNRKADEAAKQAAQSTRILTETTKNAGKRTADGSEFEKRTADGSEFESPKKKAKVE

SEQ ID NO: 6929 - protein, 2096 aa, synthetic construct
MPAAKRVKLDGGDKKYSIGLDIGTNSVGWAVITDEYKVPSKKFKVLGNTDRHSIKKNLIGALLFDSGETAEATRLKRTARRRYTRRKNRICYLQEIFSNEMAKVDDSFFHRLEESFLVEEDKKHERHPIFGNIVDEVAYHEKYPTIYHLRKKLVDSTDKADLRLIYLALAHMIKFRGHFLIEGDLNPDNSDVDKLFIQLVQTYNQLFEENPINASGVDAKAILSARLSKSRRLENLIAQLPGEKKNGLFGNLIALSLGLTPNFKSNFDLAEDAKLQLSKDTYDDDLDNLLAQIGDQYADLFLAAKNLSDAILLSDILRVNTEITKAPLSASMIKRYDEHHQDLTLLKALVRQQLPEKYKEIFFDQSKNGYAGYIDGGASQEEFYKFIKPILEKMDGTEELLVKLNREDLLRKQRTFDNGSIPHQIHLGELHAILRRQEDFYPFLKDNREKIEKILTFRIPYYVGPLARGNSRFAWMTRKSEETITPWNFEEVVDKGASAQSFIERMTNFDKNLPNEKVLPKHSLLYEYFTVYNELTKVKYVTEGMRKPAFLSGEQKKAIVDLLFKTNRKVTVKQLKEDYFKKIECFDSVEISGVEDRFNASLGTYHDLLKIIKDKDFLDNEENEDILEDIVLTLTLFEDREMIEERLKTYAHLFDDKVMKQLKRRRYTGWGRLSRKLINGIRDKQSGKTILDFLKSDGFANRNFMQLIHDDSLTFKEDIQKAQVSGQGDSLHEHIANLAGSPAIKKGILQTVKVVDELVKVMGRHKPENIVIEMARENQTTQKGQKNSRERMKRIEEGIKELGSQILKEHPVENTQLQNEKLYLYYLQNGRDMYVDQELDINRLSDYDVDHIVPQSFLKDDSIDNKVLTRSDKARGKSDNVPSEEVVKKMKNYWRQLLNAKLITQRKFDNLTKAERGGLSELDKAGFIKRQLVETRQITKHVAQILDSRMNTKYDENDKLIREVKVITLKSKLVSDFRKDFQFYKVREINNYHHAHDAYLNAVVGTALIKKYPKLESEFVYGDYKVYDVRKMIAKSEQEIGKATAKYFFYSNIMNFFKTEITLANGEIRKRPLIETNGETGEIVWDKGRDFATVRKVLSMPQVNIVKKTEVQTGGFSKESILPKRNSDKLIARKKDWDPKKYGGFDSPTVAYSVLVVAKVEKGKSKKLKSVKELLGITIMERSSFEKNPIDFLEAKGYKEVKKDLIIKLPKYSLFELENGRKRMLASAGELQKGNELALPSKYVNFLYLASHYEKLKGSPEDNEQKQLFVEQHKHYLDEIIEQISEFSKRVILADANLDKVLSAYNKHRDKPIREQAENIIHLFTLTNLGAPAAFKYFDTTIDRKRYTSTKEVLDATLIHQSITGLYETRIDLSQLGGDGGGGGEAAAKGGSGGTLNIEDEYRLHETSKGPDVPLGSTWLSDFPQAWAETGGMGLAFRQAPLIISLKATSTPVSIKQYPMSQEARLGIKPHIQRLLDQGILVPCQSPWNTPLLPVKKPGTNDYRPVQDLREVNKRVEDIHPTVPNPYNLLSGLPPSHQWYTVLDLKDAFFCLRLHPTSQSLFAFEWKDPEMGISGQLTWTRLPQGFKNSPTLFNEALHRDLADFRIQHPDLILLQYVDDLLLAATSELDCQQGTRALLQTLGDLGYRASAKKAQICQKQVKYLGYLLKEGQRWLTEARKETVMGQPTPKTPRQLREFLGKAGLCRLFIPGFAEMAAPLYPLTKPGTLFKWGPDQQKAYQEIKQALLTAPALGLPDLTKPFELFVDEKQGYAKGVLTQKLGPWRRPVAYLSKKLDPVAAGWPPCLRMVAAIAVLTKDVGKLTMGQPLVILAPHAVEALVKQPPDRWLSNARMTHYQALLLDTDRVQFGPIVALNPATLLPLPEEGLQHDCLDILAEAHGTRPDLTDQPLPDADHTWYTDGSSFLQEGQRRAGAAVTTETEVIWAKALPAGTSAQRAELIALTQALKMAAGKKLNVYTDSRYAFATAHIHGEIYRRRGWLTSEGKEIKNKDEILALLKALFLPKRLSIIHCPGHQKGNHAEARGNRMADQAAREVATRETPETSTLLAGKRTADGSEFEKRTADGSEFESPKKKAKVE

SEQ ID NO: 6930 - protein, 2096 aa, synthetic construct
MPAAKRVKLDGGDKKYSIGLDIGTNSVGWAVITDEYKVPSKKFKVLGNTDRHSIKKNLIGALLFDSGETAEATRLKRTARRRYTRRKNRICYLQEIFSNEMAKVDDSFFHRLEESFLVEEDKKHERHPIFGNIVDEVAYHEKYPTIYHLRKKLVDSTDKADLRLIYLALAHMIKFRGHFLIEGDLNPDNSDVDKLFIQLVQTYNQLFEENPINASGVDAKAILSARLSKSRRLENLIAQLPGEKKNGLFGNLIALSLGLTPNFKSNFDLAEDAKLQLSKDTYDDDLDNLLAQIGDQYADLFLAAKNLSDAILLSDILRVNTEITKAPLSASMIKRYDEHHQDLTLLKALVRQQLPEKYKEIFFDQSKNGYAGYIDGGASQEEFYKFIKPILEKMDGTEELLVKLNREDLLRKQRTFDNGSIPHQIHLGELHAILRRQEDFYPFLKDNREKIEKILTFRIPYYVGPLARGNSRFAWMTRKSEETITPWNFEEVVDKGASAQSFIERMTNFDKNLPNEKVLPKHSLLYEYFTVYNELTKVKYVTEGMRKPAFLSGEQKKAIVDLLFKTNRKVTVKQLKEDYFKKIECFDSVEISGVEDRFNASLGTYHDLLKIIKDKDFLDNEENEDILEDIVLTLTLFEDREMIEERLKTYAHLFDDKVMKQLKRRRYTGWGRLSRKLINGIRDKQSGKTILDFLKSDGFANRNFMQLIHDDSLTFKEDIQKAQVSGQGDSLHEHIANLAGSPAIKKGILQTVKVVDELVKVMGRHKPENIVIEMARENQTTQKGQKNSRERMKRIEEGIKELGSQILKEHPVENTQLQNEKLYLYYLQNGRDMYVDQELDINRLSDYDVDHIVPQSFLKDDSIDNKVLTRSDKARGKSDNVPSEEVVKKMKNYWRQLLNAKLITQRKFDNLTKAERGGLSELDKAGFIKRQLVETRQITKHVAQILDSRMNTKYDENDKLIREVKVITLKSKLVSDFRKDFQFYKVREINNYHHAHDAYLNAVVGTALIKKYPKLESEFVYGDYKVYDVRKMIAKSEQEIGKATAKYFFYSNIMNFFKTEITLANGEIRKRPLIETNGETGEIVWDKGRDFATVRKVLSMPQVNIVKKTEVQTGGFSKESILPKRNSDKLIARKKDWDPKKYGGFDSPTVAYSVLVVAKVEKGKSKKLKSVKELLGITIMERSSFEKNPIDFLEAKGYKEVKKDLIIKLPKYSLFELENGRKRMLASAGELQKGNELALPSKYVNFLYLASHYEKLKGSPEDNEQKQLFVEQHKHYLDEIIEQISEFSKRVILADANLDKVLSAYNKHRDKPIREQAENIIHLFTLTNLGAPAAFKYFDTTIDRKRYTSTKEVLDATLIHQSITGLYETRIDLSQLGGDGGGGGEAAAKGGSGGTLNIEDEYRLHETSKGPDVPLGSTWLSDFPQAWAETGGMGLAVRQAPLIIPLKATSTPVSIKQYPMSQEARLGIKPHIQRLLDQGILVPCQSPWNTPLLPVKKPGTNDYRPVQDLREVNKRVEDIHPTVPNPYNLLSGLPPSHQWYTVLDLKDAFFCLRLHPTSQSLFAFEWRDPEMGISGQLTWTRLPQGFKNSPTLFNEALHRDLADFRIQHPDLILLQYVDDLLLAATSELDCQQGTRALLQTLGDLGYRASAKKAQICQKQVKYLGYLLKEGQRWLTEARKETVMGQPTPKTPRQLREFLGTAGFCRLWIPGFAEMAAPLYPLTKPGTLFEWGPDQQKAYQEIKQALLTAPALGLPDLTKPFELFVDEKQGYAKGVLTQKLGPWRRPVAYLSKKLDPVAAGWPPCLRMVAAIAVLTKDAGKLTMGQPLVILAPHAVEALVKQPPDRWLSNARMTHYQALLLDTDRVQFGPIVALNPATLLPLPEEGLQHDCLDILAEAHGTRPDLTDQPLPDADHTWYTDGSSFLQEGQRKAGAAVTTETEVVWAKALPAGTSAQRAELIALTQALKMAEGKKLNVYTDSRYAFATAHIHGEIYRRRGWLTSEGKEIKNKDEILALLKALFLPKRLSIIHCPGHQKGNRAEARGNRMADQAAREVATRETPETSTLLAGKRTADGSEFEKRTADGSEFESPKKKAKVE

SEQ ID NO: 6931 - protein, 2090 aa, synthetic construct
MPAAKRVKLDGGDKKYSIGLDIGTNSVGWAVITDEYKVPSKKFKVLGNTDRHSIKKNLIGALLFDSGETAEATRLKRTARRRYTRRKNRICYLQEIFSNEMAKVDDSFFHRLEESFLVEEDKKHERHPIFGNIVDEVAYHEKYPTIYHLRKKLVDSTDKADLRLIYLALAHMIKFRGHFLIEGDLNPDNSDVDKLFIQLVQTYNQLFEENPINASGVDAKAILSARLSKSRRLENLIAQLPGEKKNGLFGNLIALSLGLTPNFKSNFDLAEDAKLQLSKDTYDDDLDNLLAQIGDQYADLFLAAKNLSDAILLSDILRVNTEITKAPLSASMIKRYDEHHQDLTLLKALVRQQLPEKYKEIFFDQSKNGYAGYIDGGASQEEFYKFIKPILEKMDGTEELLVKLNREDLLRKQRTFDNGSIPHQIHLGELHAILRRQEDFYPFLKDNREKIEKILTFRIPYYVGPLARGNSRFAWMTRKSEETITPWNFEEVVDKGASAQSFIERMTNFDKNLPNEKVLPKHSLLYEYFTVYNELTKVKYVTEGMRKPAFLSGEQKKAIVDLLFKTNRKVTVKQLKEDYFKKIECFDSVEISGVEDRFNASLGTYHDLLKIIKDKDFLDNEENEDILEDIVLTLTLFEDREMIEERLKTYAHLFDDKVMKQLKRRRYTGWGRLSRKLINGIRDKQSGKTILDFLKSDGFANRNFMQLIHDDSLTFKEDIQKAQVSGQGDSLHEHIANLAGSPAIKKGILQTVKVVDELVKVMGRHKPENIVIEMARENQTTQKGQKNSRERMKRIEEGIKELGSQILKEHPVENTQLQNEKLYLYYLQNGRDMYVDQELDINRLSDYDVDHIVPQSFLKDDSIDNKVLTRSDKARGKSDNVPSEEVVKKMKNYWRQLLNAKLITQRKFDNLTKAERGGLSELDKAGFIKRQLVETRQITKHVAQILDSRMNTKYDENDKLIREVKVITLKSKLVSDFRKDFQFYKVREINNYHHAHDAYLNAVVGTALIKKYPKLESEFVYGDYKVYDVRKMIAKSEQEIGKATAKYFFYSNIMNFFKTEITLANGEIRKRPLIETNGETGEIVWDKGRDFATVRKVLSMPQVNIVKKTEVQTGGFSKESILPKRNSDKLIARKKDWDPKKYGGFDSPTVAYSVLVVAKVEKGKSKKLKSVKELLGITIMERSSFEKNPIDFLEAKGYKEVKKDLIIKLPKYSLFELENGRKRMLASAGELQKGNELALPSKYVNFLYLASHYEKLKGSPEDNEQKQLFVEQHKHYLDEIIEQISEFSKRVILADANLDKVLSAYNKHRDKPIREQAENIIHLFTLTNLGAPAAFKYFDTTIDRKRYTSTKEVLDATLIHQSITGLYETRIDLSQLGGDGGGGGEAAAKGGSGGTLQLDDEYRLYSPLVKPDQNIQFWLEQFPQAWAETAGMGLAKQVPPQVIQLKASATPVSVRQYPLSKEAQEGIRPHVQRLIQQGILVPVQSPWNTPLLPVRKPGTNDYRPVQDLREVNKRVQDIHPTVPNPYNLLCALPPQRSWYTVLDLKDAFFCLRLHPTSQPLFAFEWRDPGTGRTGQLTWTRLPQGFKNSPTIFDEALHRDLANFRIQHPQVTLLQYVDDLLLAGATKQDCLEGTKALLLELSDLGYRASAKKAQICRREVTYLGYSLRDGQRWLTEARKKTVVQIPAPTTAKQVREFLGTAGFCRLWIPGFATLAAPLYPLTKEKGEFSWAPEHQKAFDAIKKALLSAPALALPDVTKPFTLYVDERKGVARGVLTQTLGPWRRPVAYLSKKLDPVASGWPVCLKAIAAVAILVKDADKLTLGQNITVIAPHALENIVRQPPDRWMTNARMTHYQSLLLTERVTFAPPAALNPATLLPEETDEPVTHDCHQLLIEETGVRKDLTDIPLTGEVLTWFTDGSSYVVEGKRMAGAAVVDGTRTIWASSLPEGTSAQKAELMALTQALRLAEGKSINIYTDSRYAFATAHVHGAIYKQRGLLTSAGREIKNKEEILSLLEALHLPKRLAIIHCPGHQKAKDPISRGNQMADRVAKQAAQGVNLLAGKRTADGSEFEKRTADGSEFESPKKKAKVE

SEQ ID NO: 6932 - protein, 2087 aa, synthetic construct
MPAAKRVKLDGGDKKYSIGLDIGTNSVGWAVITDEYKVPSKKFKVLGNTDRHSIKKNLIGALLFDSGETAEATRLKRTARRRYTRRKNRICYLQEIFSNEMAKVDDSFFHRLEESFLVEEDKKHERHPIFGNIVDEVAYHEKYPTIYHLRKKLVDSTDKADLRLIYLALAHMIKFRGHFLIEGDLNPDNSDVDKLFIQLVQTYNQLFEENPINASGVDAKAILSARLSKSRRLENLIAQLPGEKKNGLFGNLIALSLGLTPNFKSNFDLAEDAKLQLSKDTYDDDLDNLLAQIGDQYADLFLAAKNLSDAILLSDILRVNTEITKAPLSASMIKRYDEHHQDLTLLKALVRQQLPEKYKEIFFDQSKNGYAGYIDGGASQEEFYKFIKPILEKMDGTEELLVKLNREDLLRKQRTFDNGSIPHQIHLGELHAILRRQEDFYPFLKDNREKIEKILTFRIPYYVGPLARGNSRFAWMTRKSEETITPWNFEEVVDKGASAQSFIERMTNFDKNLPNEKVLPKHSLLYEYFTVYNELTKVKYVTEGMRKPAFLSGEQKKAIVDLLFKTNRKVTVKQLKEDYFKKIECFDSVEISGVEDRFNASLGTYHDLLKIIKDKDFLDNEENEDILEDIVLTLTLFEDREMIEERLKTYAHLFDDKVMKQLKRRRYTGWGRLSRKLINGIRDKQSGKTILDFLKSDGFANRNFMQLIHDDSLTFKEDIQKAQVSGQGDSLHEHIANLAGSPAIKKGILQTVKVVDELVKVMGRHKPENIVIEMARENQTTQKGQKNSRERMKRIEEGIKELGSQILKEHPVENTQLQNEKLYLYYLQNGRDMYVDQELDINRLSDYDVDHIVPQSFLKDDSIDNKVLTRSDKARGKSDNVPSEEVVKKMKNYWRQLLNAKLITQRKFDNLTKAERGGLSELDKAGFIKRQLVETRQITKHVAQILDSRMNTKYDENDKLIREVKVITLKSKLVSDFRKDFQFYKVREINNYHHAHDAYLNAVVGTALIKKYPKLESEFVYGDYKVYDVRKMIAKSEQEIGKATAKYFFYSNIMNFFKTEITLANGEIRKRPLIETNGETGEIVWDKGRDFATVRKVLSMPQVNIVKKTEVQTGGFSKESILPKRNSDKLIARKKDWDPKKYGGFDSPTVAYSVLVVAKVEKGKSKKLKSVKELLGITIMERSSFEKNPIDFLEAKGYKEVKKDLIIKLPKYSLFELENGRKRMLASAGELQKGNELALPSKYVNFLYLASHYEKLKGSPEDNEQKQLFVEQHKHYLDEIIEQISEFSKRVILADANLDKVLSAYNKHRDKPIREQAENIIHLFTLTNLGAPAAFKYFDTTIDRKRYTSTKEVLDATLIHQSITGLYETRIDLSQLGGDGGGGGEAAAKGGSGGIPWLMKKPLQLTTLVPLQEYEERLLKQTMLTGSYKEKLQSLFLKYDALWQHWENQVGHRRIKPHHIATGTVNPRPQKQYPINPKAKASIQTVINDLLKQGVLIQQNSIMNTPVYPVPKPDGKWRMVLDYREVNKTIPLIAAQNQHSAGILSSIFRGKYKTTLDLSNGFWAHSITPESYWLTAFTWLGQQYCWTRLPQGFLNSPALFNADVVDLLKEVPNVQVYVDDIYISHDDPREHLEQLEKVFSLLLNAGYVVSLKKSEIAQHEVEFLGFNITKEGRGLTETFKQKLLNITPPRDLKQLQSILGLLNFARNFIPNFSELVKPLYNIIATAPGKYITWTTDNSQQLQNIISMLNSAENLEERNPEVRLIMKVNTSPSAGYIRFYNEFAKRPIMYLNYVYTKAEVKFTNTEKLLTTIHKGLIKALDLGMGQEILVYSPIVSMTKIQKTPLPERKALPIRWITWMSYLEDPRIQFHYDKTLPELQQVPTVTDDIIAKIKHPSEFSMVFYTDGSAIKHPNVNKSHNAGMGIAQVQFKPEFTVINTWSIPLGDHTAQLAEVAAVEFACKKALKIDGPVLIVTDSFYVAESVNKELPYWQSNGFFNNKKKPLKHVSKWKSIADCIQLKPDIIIIHEKGHQPTASTFHTEGNNLADKLATQGSYVVNAGKRTADGSEFEKRTADGSEFESPKKKAKVE

SEQ ID NO: 6933 - protein, 2098 aa, synthetic construct
MPAAKRVKLDGGDKKYSIGLDIGTNSVGWAVITDEYKVPSKKFKVLGNTDRHSIKKNLIGALLFDSGETAEATRLKRTARRRYTRRKNRICYLQEIFSNEMAKVDDSFFHRLEESFLVEEDKKHERHPIFGNIVDEVAYHEKYPTIYHLRKKLVDSTDKADLRLIYLALAHMIKFRGHFLIEGDLNPDNSDVDKLFIQLVQTYNQLFEENPINASGVDAKAILSARLSKSRRLENLIAQLPGEKKNGLFGNLIALSLGLTPNFKSNFDLAEDAKLQLSKDTYDDDLDNLLAQIGDQYADLFLAAKNLSDAILLSDILRVNTEITKAPLSASMIKRYDEHHQDLTLLKALVRQQLPEKYKEIFFDQSKNGYAGYIDGGASQEEFYKFIKPILEKMDGTEELLVKLNREDLLRKQRTFDNGSIPHQIHLGELHAILRRQEDFYPFLKDNREKIEKILTFRIPYYVGPLARGNSRFAWMTRKSEETITPWNFEEVVDKGASAQSFIERMTNFDKNLPNEKVLPKHSLLYEYFTVYNELTKVKYVTEGMRKPAFLSGEQKKAIVDLLFKTNRKVTVKQLKEDYFKKIECFDSVEISGVEDRFNASLGTYHDLLKIIKDKDFLDNEENEDILEDIVLTLTLFEDREMIEERLKTYAHLFDDKVMKQLKRRRYTGWGRLSRKLINGIRDKQSGKTILDFLKSDGFANRNFMQLIHDDSLTFKEDIQKAQVSGQGDSLHEHIANLAGSPAIKKGILQTVKVVDELVKVMGRHKPENIVIEMARENQTTQKGQKNSRERMKRIEEGIKELGSQILKEHPVENTQLQNEKLYLYYLQNGRDMYVDQELDINRLSDYDVDHIVPQSFLKDDSIDNKVLTRSDKARGKSDNVPSEEVVKKMKNYWRQLLNAKLITQRKFDNLTKAERGGLSELDKAGFIKRQLVETRQITKHVAQILDSRMNTKYDENDKLIREVKVITLKSKLVSDFRKDFQFYKVREINNYHHAHDAYLNAVVGTALIKKYPKLESEFVYGDYKVYDVRKMIAKSEQEIGKATAKYFFYSNIMNFFKTEITLANGEIRKRPLIETNGETGEIVWDKGRDFATVRKVLSMPQVNIVKKTEVQTGGFSKESILPKRNSDKLIARKKDWDPKKYGGFDSPTVAYSVLVVAKVEKGKSKKLKSVKELLGITIMERSSFEKNPIDFLEAKGYKEVKKDLIIKLPKYSLFELENGRKRMLASAGELQKGNELALPSKYVNFLYLASHYEKLKGSPEDNEQKQLFVEQHKHYLDEIIEQISEFSKRVILADANLDKVLSAYNKHRDKPIREQAENIIHLFTLTNLGAPAAFKYFDTTIDRKRYTSTKEVLDATLIHQSITGLYETRIDLSQLGGDGGEAAAKGGSGGGGGTAPLEEEYRLFLEAPIQNVTLLEQWKREIPKVWAEINPPGLASTQAPIHVQLLSTALPVRVRQYPITLEAKRSLRETIRKFRAAGILRPVHSPWNTPLLPVRKSGTSEYRMVQDLREVNKRVETIHPTVPNPYTLLSLLPPDRIWYSVLDLKDAFFCIPLAPESQLIFAFEWADAEEGESGQLTWTRLPQGFKNSPTLFNEALNRDLQGFRLDHPSVSLLQYVDDLLIAADTQAACLSATRDLLMTLAELGYRVSGKKAQLCQEEVTYLGFKIHKGSRSLSNSRTQAILQIPVPKTKRQVREFLGTIGYCRLWIPGFAELAQPLYAATRPGNDPLVWGEKEEEAFQSLKLALTQPPALALPSLDKPFQLFVEETSGAAKGVLTQALGPWKRPVAYLSKRLDPVAAGWPRCLRAIAAAALLTREASKLTFGQDIEITSSHNLESLLRSPPDKWLTNARITQYQVLLLDPPRVRFKQTAALNPATLLPETDDTLPIHHCLDTLDSLTSTRPDLTDQPLAQAEATLFTDGSSYIRDGKRYAGAAVVTLDSVIWAEPLPIGTSAQKAELIALTKALEWSKDKSVNIYTDSRYAFATLHVHGMIYRERGWLTAGGKAIKNAPEILALLTAVWLPKRVAVMHCKGHQKDDAPTSTGNRRADEVAREVAIRPLSTQATISAGKRTADGSEFEKRTADGSEFESPKKKAKVE

SEQ ID NO: 6934 - protein, 2102 aa, synthetic construct
MPAAKRVKLDGGDKKYSIGLDIGTNSVGWAVITDEYKVPSKKFKVLGNTDRHSIKKNLIGALLFDSGETAEATRLKRTARRRYTRRKNRICYLQEIFSNEMAKVDDSFFHRLEESFLVEEDKKHERHPIFGNIVDEVAYHEKYPTIYHLRKKLVDSTDKADLRLIYLALAHMIKFRGHFLIEGDLNPDNSDVDKLFIQLVQTYNQLFEENPINASGVDAKAILSARLSKSRRLENLIAQLPGEKKNGLFGNLIALSLGLTPNFKSNFDLAEDAKLQLSKDTYDDDLDNLLAQIGDQYADLFLAAKNLSDAILLSDILRVNTEITKAPLSASMIKRYDEHHQDLTLLKALVRQQLPEKYKEIFFDQSKNGYAGYIDGGASQEEFYKFIKPILEKMDGTEELLVKLNREDLLRKQRTFDNGSIPHQIHLGELHAILRRQEDFYPFLKDNREKIEKILTFRIPYYVGPLARGNSRFAWMTRKSEETITPWNFEEVVDKGASAQSFIERMTNFDKNLPNEKVLPKHSLLYEYFTVYNELTKVKYVTEGMRKPAFLSGEQKKAIVDLLFKTNRKVTVKQLKEDYFKKIECFDSVEISGVEDRFNASLGTYHDLLKIIKDKDFLDNEENEDILEDIVLTLTLFEDREMIEERLKTYAHLFDDKVMKQLKRRRYTGWGRLSRKLINGIRDKQSGKTILDFLKSDGFANRNFMQLIHDDSLTFKEDIQKAQVSGQGDSLHEHIANLAGSPAIKKGILQTVKVVDELVKVMGRHKPENIVIEMARENQTTQKGQKNSRERMKRIEEGIKELGSQILKEHPVENTQLQNEKLYLYYLQNGRDMYVDQELDINRLSDYDVDHIVPQSFLKDDSIDNKVLTRSDKARGKSDNVPSEEVVKKMKNYWRQLLNAKLITQRKFDNLTKAERGGLSELDKAGFIKRQLVETRQITKHVAQILDSRMNTKYDENDKLIREVKVITLKSKLVSDFRKDFQFYKVREINNYHHAHDAYLNAVVGTALIKKYPKLESEFVYGDYKVYDVRKMIAKSEQEIGKATAKYFFYSNIMNFFKTEITLANGEIRKRPLIETNGETGEIVWDKGRDFATVRKVLSMPQVNIVKKTEVQTGGFSKESILPKRNSDKLIARKKDWDPKKYGGFDSPTVAYSVLVVAKVEKGKSKKLKSVKELLGITIMERSSFEKNPIDFLEAKGYKEVKKDLIIKLPKYSLFELENGRKRMLASAGELQKGNELALPSKYVNFLYLASHYEKLKGSPEDNEQKQLFVEQHKHYLDEIIEQISEFSKRVILADANLDKVLSAYNKHRDKPIREQAENIIHLFTLTNLGAPAAFKYFDTTIDRKRYTSTKEVLDATLIHQSITGLYETRIDLSQLGGDGGEAAAKGGSGGGGGTVSLQDEHRLFDIPVTTSLPDVWLQDFPQAWAETGGLGRAKCQAPIIIDLKPTAVPVSIKQYPMSLEAHMGIRQHIIKFLELGVLRPCRSPWNTPLLPVKKPGTQDYRPVQDLREINKRTVDIHPTVPNPYNLLSTLKPDYSWYTVLDLKDAFFCLPLAPQSQELFAFEWKDPERGISGQLTWTRLPQGFKNSPTLFDEALHRDLTDFRTQHPEVTLLQYVDDLLLAAPTKKACTQGTRHLLQELGEKGYRASAKKAQICQTKVTYLGYILSEGKRWLTPGRIETVARIPPPRNPREVREFLGTAGFCRLWIPGFAELAAPLYALTKESTPFTWQTEHQLAFEALKKALLSAPALGLPDTSKPFTLFLDERQGIAKGVLTQKLGPWKRPVAYLSKKLDPVAAGWPPCLRIMAATAMLVKDSAKLTLGQPLTVITPHTLEAIVRQPPDRWITNARLTHYQALLLDTDRVQFGPPVTLNPATLLPVPENQPSPHDCRQVLAETHGTREDLKDQELPDADHTWYTDGSSYLDSGTRRAGAAVVDGHNTIWAQSLPPGTSAQKAELIALTKALELSKGKKANIYTDSRYAFATAHTHGSIYERRGLLTSEGKEIKNKAEIIALLKALFLPQEVAIIHCPGHQKGQDPVAVGNRQADRVARQAAMAEVLTLATEPDNTSHITAGKRTADGSEFEKRTADGSEFESPKKKAKVE

SEQ ID NO: 6935 - protein, 2102 aa, synthetic construct
MPAAKRVKLDGGDKKYSIGLDIGTNSVGWAVITDEYKVPSKKFKVLGNTDRHSIKKNLIGALLFDSGETAEATRLKRTARRRYTRRKNRICYLQEIFSNEMAKVDDSFFHRLEESFLVEEDKKHERHPIFGNIVDEVAYHEKYPTIYHLRKKLVDSTDKADLRLIYLALAHMIKFRGHFLIEGDLNPDNSDVDKLFIQLVQTYNQLFEENPINASGVDAKAILSARLSKSRRLENLIAQLPGEKKNGLFGNLIALSLGLTPNFKSNFDLAEDAKLQLSKDTYDDDLDNLLAQIGDQYADLFLAAKNLSDAILLSDILRVNTEITKAPLSASMIKRYDEHHQDLTLLKALVRQQLPEKYKEIFFDQSKNGYAGYIDGGASQEEFYKFIKPILEKMDGTEELLVKLNREDLLRKQRTFDNGSIPHQIHLGELHAILRRQEDFYPFLKDNREKIEKILTFRIPYYVGPLARGNSRFAWMTRKSEETITPWNFEEVVDKGASAQSFIERMTNFDKNLPNEKVLPKHSLLYEYFTVYNELTKVKYVTEGMRKPAFLSGEQKKAIVDLLFKTNRKVTVKQLKEDYFKKIECFDSVEISGVEDRFNASLGTYHDLLKIIKDKDFLDNEENEDILEDIVLTLTLFEDREMIEERLKTYAHLFDDKVMKQLKRRRYTGWGRLSRKLINGIRDKQSGKTILDFLKSDGFANRNFMQLIHDDSLTFKEDIQKAQVSGQGDSLHEHIANLAGSPAIKKGILQTVKVVDELVKVMGRHKPENIVIEMARENQTTQKGQKNSRERMKRIEEGIKELGSQILKEHPVENTQLQNEKLYLYYLQNGRDMYVDQELDINRLSDYDVDHIVPQSFLKDDSIDNKVLTRSDKARGKSDNVPSEEVVKKMKNYWRQLLNAKLITQRKFDNLTKAERGGLSELDKAGFIKRQLVETRQITKHVAQILDSRMNTKYDENDKLIREVKVITLKSKLVSDFRKDFQFYKVREINNYHHAHDAYLNAVVGTALIKKYPKLESEFVYGDYKVYDVRKMIAKSEQEIGKATAKYFFYSNIMNFFKTEITLANGEIRKRPLIETNGETGEIVWDKGRDFATVRKVLSMPQVNIVKKTEVQTGGFSKESILPKRNSDKLIARKKDWDPKKYGGFDSPTVAYSVLVVAKVEKGKSKKLKSVKELLGITIMERSSFEKNPIDFLEAKGYKEVKKDLIIKLPKYSLFELENGRKRMLASAGELQKGNELALPSKYVNFLYLASHYEKLKGSPEDNEQKQLFVEQHKHYLDEIIEQISEFSKRVILADANLDKVLSAYNKHRDKPIREQAENIIHLFTLTNLGAPAAFKYFDTTIDRKRYTSTKEVLDATLIHQSITGLYETRIDLSQLGGDGGEAAAKGGSGGGGGTVSLQDEHRLFDIPVTTSLPDVWLQDFPQAWAETGGLGRAKCQAPIIIDLKPTAVPVSIKQYPMSLEAHMGIRQHIIKFLELGVLRPCRSPWNTPLLPVKKPGTQDYRPVQDLREINKRTVDIHPTVPNPYNLLSTLKPDYSWYTVLDLKDAFFCLPLAPQSQELFAFEWKDPERGISGQLTWTRLPQGFKNSPTLFNEALHRDLTDFRTQHPEVTLLQYVDDLLLAAPTKKACTQGTRHLLQELGEKGYRASAKKAQICQTKVTYLGYILSEGKRWLTPGRIETVARIPPPRNPREVREFLGTAGFCRLWIPGFAELAAPLYALTKPSTPFTWQTEHQLAFEALKKALLSAPALGLPDTSKPFTLFLDERQGIAKGVLTQKLGPWKRPVAYLSKKLDPVAAGWPPCLRIMAATAMLVKDSAKLTLGQPLTVITPHTLEAIVRQPPDRWITNARLTHYQALLLDTDRVQFGPPVTLNPATLLPVPENQPSPHDCRQVLAETHGTREDLKDQELPDADHTWYTDGSSYLDSGTRRAGAAVVDGHNTIWAQSLPPGTSAQKAELIALTKALELSKGKKANIYTDSRYAFATAHTHGSIYERRGWLTSEGKEIKNKAEIIALLKALFLPQEVAIIHCPGHQKGQDPVAVGNRQADRVARQAAMAEVLTLATEPDNTSHITAGKRTADGSEFEKRTADGSEFESPKKKAKVE

SEQ ID NO: 6936 - protein, 2087 aa, synthetic construct
MPAAKRVKLDGGDKKYSIGLDIGTNSVGWAVITDEYKVPSKKFKVLGNTDRHSIKKNLIGALLFDSGETAEATRLKRTARRRYTRRKNRICYLQEIFSNEMAKVDDSFFHRLEESFLVEEDKKHERHPIFGNIVDEVAYHEKYPTIYHLRKKLVDSTDKADLRLIYLALAHMIKFRGHFLIEGDLNPDNSDVDKLFIQLVQTYNQLFEENPINASGVDAKAILSARLSKSRRLENLIAQLPGEKKNGLFGNLIALSLGLTPNFKSNFDLAEDAKLQLSKDTYDDDLDNLLAQIGDQYADLFLAAKNLSDAILLSDILRVNTEITKAPLSASMIKRYDEHHQDLTLLKALVRQQLPEKYKEIFFDQSKNGYAGYIDGGASQEEFYKFIKPILEKMDGTEELLVKLNREDLLRKQRTFDNGSIPHQIHLGELHAILRRQEDFYPFLKDNREKIEKILTFRIPYYVGPLARGNSRFAWMTRKSEETITPWNFEEVVDKGASAQSFIERMTNFDKNLPNEKVLPKHSLLYEYFTVYNELTKVKYVTEGMRKPAFLSGEQKKAIVDLLFKTNRKVTVKQLKEDYFKKIECFDSVEISGVEDRFNASLGTYHDLLKIIKDKDFLDNEENEDILEDIVLTLTLFEDREMIEERLKTYAHLFDDKVMKQLKRRRYTGWGRLSRKLINGIRDKQSGKTILDFLKSDGFANRNFMQLIHDDSLTFKEDIQKAQVSGQGDSLHEHIANLAGSPAIKKGILQTVKVVDELVKVMGRHKPENIVIEMARENQTTQKGQKNSRERMKRIEEGIKELGSQILKEHPVENTQLQNEKLYLYYLQNGRDMYVDQELDINRLSDYDVDHIVPQSFLKDDSIDNKVLTRSDKARGKSDNVPSEEVVKKMKNYWRQLLNAKLITQRKFDNLTKAERGGLSELDKAGFIKRQLVETRQITKHVAQILDSRMNTKYDENDKLIREVKVITLKSKLVSDFRKDFQFYKVREINNYHHAHDAYLNAVVGTALIKKYPKLESEFVYGDYKVYDVRKMIAKSEQEIGKATAKYFFYSNIMNFFKTEITLANGEIRKRPLIETNGETGEIVWDKGRDFATVRKVLSMPQVNIVKKTEVQTGGFSKESILPKRNSDKLIARKKDWDPKKYGGFDSPTVAYSVLVVAKVEKGKSKKLKSVKELLGITIMERSSFEKNPIDFLEAKGYKEVKKDLIIKLPKYSLFELENGRKRMLASAGELQKGNELALPSKYVNFLYLASHYEKLKGSPEDNEQKQLFVEQHKHYLDEIIEQISEFSKRVILADANLDKVLSAYNKHRDKPIREQAENIIHLFTLTNLGAPAAFKYFDTTIDRKRYTSTKEVLDATLIHQSITGLYETRIDLSQLGGDGGEAAAKGGSGGGGGVPWILKKPLELTIKLDLEEQQGTLLNNSILSKKGKEELKQLFEKYSALWQSWENQVGHRRIRPHKIATGTVKPTPQKQYHINPKAKPDIQIVINDLLKQGVLIQKESTMNTPVYPVPKPNGRWRMVLDYRAVNKVTPLIAVQNQHSYGILGSLFKGRYKTTIDLSNGFWAHPIVPEDYWITAFTWQGKQYCWTVLPQGFLNSPGLFTGDVVDLLQGIPNVEVYVDDVYISHDSEKEHLEYLDILFNRLKEAGYIISLKKSNIANSIVDFLGFQITNEGRGLTDTFKEKLENITAPTTLKQLQSILGLLNFARNFIPDFTELIAPLYALIPKSTKNYVPWQIEHSTTLETLITKLNGAEYLQGRKGDKTLIMKVNASYTTGYIRYYNEGEKKPISYVSIVFSKTELKFTELEKLLTTVHKGLLKALDLSMGQNIHVYSPIVSMQNIQKTPQTAKKALASRWLSWLSYLEDPRIRFFYDPQMPALKDLPAVDTGKDNKKHPSNFQHIFYTDGSAITSPTKEGHLNAGMGIVYFINKDGNLQKQQEWSISLGNHTAQFAEIAAFEFALKKCLPLGGNILVVTDSNYVAKAYNEELDVWASNGFVNNRKKPLKHISKWKSVADLKRLRPDVVVTHEPGHQKLDSSPHAYGNNLADQLATQASFKVHAGKRTADGSEFEKRTADGSEFESPKKKAKVE

SEQ ID NO: 6937 - protein, 2173 aa, synthetic construct
MPAAKRVKLDGGDKKYSIGLDIGTNSVGWAVITDEYKVPSKKFKVLGNTDRHSIKKNLIGALLFDSGETAEATRLKRTARRRYTRRKNRICYLQEIFSNEMAKVDDSFFHRLEESFLVEEDKKHERHPIFGNIVDEVAYHEKYPTIYHLRKKLVDSTDKADLRLIYLALAHMIKFRGHFLIEGDLNPDNSDVDKLFIQLVQTYNQLFEENPINASGVDAKAILSARLSKSRRLENLIAQLPGEKKNGLFGNLIALSLGLTPNFKSNFDLAEDAKLQLSKDTYDDDLDNLLAQIGDQYADLFLAAKNLSDAILLSDILRVNTEITKAPLSASMIKRYDEHHQDLTLLKALVRQQLPEKYKEIFFDQSKNGYAGYIDGGASQEEFYKFIKPILEKMDGTEELLVKLNREDLLRKQRTFDNGSIPHQIHLGELHAILRRQEDFYPFLKDNREKIEKILTFRIPYYVGPLARGNSRFAWMTRKSEETITPWNFEEVVDKGASAQSFIERMTNFDKNLPNEKVLPKHSLLYEYFTVYNELTKVKYVTEGMRKPAFLSGEQKKAIVDLLFKTNRKVTVKQLKEDYFKKIECFDSVEISGVEDRFNASLGTYHDLLKIIKDKDFLDNEENEDILEDIVLTLTLFEDREMIEERLKTYAHLFDDKVMKQLKRRRYTGWGRLSRKLINGIRDKQSGKTILDFLKSDGFANRNFMQLIHDDSLTFKEDIQKAQVSGQGDSLHEHIANLAGSPAIKKGILQTVKVVDELVKVMGRHKPENIVIEMARENQTTQKGQKNSRERMKRIEEGIKELGSQILKEHPVENTQLQNEKLYLYYLQNGRDMYVDQELDINRLSDYDVDHIVPQSFLKDDSIDNKVLTRSDKARGKSDNVPSEEVVKKMKNYWRQLLNAKLITQRKFDNLTKAERGGLSELDKAGFIKRQLVETRQITKHVAQILDSRMNTKYDENDKLIREVKVITLKSKLVSDFRKDFQFYKVREINNYHHAHDAYLNAVVGTALIKKYPKLESEFVYGDYKVYDVRKMIAKSEQEIGKATAKYFFYSNIMNFFKTEITLANGEIRKRPLIETNGETGEIVWDKGRDFATVRKVLSMPQVNIVKKTEVQTGGFSKESILPKRNSDKLIARKKDWDPKKYGGFDSPTVAYSVLVVAKVEKGKSKKLKSVKELLGITIMERSSFEKNPIDFLEAKGYKEVKKDLIIKLPKYSLFELENGRKRMLASAGELQKGNELALPSKYVNFLYLASHYEKLKGSPEDNEQKQLFVEQHKHYLDEIIEQISEFSKRVILADANLDKVLSAYNKHRDKPIREQAENIIHLFTLTNLGAPAAFKYFDTTIDRKRYTSTKEVLDATLIHQSITGLYETRIDLSQLGGDGGEAAAKGGSGGGGGMDLLKPLTVERKGVKIKGYWNSQADITCVPKDLLQGEEPVRQQNVTTIHGTQEGDVYYVNLKIDGRRINTEVIGTTLDYAIITPGDVPWILKKPLELTIKLDLEEQQGTLLNNSILSKKGKEELKQLFEKYSALWQSWENQVGHRRIRPHKIATGTVKPTPQKQYHINPKAKPDIQIVINDLLKQGVLIQKESTMNTPVYPVPKPNGRWRMVLDYRAVNKVTPLIAVQNQHSYGILGSLFKGRYKTTIDLSNGFWAHPIVPEDYWITAFTWQGKQYCWTVLPQGFLNSPGLFNGDVVDLLQGIPNVEVYVDDVYISHDSEKEHLEYLDILFNRLKEAGYIISLKKSNIANSIVDFLGFQITNEGRGLTDTFKEKLENITAPTTLKQLQSILGKLNFARNFIPDFTELIAPLYALIPKSPKNYVPWQIEHSTTLETLITKLNGAEYLQGRKGDKTLIMKVNASYTTGYIRYYNEGEKKPISYVSIVFSKTELKFTELEKLLTTVHKGLLKALDLSMGQNIHVYSPIVSMQNIQKTPQTAKKALASRWLSWLSYLEDPRIRFFYDPQMPALKDLPAVDTGKDNKKHPSNFQHIFYTDGSAITSPTKEGHLNAGMGIVYFINKDGNLQKQQEWSISLGNHTAQFAEIAAFEFALKKCLPLGGNILVVTDSNYVAKAYNEELDVWASNGFVNNRKKPLKHISKWKSVADLKRLRPDVVVTHEPGHQKLDSSPHAYGNNLADQLATQASFKVHAGKRTADGSEFEKRTADGSEFESPKKKAKVE

SEQ ID NO: 6938 - protein, 2095 aa, synthetic construct
MPAAKRVKLDGGDKKYSIGLDIGTNSVGWAVITDEYKVPSKKFKVLGNTDRHSIKKNLIGALLFDSGETAEATRLKRTARRRYTRRKNRICYLQEIFSNEMAKVDDSFFHRLEESFLVEEDKKHERHPIFGNIVDEVAYHEKYPTIYHLRKKLVDSTDKADLRLIYLALAHMIKFRGHFLIEGDLNPDNSDVDKLFIQLVQTYNQLFEENPINASGVDAKAILSARLSKSRRLENLIAQLPGEKKNGLFGNLIALSLGLTPNFKSNFDLAEDAKLQLSKDTYDDDLDNLLAQIGDQYADLFLAAKNLSDAILLSDILRVNTEITKAPLSASMIKRYDEHHQDLTLLKALVRQQLPEKYKEIFFDQSKNGYAGYIDGGASQEEFYKFIKPILEKMDGTEELLVKLNREDLLRKQRTFDNGSIPHQIHLGELHAILRRQEDFYPFLKDNREKIEKILTFRIPYYVGPLARGNSRFAWMTRKSEETITPWNFEEVVDKGASAQSFIERMTNFDKNLPNEKVLPKHSLLYEYFTVYNELTKVKYVTEGMRKPAFLSGEQKKAIVDLLFKTNRKVTVKQLKEDYFKKIECFDSVEISGVEDRFNASLGTYHDLLKIIKDKDFLDNEENEDILEDIVLTLTLFEDREMIEERLKTYAHLFDDKVMKQLKRRRYTGWGRLSRKLINGIRDKQSGKTILDFLKSDGFANRNFMQLIHDDSLTFKEDIQKAQVSGQGDSLHEHIANLAGSPAIKKGILQTVKVVDELVKVMGRHKPENIVIEMARENQTTQKGQKNSRERMKRIEEGIKELGSQILKEHPVENTQLQNEKLYLYYLQNGRDMYVDQELDINRLSDYDVDHIVPQSFLKDDSIDNKVLTRSDKARGKSDNVPSEEVVKKMKNYWRQLLNAKLITQRKFDNLTKAERGGLSELDKAGFIKRQLVETRQITKHVAQILDSRMNTKYDENDKLIREVKVITLKSKLVSDFRKDFQFYKVREINNYHHAHDAYLNAVVGTALIKKYPKLESEFVYGDYKVYDVRKMIAKSEQEIGKATAKYFFYSNIMNFFKTEITLANGEIRKRPLIETNGETGEIVWDKGRDFATVRKVLSMPQVNIVKKTEVQTGGFSKESILPKRNSDKLIARKKDWDPKKYGGFDSPTVAYSVLVVAKVEKGKSKKLKSVKELLGITIMERSSFEKNPIDFLEAKGYKEVKKDLIIKLPKYSLFELENGRKRMLASAGELQKGNELALPSKYVNFLYLASHYEKLKGSPEDNEQKQLFVEQHKHYLDEIIEQISEFSKRVILADANLDKVLSAYNKHRDKPIREQAENIIHLFTLTNLGAPAAFKYFDTTIDRKRYTSTKEVLDATLIHQSITGLYETRIDLSQLGGDGGEAAAKGGSGGGGGTLQLEEEYRLFEPESTQKQEMDIWLKNFPQAWAETGGMGTAHCQAPVLIQLKATATPISIRQYPMPHEAYQGIKPHIRRMLDQGILKPCQSPWNTPLLPVKKPGTEDYRPVQDLREVNKRVEDIHPTVPNPYNLLSTLPPSHPWYTVLDLKDAFFCLRLHSESQLLFAFEWRDPEIGLSGQLTWTRLPQGFKNSPTLFNEALHSDLADFRVRYPALVLLQYVDDLLLAAATRTECLEGTKALLETLGNKGYRASAKKAQICLQEVTYLGYSLKDGQRWLTKARKEAILSIPVPKNSRQVREFLGTAGYCRLWIPGFAELAAPLYPLTRPGTLFQWGTEQQLAFEDIKKALLSSPALGLPDITKPFELFIDENSGFAKGVLVQKLGPWKRPVAYLSKKLDTVASGWPPCLRMVAAIAILVKDAGKLTLGQPLTILTSHPVEALVRQPPNKWLSNARMTHYQAMLLDAERVHFGPTVSLNPATLLPLPSGGNHHDCLQILAETHGTRPDLTDQPLPDADLTWYTDGSSFIRNGEREAGAAVTTESEVIWAAPLPPGTSAQRAELIALTQALKMAEGKKLTVYTDSRYAFATTHVHGEIYRRRGWLTSEGKEIKNKNEILALLEALFLPKRLSIIHCPGHQKGDSPQAKGNRLADDTAKKAATETHSSLTVLPAGKRTADGSEFEKRTADGSEFESPKKKAKVE

SEQ ID NO: 6939 - protein, 2176 aa, synthetic construct
MPAAKRVKLDGGDKKYSIGLDIGTNSVGWAVITDEYKVPSKKFKVLGNTDRHSIKKNLIGALLFDSGETAEATRLKRTARRRYTRRKNRICYLQEIFSNEMAKVDDSFFHRLEESFLVEEDKKHERHPIFGNIVDEVAYHEKYPTIYHLRKKLVDSTDKADLRLIYLALAHMIKFRGHFLIEGDLNPDNSDVDKLFIQLVQTYNQLFEENPINASGVDAKAILSARLSKSRRLENLIAQLPGEKKNGLFGNLIALSLGLTPNFKSNFDLAEDAKLQLSKDTYDDDLDNLLAQIGDQYADLFLAAKNLSDAILLSDILRVNTEITKAPLSASMIKRYDEHHQDLTLLKALVRQQLPEKYKEIFFDQSKNGYAGYIDGGASQEEFYKFIKPILEKMDGTEELLVKLNREDLLRKQRTFDNGSIPHQIHLGELHAILRRQEDFYPFLKDNREKIEKILTFRIPYYVGPLARGNSRFAWMTRKSEETITPWNFEEVVDKGASAQSFIERMTNFDKNLPNEKVLPKHSLLYEYFTVYNELTKVKYVTEGMRKPAFLSGEQKKAIVDLLFKTNRKVTVKQLKEDYFKKIECFDSVEISGVEDRFNASLGTYHDLLKIIKDKDFLDNEENEDILEDIVLTLTLFEDREMIEERLKTYAHLFDDKVMKQLKRRRYTGWGRLSRKLINGIRDKQSGKTILDFLKSDGFANRNFMQLIHDDSLTFKEDIQKAQVSGQGDSLHEHIANLAGSPAIKKGILQTVKVVDELVKVMGRHKPENIVIEMARENQTTQKGQKNSRERMKRIEEGIKELGSQILKEHPVENTQLQNEKLYLYYLQNGRDMYVDQELDINRLSDYDVDHIVPQSFLKDDSIDNKVLTRSDKARGKSDNVPSEEVVKKMKNYWRQLLNAKLITQRKFDNLTKAERGGLSELDKAGFIKRQLVETRQITKHVAQILDSRMNTKYDENDKLIREVKVITLKSKLVSDFRKDFQFYKVREINNYHHAHDAYLNAVVGTALIKKYPKLESEFVYGDYKVYDVRKMIAKSEQEIGKATAKYFFYSNIMNFFKTEITLANGEIRKRPLIETNGETGEIVWDKGRDFATVRKVLSMPQVNIVKKTEVQTGGFSKESILPKRNSDKLIARKKDWDPKKYGGFDSPTVAYSVLVVAKVEKGKSKKLKSVKELLGITIMERSSFEKNPIDFLEAKGYKEVKKDLIIKLPKYSLFELENGRKRMLASAGELQKGNELALPSKYVNFLYLASHYEKLKGSPEDNEQKQLFVEQHKHYLDEIIEQISEFSKRVILADANLDKVLSAYNKHRDKPIREQAENIIHLFTLTNLGAPAAFKYFDTTIDRKRYTSTKEVLDATLIHQSITGLYETRIDLSQLGGDGGEAAAKGGSGGGGGMNPLQLLQPLPAEIKGTKLLAHWNSGATITCIPESFLEDEQPIKKTLIKTIHGEKQQNVYYVTFKVKGRKVEAEVIASPYEYILLSPTDVPWLTQQPLQLTILVPLQEYQEKILSKTALPEDQKQQLKTLFVKYDNLWQHWENQVGHRKIRPHNIATGDYPPRPQKQYPINPKAKPSIQIVIDDLLKQGVLTPQNSTMNTPVYPVPKPDGRWRMVLDYREVNKTIPLTAAQNQHSAGILATIVRQKYKTTLDLANGFWAHPITPESYWLTAFTWQGKQYCWTRLPQGFLNSPALFNADVVDLLKEIPNVQVYVDDIYLSHDDPKEHVQQLEKVFQILLQAGYVVSLKKSEIGQKTVEFLGFNITKEGRGLTDTFKTKLLNITPPKDLKQLQSILGKLNFARNFIPNFAELVQPLYNLIAPAKGKYIEWSEENTKQLNMVIEALNTASNLEERLPEQRLVIKVNTSPSAGYVRYYNETGKKPIMYLNYVFSKAELKFSMLEKLLTTMHKALIKAMDLAMGQEILVYSPIVSMTKIQKTPLPERKALPIRWITWMTYLEDPRIQFHYDKTLPELKHIPDVYTSSQSPVKHPSQYEGVFYTDGSAIKSPDPTKSNNAGMGIVHATYKPEYQVLNQWSIPLGNHTAQMAEIAAVEFACKKALKIPGPVLVITDSFYVAESANKELPYWKSNGFVNNKKKPLKHISKWKSIAECLSMKPDITIQHEKGISLQIPVFILKGNALADKLATQGSYVVNAGKRTADGSEFEKRTADGSEFESPKKKAKVE

SEQ ID NO: 6940 - protein, 2094 aa, synthetic construct
MPAAKRVKLDGGDKKYSIGLDIGTNSVGWAVITDEYKVPSKKFKVLGNTDRHSIKKNLIGALLFDSGETAEATRLKRTARRRYTRRKNRICYLQEIFSNEMAKVDDSFFHRLEESFLVEEDKKHERHPIFGNIVDEVAYHEKYPTIYHLRKKLVDSTDKADLRLIYLALAHMIKFRGHFLIEGDLNPDNSDVDKLFIQLVQTYNQLFEENPINASGVDAKAILSARLSKSRRLENLIAQLPGEKKNGLFGNLIALSLGLTPNFKSNFDLAEDAKLQLSKDTYDDDLDNLLAQIGDQYADLFLAAKNLSDAILLSDILRVNTEITKAPLSASMIKRYDEHHQDLTLLKALVRQQLPEKYKEIFFDQSKNGYAGYIDGGASQEEFYKFIKPILEKMDGTEELLVKLNREDLLRKQRTFDNGSIPHQIHLGELHAILRRQEDFYPFLKDNREKIEKILTFRIPYYVGPLARGNSRFAWMTRKSEETITPWNFEEVVDKGASAQSFIERMTNFDKNLPNEKVLPKHSLLYEYFTVYNELTKVKYVTEGMRKPAFLSGEQKKAIVDLLFKTNRKVTVKQLKEDYFKKIECFDSVEISGVEDRFNASLGTYHDLLKIIKDKDFLDNEENEDILEDIVLTLTLFEDREMIEERLKTYAHLFDDKVMKQLKRRRYTGWGRLSRKLINGIRDKQSGKTILDFLKSDGFANRNFMQLIHDDSLTFKEDIQKAQVSGQGDSLHEHIANLAGSPAIKKGILQTVKVVDELVKVMGRHKPENIVIEMARENQTTQKGQKNSRERMKRIEEGIKELGSQILKEHPVENTQLQNEKLYLYYLQNGRDMYVDQELDINRLSDYDVDHIVPQSFLKDDSIDNKVLTRSDKARGKSDNVPSEEVVKKMKNYWRQLLNAKLITQRKFDNLTKAERGGLSELDKAGFIKRQLVETRQITKHVAQILDSRMNTKYDENDKLIREVKVITLKSKLVSDFRKDFQFYKVREINNYHHAHDAYLNAVVGTALIKKYPKLESEFVYGDYKVYDVRKMIAKSEQEIGKATAKYFFYSNIMNFFKTEITLANGEIRKRPLIETNGETGEIVWDKGRDFATVRKVLSMPQVNIVKKTEVQTGGFSKESILPKRNSDKLIARKKDWDPKKYGGFDSPTVAYSVLVVAKVEKGKSKKLKSVKELLGITIMERSSFEKNPIDFLEAKGYKEVKKDLIIKLPKYSLFELENGRKRMLASAGELQKGNELALPSKYVNFLYLASHYEKLKGSPEDNEQKQLFVEQHKHYLDEIIEQISEFSKRVILADANLDKVLSAYNKHRDKPIREQAENIIHLFTLTNLGAPAAFKYFDTTIDRKRYTSTKEVLDATLIHQSITGLYETRIDLSQLGGDGGEAAAKGGSGGGGGVLNLEEEYRLHEKPVPSSIDPSWLQLFPTVWAERAGMGLANQVPPVVVELRSGASPVAVRQYPMSKEAREGIRPHIQKFLDLGVLVPCRSPWNTPLLPVKKPGTNDYRPVQDLREINKRVQDIHPTVPNPYNLLSSLPPSYTWYSVLDLKDAFFCLRLHPNSQPLFAFEWKDPEKGNTGQLTWTRLPQGFKNSPTLFNEALHRDLAPFRALNPQVVLLQYVDDLLVAAPTYEDCKKGTQKLLQELSKLGYRVSAKKAQLCQREVTYLGYLLKEGKRWLTPARKATVMKIPVPTTPRQVREFLGKAGFCRLFIPGFASLAAPLYPLTKPSIPFIWTEEHQQAFDHIKKALLSAPALALPDLTKPFTLYIDERAGVARGVLTQTLGPWRRPVAYLSKKLDPVASGWPTCLKAVAAVALLLKDADKLTLGQNVTVIASHSLESIVRQPPDRWMTNARMTHYQSLLLNERVSFAPPAVLNPATLLPVESEATPVHRCSEILAEETGTRRDLEDQPLPGVPTWYTDGSSFITEGKRRAGAPIVDGKRTVWASSLPEGTSAQKAELVALTQALRLAEGKNINIYTDSRYAFATAHIHGAIYKQRGWLTSAGKDIKNKEEILALLEAIHLPRRVAIIHCPGHQRGSNPVATGNRRADEAAKQAALSTRVLAGTTKPAGKRTADGSEFEKRTADGSEFESPKKKAKVE

SEQ ID NO: 6941 - protein, 2218 aa, synthetic construct
MPAAKRVKLDGGDKKYSIGLDIGTNSVGWAVITDEYKVPSKKFKVLGNTDRHSIKKNLIGALLFDSGETAEATRLKRTARRRYTRRKNRICYLQEIFSNEMAKVDDSFFHRLEESFLVEEDKKHERHPIFGNIVDEVAYHEKYPTIYHLRKKLVDSTDKADLRLIYLALAHMIKFRGHFLIEGDLNPDNSDVDKLFIQLVQTYNQLFEENPINASGVDAKAILSARLSKSRRLENLIAQLPGEKKNGLFGNLIALSLGLTPNFKSNFDLAEDAKLQLSKDTYDDDLDNLLAQIGDQYADLFLAAKNLSDAILLSDILRVNTEITKAPLSASMIKRYDEHHQDLTLLKALVRQQLPEKYKEIFFDQSKNGYAGYIDGGASQEEFYKFIKPILEKMDGTEELLVKLNREDLLRKQRTFDNGSIPHQIHLGELHAILRRQEDFYPFLKDNREKIEKILTFRIPYYVGPLARGNSRFAWMTRKSEETITPWNFEEVVDKGASAQSFIERMTNFDKNLPNEKVLPKHSLLYEYFTVYNELTKVKYVTEGMRKPAFLSGEQKKAIVDLLFKTNRKVTVKQLKEDYFKKIECFDSVEISGVEDRFNASLGTYHDLLKIIKDKDFLDNEENEDILEDIVLTLTLFEDREMIEERLKTYAHLFDDKVMKQLKRRRYTGWGRLSRKLINGIRDKQSGKTILDFLKSDGFANRNFMQLIHDDSLTFKEDIQKAQVSGQGDSLHEHIANLAGSPAIKKGILQTVKVVDELVKVMGRHKPENIVIEMARENQTTQKGQKNSRERMKRIEEGIKELGSQILKEHPVENTQLQNEKLYLYYLQNGRDMYVDQELDINRLSDYDVDHIVPQSFLKDDSIDNKVLTRSDKARGKSDNVPSEEVVKKMKNYWRQLLNAKLITQRKFDNLTKAERGGLSELDKAGFIKRQLVETRQITKHVAQILDSRMNTKYDENDKLIREVKVITLKSKLVSDFRKDFQFYKVREINNYHHAHDAYLNAVVGTALIKKYPKLESEFVYGDYKVYDVRKMIAKSEQEIGKATAKYFFYSNIMNFFKTEITLANGEIRKRPLIETNGETGEIVWDKGRDFATVRKVLSMPQVNIVKKTEVQTGGFSKESILPKRNSDKLIARKKDWDPKKYGGFDSPTVAYSVLVVAKVEKGKSKKLKSVKELLGITIMERSSFEKNPIDFLEAKGYKEVKKDLIIKLPKYSLFELENGRKRMLASAGELQKGNELALPSKYVNFLYLASHYEKLKGSPEDNEQKQLFVEQHKHYLDEIIEQISEFSKRVILADANLDKVLSAYNKHRDKPIREQAENIIHLFTLTNLGAPAAFKYFDTTIDRKRYTSTKEVLDATLIHQSITGLYETRIDLSQLGGDGGEAAAKGGSGGGGGTLGDQGSRGSDPLPEPRVTLTVEGIPTEFLVNTGAEHSVLTKPMGKMGSKRTVVAGATGSKVYPWTTKRLLKIGQKQVTHSFLVIPECPAPLLGRDLLTKLKAQIQFSTEGPQVTWEDRPAMCLVLNLEEEYRLHEKPVPPSIDPSWLQLFPMVWAEKAGMGLANQVPPVVVELKSDASPVAVRQYPMSKEAREGIRPHIQRFLDLGILVPCQSPWNTPLLPVKKPGTNDYRPVQDLREVNKRVQDIHPTVPNPYNLLSSLPPSHTWYSVLDLKDAFFCLKLHPNSQPLFAFEWRDPEKGNTGQLTWTRLPQGFKNSPTLFDEALHRDLASFRALNPQVVMLQYVDDLLVAAPTYRDCKEGTRRLLQELSKLGYRVSAKKAQLCREEVTYLGYLLKGGKRWLTPARKATVMKIPTPTTPRQVREFLGTAGFCRLWIPGFASLAAPLYPLTREKVPFTWTEAHQEAFGRIKEALLSAPALALPDLTKPFALYVDEKEGVARGVLTQTLGPWRRPVAYLSKKLDPVASGWPTCLKAIAAVALLLKDADKLTLGQNVLVIAPHNLESIVRQPPDRWMTNARMTHYQSLLLNERVSFAPPAILNPATLLPVESDDTPIHICSEILAEETGTRPDLRDQPLPGVPAWYTDGSSFIMDGRRQAGAAIVDNKRTVWASNLPEGTSAQKAELIALTQALRLAEGKSINIYTDSRYAFATAHVHGAIYKQRGLLTSAGKDIKNKEEILALLEAIHLPKRVAIIHCPGHQRGTDPVATGNRKADEAAKQAAQSTRILTETTKNAGKRTADGSEFEKRTADGSEFESPKKKAKVE

SEQ ID NO: 6942 - protein, 2127 aa, synthetic construct
MPAAKRVKLDGGDKKYSIGLDIGTNSVGWAVITDEYKVPSKKFKVLGNTDRHSIKKNLIGALLFDSGETAEATRLKRTARRRYTRRKNRICYLQEIFSNEMAKVDDSFFHRLEESFLVEEDKKHERHPIFGNIVDEVAYHEKYPTIYHLRKKLVDSTDKADLRLIYLALAHMIKFRGHFLIEGDLNPDNSDVDKLFIQLVQTYNQLFEENPINASGVDAKAILSARLSKSRRLENLIAQLPGEKKNGLFGNLIALSLGLTPNFKSNFDLAEDAKLQLSKDTYDDDLDNLLAQIGDQYADLFLAAKNLSDAILLSDILRVNTEITKAPLSASMIKRYDEHHQDLTLLKALVRQQLPEKYKEIFFDQSKNGYAGYIDGGASQEEFYKFIKPILEKMDGTEELLVKLNREDLLRKQRTFDNGSIPHQIHLGELHAILRRQEDFYPFLKDNREKIEKILTFRIPYYVGPLARGNSRFAWMTRKSEETITPWNFEEVVDKGASAQSFIERMTNFDKNLPNEKVLPKHSLLYEYFTVYNELTKVKYVTEGMRKPAFLSGEQKKAIVDLLFKTNRKVTVKQLKEDYFKKIECFDSVEISGVEDRFNASLGTYHDLLKIIKDKDFLDNEENEDILEDIVLTLTLFEDREMIEERLKTYAHLFDDKVMKQLKRRRYTGWGRLSRKLINGIRDKQSGKTILDFLKSDGFANRNFMQLIHDDSLTFKEDIQKAQVSGQGDSLHEHIANLAGSPAIKKGILQTVKVVDELVKVMGRHKPENIVIEMARENQTTQKGQKNSRERMKRIEEGIKELGSQILKEHPVENTQLQNEKLYLYYLQNGRDMYVDQELDINRLSDYDVDHIVPQSFLKDDSIDNKVLTRSDKARGKSDNVPSEEVVKKMKNYWRQLLNAKLITQRKFDNLTKAERGGLSELDKAGFIKRQLVETRQITKHVAQILDSRMNTKYDENDKLIREVKVITLKSKLVSDFRKDFQFYKVREINNYHHAHDAYLNAVVGTALIKKYPKLESEFVYGDYKVYDVRKMIAKSEQEIGKATAKYFFYSNIMNFFKTEITLANGEIRKRPLIETNGETGEIVWDKGRDFATVRKVLSMPQVNIVKKTEVQTGGFSKESILPKRNSDKLIARKKDWDPKKYGGFDSPTVAYSVLVVAKVEKGKSKKLKSVKELLGITIMERSSFEKNPIDFLEAKGYKEVKKDLIIKLPKYSLFELENGRKRMLASAGELQKGNELALPSKYVNFLYLASHYEKLKGSPEDNEQKQLFVEQHKHYLDEIIEQISEFSKRVILADANLDKVLSAYNKHRDKPIREQAENIIHLFTLTNLGAPAAFKYFDTTIDRKRYTSTKEVLDATLIHQSITGLYETRIDLSQLGGDGGEAAAKGGSGGGGGLLGRDLLTKLKAQIQFSTEGPQVTWEDRPAMCLVLNLEEEYRLHEKPVPPSIDPSWLQLFPMVWAEKAGMGLANQVPPVVVELKSDASPVAVRQYPMSKEAREGIRPHIQRFLDLGILVPCQSPWNTPLLPVKKPGTNDYRPVQDLREVNKRVQDIHPTVPNPYNLLSSLPPSHTWYSVLDLKDAFFCLKLHPNSQPLFAFEWRDPEKGNTGQLTWTRLPQGFKNSPTLFNEALHRDLASFRALNPQVVMLQYVDDLLVAAPTYRDCKEGTRRLLQELSKLGYRVSAKKAQLCREEVTYLGYLLKGGKRWLTPARKATVMKIPTPTTPRQVREFLGTAGFCRLWIPGFASLAAPLYPLTRPKVPFTWTEAHQEAFGRIKEALLSAPALALPDLTKPFALYVDEKEGVARGVLTQTLGPWRRPVAYLSKKLDPVASGWPTCLKAIAAVALLLKDADKLTLGQNVLVIAPHNLESIVRQPPDRWMTNARMTHYQSLLLNERVSFAPPAILNPATLLPVESDDTPIHICSEILAEETGTRPDLRDQPLPGVPAWYTDGSSFIMDGRRQAGAAIVDNKRTVWASNLPEGTSAQKAELIALTQALRLAEGKSINIYTDSRYAFATAHVHGAIYKQRGWLTSAGKDIKNKEEILALLEAIHLPKRVAIIHCPGHQRGTDPVATGNRKADEAAKQAAQSTRILTETTKNAGKRTADGSEFEKRTADGSEFESPKKKAKVE

SEQ ID NO: 6943 - protein, 2127 aa, synthetic construct
MPAAKRVKLDGGDKKYSIGLDIGTNSVGWAVITDEYKVPSKKFKVLGNTDRHSIKKNLIGALLFDSGETAEATRLKRTARRRYTRRKNRICYLQEIFSNEMAKVDDSFFHRLEESFLVEEDKKHERHPIFGNIVDEVAYHEKYPTIYHLRKKLVDSTDKADLRLIYLALAHMIKFRGHFLIEGDLNPDNSDVDKLFIQLVQTYNQLFEENPINASGVDAKAILSARLSKSRRLENLIAQLPGEKKNGLFGNLIALSLGLTPNFKSNFDLAEDAKLQLSKDTYDDDLDNLLAQIGDQYADLFLAAKNLSDAILLSDILRVNTEITKAPLSASMIKRYDEHHQDLTLLKALVRQQLPEKYKEIFFDQSKNGYAGYIDGGASQEEFYKFIKPILEKMDGTEELLVKLNREDLLRKQRTFDNGSIPHQIHLGELHAILRRQEDFYPFLKDNREKIEKILTFRIPYYVGPLARGNSRFAWMTRKSEETITPWNFEEVVDKGASAQSFIERMTNFDKNLPNEKVLPKHSLLYEYFTVYNELTKVKYVTEGMRKPAFLSGEQKKAIVDLLFKTNRKVTVKQLKEDYFKKIECFDSVEISGVEDRFNASLGTYHDLLKIIKDKDFLDNEENEDILEDIVLTLTLFEDREMIEERLKTYAHLFDDKVMKQLKRRRYTGWGRLSRKLINGIRDKQSGKTILDFLKSDGFANRNFMQLIHDDSLTFKEDIQKAQVSGQGDSLHEHIANLAGSPAIKKGILQTVKVVDELVKVMGRHKPENIVIEMARENQTTQKGQKNSRERMKRIEEGIKELGSQILKEHPVENTQLQNEKLYLYYLQNGRDMYVDQELDINRLSDYDVDHIVPQSFLKDDSIDNKVLTRSDKARGKSDNVPSEEVVKKMKNYWRQLLNAKLITQRKFDNLTKAERGGLSELDKAGFIKRQLVETRQITKHVAQILDSRMNTKYDENDKLIREVKVITLKSKLVSDFRKDFQFYKVREINNYHHAHDAYLNAVVGTALIKKYPKLESEFVYGDYKVYDVRKMIAKSEQEIGKATAKYFFYSNIMNFFKTEITLANGEIRKRPLIETNGETGEIVWDKGRDFATVRKVLSMPQVNIVKKTEVQTGGFSKESILPKRNSDKLIARKKDWDPKKYGGFDSPTVAYSVLVVAKVEKGKSKKLKSVKELLGITIMERSSFEKNPIDFLEAKGYKEVKKDLIIKLPKYSLFELENGRKRMLASAGELQKGNELALPSKYVNFLYLASHYEKLKGSPEDNEQKQLFVEQHKHYLDEIIEQISEFSKRVILADANLDKVLSAYNKHRDKPIREQAENIIHLFTLTNLGAPAAFKYFDTTIDRKRYTSTKEVLDATLIHQSITGLYETRIDLSQLGGDGGEAAAKGGSGGGGGLLGRDLLTKLKAQIQFSTEGPQVTWEDRPAMCLVLNLEEEYRLHEKPVPPSIDPSWLQLFPMVWAEKAGMGLANQVPPVVVELKSDASPVAVRQYPMSKEAREGIRPHIQRFLDLGILVPCQSPWNTPLLPVKKPGTNDYRPVQDLREVNKRVQDIHPTVPNPYNLLSSLPPSHTWYSVLDLKDAFFCLKLHPNSQPLFAFEWRDPEKGNTGQLTWTRLPQGFKNSPTLFNEALHRDLASFRALNPQVVMLQYVDDLLVAAPTYRDCKEGTRRLLQELSKLGYRVSAKKAQLCREEVTYLGYLLKGGKRWLTPARKATVMKIPTPTTPRQVREFLGKAGFCRLFIPGFASLAAPLYPLTRPKVPFTWTEAHQEAFGRIKEALLSAPALALPDLTKPFALYVDEKEGVARGVLTQTLGPWRRPVAYLSKKLDPVASGWPTCLKAIAAVALLLKDADKLTLGQNVLVIAPHNLESIVRQPPDRWMTNARMTHYQSLLLNERVSFAPPAILNPATLLPVESDDTPIHICSEILAEETGTRPDLRDQPLPGVPAWYTDGSSFIMDGRRQAGAAIVDNKRTVWASNLPEGTSAQKAELIALTQALRLAEGKSINIYTDSRYAFATAHVHGAIYKQRGWLTSAGKDIKNKEEILALLEAIHLPKRVAIIHCPGHQRGTDPVATGNRKADEAAKQAAQSTRILTETTKNAGKRTADGSEFEKRTADGSEFESPKKKAKVE

SEQ ID NO: 6944 - protein, 2218 aa, synthetic construct
MPAAKRVKLDGGDKKYSIGLDIGTNSVGWAVITDEYKVPSKKFKVLGNTDRHSIKKNLIGALLFDSGETAEATRLKRTARRRYTRRKNRICYLQEIFSNEMAKVDDSFFHRLEESFLVEEDKKHERHPIFGNIVDEVAYHEKYPTIYHLRKKLVDSTDKADLRLIYLALAHMIKFRGHFLIEGDLNPDNSDVDKLFIQLVQTYNQLFEENPINASGVDAKAILSARLSKSRRLENLIAQLPGEKKNGLFGNLIALSLGLTPNFKSNFDLAEDAKLQLSKDTYDDDLDNLLAQIGDQYADLFLAAKNLSDAILLSDILRVNTEITKAPLSASMIKRYDEHHQDLTLLKALVRQQLPEKYKEIFFDQSKNGYAGYIDGGASQEEFYKFIKPILEKMDGTEELLVKLNREDLLRKQRTFDNGSIPHQIHLGELHAILRRQEDFYPFLKDNREKIEKILTFRIPYYVGPLARGNSRFAWMTRKSEETITPWNFEEVVDKGASAQSFIERMTNFDKNLPNEKVLPKHSLLYEYFTVYNELTKVKYVTEGMRKPAFLSGEQKKAIVDLLFKTNRKVTVKQLKEDYFKKIECFDSVEISGVEDRFNASLGTYHDLLKIIKDKDFLDNEENEDILEDIVLTLTLFEDREMIEERLKTYAHLFDDKVMKQLKRRRYTGWGRLSRKLINGIRDKQSGKTILDFLKSDGFANRNFMQLIHDDSLTFKEDIQKAQVSGQGDSLHEHIANLAGSPAIKKGILQTVKVVDELVKVMGRHKPENIVIEMARENQTTQKGQKNSRERMKRIEEGIKELGSQILKEHPVENTQLQNEKLYLYYLQNGRDMYVDQELDINRLSDYDVDHIVPQSFLKDDSIDNKVLTRSDKARGKSDNVPSEEVVKKMKNYWRQLLNAKLITQRKFDNLTKAERGGLSELDKAGFIKRQLVETRQITKHVAQILDSRMNTKYDENDKLIREVKVITLKSKLVSDFRKDFQFYKVREINNYHHAHDAYLNAVVGTALIKKYPKLESEFVYGDYKVYDVRKMIAKSEQEIGKATAKYFFYSNIMNFFKTEITLANGEIRKRPLIETNGETGEIVWDKGRDFATVRKVLSMPQVNIVKKTEVQTGGFSKESILPKRNSDKLIARKKDWDPKKYGGFDSPTVAYSVLVVAKVEKGKSKKLKSVKELLGITIMERSSFEKNPIDFLEAKGYKEVKKDLIIKLPKYSLFELENGRKRMLASAGELQKGNELALPSKYVNFLYLASHYEKLKGSPEDNEQKQLFVEQHKHYLDEIIEQISEFSKRVILADANLDKVLSAYNKHRDKPIREQAENIIHLFTLTNLGAPAAFKYFDTTIDRKRYTSTKEVLDATLIHQSITGLYETRIDLSQLGGDGGEAAAKGGSGGGGGTLGDQGSRGSDPLPEPRVTLTVEGIPTEFLVNTGAEHSVLTKPMGKMGSKRTVVAGATGSKVYPWTTKRLLKIGQKQVTHSFLVIPECPAPLLGRDLLTKLKAQIQFSTEGPQVTWEDRPAMCLVLNLEEEYRLHEKPVPPSIDPSWLQLFPMVWAEKAGMGLANQVPPVVVELKSDASPVAVRQYPMSKEAREGIRPHIQRFLDLGILVPCQSPWNTPLLPVKKPGTNDYRPVQDLREVNKRVQDIHPTVPNPYNLLSSLPPSHTWYSVLDLKDAFFCLKLHPNSQPLFAFEWRDPEKGNTGQLTWTRLPQGFKNSPTLFNEALHRDLASFRALNPQVVMLQYVDDLLVAAPTYRDCKEGTRRLLQELSKLGYRVSAKKAQLCREEVTYLGYLLKGGKRWLTPARKATVMKIPTPTTPRQVREFLGTAGFCRLWIPGFASLAAPLYPLTRPKVPFTWTEAHQEAFGRIKEALLSAPALALPDLTKPFALYVDEKEGVARGVLTQTLGPWRRPVAYLSKKLDPVASGWPTCLKAIAAVALLLKDADKLTLGQNVLVIAPHNLESIVRQPPDRWMTNARMTHYQSLLLNERVSFAPPAILNPATLLPVESDDTPIHICSEILAEETGTRPDLRDQPLPGVPAWYTDGSSFIMDGRRQAGAAIVDNKRTVWASNLPEGTSAQKAELIALTQALRLAEGKSINIYTDSRYAFATAHVHGAIYKQRGWLTSAGKDIKNKEEILALLEAIHLPKRVAIIHCPGHQRGTDPVATGNRKADEAAKQAAQSTRILTETTKNAGKRTADGSEFEKRTADGSEFESPKKKAKVE

SEQ ID NO: 6945 - protein, 2218 aa, synthetic construct
MPAAKRVKLDGGDKKYSIGLDIGTNSVGWAVITDEYKVPSKKFKVLGNTDRHSIKKNLIGALLFDSGETAEATRLKRTARRRYTRRKNRICYLQEIFSNEMAKVDDSFFHRLEESFLVEEDKKHERHPIFGNIVDEVAYHEKYPTIYHLRKKLVDSTDKADLRLIYLALAHMIKFRGHFLIEGDLNPDNSDVDKLFIQLVQTYNQLFEENPINASGVDAKAILSARLSKSRRLENLIAQLPGEKKNGLFGNLIALSLGLTPNFKSNFDLAEDAKLQLSKDTYDDDLDNLLAQIGDQYADLFLAAKNLSDAILLSDILRVNTEITKAPLSASMIKRYDEHHQDLTLLKALVRQQLPEKYKEIFFDQSKNGYAGYIDGGASQEEFYKFIKPILEKMDGTEELLVKLNREDLLRKQRTFDNGSIPHQIHLGELHAILRRQEDFYPFLKDNREKIEKILTFRIPYYVGPLARGNSRFAWMTRKSEETITPWNFEEVVDKGASAQSFIERMTNFDKNLPNEKVLPKHSLLYEYFTVYNELTKVKYVTEGMRKPAFLSGEQKKAIVDLLFKTNRKVTVKQLKEDYFKKIECFDSVEISGVEDRFNASLGTYHDLLKIIKDKDFLDNEENEDILEDIVLTLTLFEDREMIEERLKTYAHLFDDKVMKQLKRRRYTGWGRLSRKLINGIRDKQSGKTILDFLKSDGFANRNFMQLIHDDSLTFKEDIQKAQVSGQGDSLHEHIANLAGSPAIKKGILQTVKVVDELVKVMGRHKPENIVIEMARENQTTQKGQKNSRERMKRIEEGIKELGSQILKEHPVENTQLQNEKLYLYYLQNGRDMYVDQELDINRLSDYDVDHIVPQSFLKDDSIDNKVLTRSDKARGKSDNVPSEEVVKKMKNYWRQLLNAKLITQRKFDNLTKAERGGLSELDKAGFIKRQLVETRQITKHVAQILDSRMNTKYDENDKLIREVKVITLKSKLVSDFRKDFQFYKVREINNYHHAHDAYLNAVVGTALIKKYPKLESEFVYGDYKVYDVRKMIAKSEQEIGKATAKYFFYSNIMNFFKTEITLANGEIRKRPLIETNGETGEIVWDKGRDFATVRKVLSMPQVNIVKKTEVQTGGFSKESILPKRNSDKLIARKKDWDPKKYGGFDSPTVAYSVLVVAKVEKGKSKKLKSVKELLGITIMERSSFEKNPIDFLEAKGYKEVKKDLIIKLPKYSLFELENGRKRMLASAGELQKGNELALPSKYVNFLYLASHYEKLKGSPEDNEQKQLFVEQHKHYLDEIIEQISEFSKRVILADANLDKVLSAYNKHRDKPIREQAENIIHLFTLTNLGAPAAFKYFDTTIDRKRYTSTKEVLDATLIHQSITGLYETRIDLSQLGGDGGEAAAKGGSGGGGGTLGDQGSRGSDPLPEPRVTLTVEGIPTEFLVNTGAEHSVLTKPMGKMGSKRTVVAGATGSKVYPWTTKRLLKIGQKQVTHSFLVIPECPAPLLGRDLLTKLKAQIQFSTEGPQVTWEDRPAMCLVLNLEEEYRLHEKPVPPSIDPSWLQLFPMVWAEKAGMGLANQVPPVVVELKSDASPVAVRQYPMSKEAREGIRPHIQRFLDLGILVPCQSPWNTPLLPVKKPGTNDYRPVQDLREVNKRVQDIHPTVPNPYNLLSSLPPSHTWYSVLDLKDAFFCLKLHPNSQPLFAFEWRDPEKGNTGQLTWTRLPQGFKNSPTLFNEALHRDLASFRALNPQVVMLQYVDDLLVAAPTYRDCKEGTRRLLQELSKLGYRVSAKKAQLCREEVTYLGYLLKGGKRWLTPARKATVMKIPTPTTPRQVREFLGKAGFCRLFIPGFASLAAPLYPLTRPKVPFTWTEAHQEAFGRIKEALLSAPALALPDLTKPFALYVDEKEGVARGVLTQTLGPWRRPVAYLSKKLDPVASGWPTCLKAIAAVALLLKDADKLTLGQNVLVIAPHNLESIVRQPPDRWMTNARMTHYQSLLLNERVSFAPPAILNPATLLPVESDDTPIHICSEILAEETGTRPDLRDQPLPGVPAWYTDGSSFIMDGRRQAGAAIVDNKRTVWASNLPEGTSAQKAELIALTQALRLAEGKSINIYTDSRYAFATAHVHGAIYKQRGWLTSAGKDIKNKEEILALLEAIHLPKRVAIIHCPGHQRGTDPVATGNRKADEAAKQAAQSTRILTETTKNAGKRTADGSEFEKRTADGSEFESPKKKAKVE

SEQ ID NO: 6946 - protein, 2096 aa, synthetic construct
MPAAKRVKLDGGDKKYSIGLDIGTNSVGWAVITDEYKVPSKKFKVLGNTDRHSIKKNLIGALLFDSGETAEATRLKRTARRRYTRRKNRICYLQEIFSNEMAKVDDSFFHRLEESFLVEEDKKHERHPIFGNIVDEVAYHEKYPTIYHLRKKLVDSTDKADLRLIYLALAHMIKFRGHFLIEGDLNPDNSDVDKLFIQLVQTYNQLFEENPINASGVDAKAILSARLSKSRRLENLIAQLPGEKKNGLFGNLIALSLGLTPNFKSNFDLAEDAKLQLSKDTYDDDLDNLLAQIGDQYADLFLAAKNLSDAILLSDILRVNTEITKAPLSASMIKRYDEHHQDLTLLKALVRQQLPEKYKEIFFDQSKNGYAGYIDGGASQEEFYKFIKPILEKMDGTEELLVKLNREDLLRKQRTFDNGSIPHQIHLGELHAILRRQEDFYPFLKDNREKIEKILTFRIPYYVGPLARGNSRFAWMTRKSEETITPWNFEEVVDKGASAQSFIERMTNFDKNLPNEKVLPKHSLLYEYFTVYNELTKVKYVTEGMRKPAFLSGEQKKAIVDLLFKTNRKVTVKQLKEDYFKKIECFDSVEISGVEDRFNASLGTYHDLLKIIKDKDFLDNEENEDILEDIVLTLTLFEDREMIEERLKTYAHLFDDKVMKQLKRRRYTGWGRLSRKLINGIRDKQSGKTILDFLKSDGFANRNFMQLIHDDSLTFKEDIQKAQVSGQGDSLHEHIANLAGSPAIKKGILQTVKVVDELVKVMGRHKPENIVIEMARENQTTQKGQKNSRERMKRIEEGIKELGSQILKEHPVENTQLQNEKLYLYYLQNGRDMYVDQELDINRLSDYDVDHIVPQSFLKDDSIDNKVLTRSDKARGKSDNVPSEEVVKKMKNYWRQLLNAKLITQRKFDNLTKAERGGLSELDKAGFIKRQLVETRQITKHVAQILDSRMNTKYDENDKLIREVKVITLKSKLVSDFRKDFQFYKVREINNYHHAHDAYLNAVVGTALIKKYPKLESEFVYGDYKVYDVRKMIAKSEQEIGKATAKYFFYSNIMNFFKTEITLANGEIRKRPLIETNGETGEIVWDKGRDFATVRKVLSMPQVNIVKKTEVQTGGFSKESILPKRNSDKLIARKKDWDPKKYGGFDSPTVAYSVLVVAKVEKGKSKKLKSVKELLGITIMERSSFEKNPIDFLEAKGYKEVKKDLIIKLPKYSLFELENGRKRMLASAGELQKGNELALPSKYVNFLYLASHYEKLKGSPEDNEQKQLFVEQHKHYLDEIIEQISEFSKRVILADANLDKVLSAYNKHRDKPIREQAENIIHLFTLTNLGAPAAFKYFDTTIDRKRYTSTKEVLDATLIHQSITGLYETRIDLSQLGGDGGEAAAKGGSGGGGGTLNLEDEYRLYETSAEPEVSPGSTWLSDFPQAWAETGGMGLAVRQAPLIIPLKATSTPVSIKQYPMSQEAKLGIKPHIQRLLDQGILVPCQSPWNTPLLPVKKPGTNDYRPVQDLREVNKRVEDIHPTVPNPYNLLSGLPPSHRWYTVLDLKDAFFCLRLHPTSQPLFAFEWRDPGMGISGQLTWTRLPQGFKNSPTLFNEALHRDLADFRIQHPDLILLQYVDDILLAATSELDCQQGTRALLLTLGNLGYRASAKKAQLCQKQVKYLGYLLKEGQRWLTEARKETVMGQPTPKTPRQLREFLGTAGFCRLWIPGFAEMAAPLYPLTKPGTLFNWGPDQQKAYQEIKQALLTAPALGLPDLTKPFELFVDEKQGYAKGVLTQKLGPWRRPVAYLSKKLDPVAAGWPPCLRMVAAIAVLRKDAGKLTMGQPLVILAPHAVEALVKQPPDRWLSNARMTHYQAMLLDTDRVQFGPVVALNPATLLPLPEEGAPHDCLEILAETHGTRPDLTDQPIPDADHTWYTDGSSFLQEGQRKAGAAVTTETEVIWARALPAGTSAQRAELIALTQALKMAEGKRLNVYTDSRYAFATAHIHGEIYRRRGWLTSEGREIKNKSEILALLKALFLPKRLSIIHCLGHQKGDSAEARGNRLADQAAREAAIKTPPDTSTLLAGKRTADGSEFEKRTADGSEFESPKKKAKVE

SEQ ID NO: 6947 - protein, 2096 aa, synthetic construct
MPAAKRVKLDGGDKKYSIGLDIGTNSVGWAVITDEYKVPSKKFKVLGNTDRHSIKKNLIGALLFDSGETAEATRLKRTARRRYTRRKNRICYLQEIFSNEMAKVDDSFFHRLEESFLVEEDKKHERHPIFGNIVDEVAYHEKYPTIYHLRKKLVDSTDKADLRLIYLALAHMIKFRGHFLIEGDLNPDNSDVDKLFIQLVQTYNQLFEENPINASGVDAKAILSARLSKSRRLENLIAQLPGEKKNGLFGNLIALSLGLTPNFKSNFDLAEDAKLQLSKDTYDDDLDNLLAQIGDQYADLFLAAKNLSDAILLSDILRVNTEITKAPLSASMIKRYDEHHQDLTLLKALVRQQLPEKYKEIFFDQSKNGYAGYIDGGASQEEFYKFIKPILEKMDGTEELLVKLNREDLLRKQRTFDNGSIPHQIHLGELHAILRRQEDFYPFLKDNREKIEKILTFRIPYYVGPLARGNSRFAWMTRKSEETITPWNFEEVVDKGASAQSFIERMTNFDKNLPNEKVLPKHSLLYEYFTVYNELTKVKYVTEGMRKPAFLSGEQKKAIVDLLFKTNRKVTVKQLKEDYFKKIECFDSVEISGVEDRFNASLGTYHDLLKIIKDKDFLDNEENEDILEDIVLTLTLFEDREMIEERLKTYAHLFDDKVMKQLKRRRYTGWGRLSRKLINGIRDKQSGKTILDFLKSDGFANRNFMQLIHDDSLTFKEDIQKAQVSGQGDSLHEHIANLAGSPAIKKGILQTVKVVDELVKVMGRHKPENIVIEMARENQTTQKGQKNSRERMKRIEEGIKELGSQILKEHPVENTQLQNEKLYLYYLQNGRDMYVDQELDINRLSDYDVDHIVPQSFLKDDSIDNKVLTRSDKARGKSDNVPSEEVVKKMKNYWRQLLNAKLITQRKFDNLTKAERGGLSELDKAGFIKRQLVETRQITKHVAQILDSRMNTKYDENDKLIREVKVITLKSKLVSDFRKDFQFYKVREINNYHHAHDAYLNAVVGTALIKKYPKLESEFVYGDYKVYDVRKMIAKSEQEIGKATAKYFFYSNIMNFFKTEITLANGEIRKRPLIETNGETGEIVWDKGRDFATVRKVLSMPQVNIVKKTEVQTGGFSKESILPKRNSDKLIARKKDWDPKKYGGFDSPTVAYSVLVVAKVEKGKSKKLKSVKELLGITIMERSSFEKNPIDFLEAKGYKEVKKDLIIKLPKYSLFELENGRKRMLASAGELQKGNELALPSKYVNFLYLASHYEKLKGSPEDNEQKQLFVEQHKHYLDEIIEQISEFSKRVILADANLDKVLSAYNKHRDKPIREQAENIIHLFTLTNLGAPAAFKYFDTTIDRKRYTSTKEVLDATLIHQSITGLYETRIDLSQLGGDGGEAAAKGGSGGGGGLGIEDEYRLHETSTEPDVSLGSTWLSDFPQAWAETGGMGLAVRQAPLIIPLKATSTPVSIQQYPMSHEARLGIKPHIQRLLDQGILVPCQSPWNTPLLPVKKPGTNDYRPVQDLREVNKRVEDIHPTVPNPYNLLSGLPPSHQWYTVLDLKDAFFCLRLHPTSQPLFAFEWRDPGMGISGQLTWTRLPQGFKNSPTLFNEALHRDLADFRIQHPDLILLQYVDDILLAATSELDCQQGTRALLQTLGDLGYRASAKKAQICQKQVKYLGYLLREGQRWLTEARKETVMGQPVPKTPRQLREFLGKAGFCRLFIPGFAEMAAPLYPLTKPGTLFSWGPDQQKAYQEIKQALLTAPALGLPDLTKPFELFVDEKQGYAKGVLTQKLGPWRRPVAYLSKKLDPVAAGWPPCLRMVAAIAVLTKDAGKLTMGQPLVILAPHAVEALVKQPPDRWLSNARMTHYQAMLLDTDRVQFGPVVALNPATLLPLPEEGAPHDCLEILAETHGTRPDLTDQPIPDADHTWYTDGSSFLQEGQRKAGAAVTTETEVIWAGALPAGTSAQRAELIALTQALKMAEGKRLNVYTDSRYAFATAHIHGEIYRRRGWLTSEGREIKNKSEILALLKALFLPKRLSIIHCLGHQKGDSAEARGNRLADQAAREAAIKTPPDTSTLLIAGKRTADGSEFEKRTADGSEFESPKKKAKVE

SEQ ID NO: 6948 - protein, 2096 aa, synthetic construct; identical to SEQ ID NO: 6947

SEQ ID NO: 6949 - protein, 2096 aa, synthetic construct
MPAAKRVKLDGGDKKYSIGLDIGTNSVGWAVITDEYKVPSKKFKVLGNTDRHSIKKNLIGALLFDSGETAEATRLKRTARRRYTRRKNRICYLQEIFSNEMAKVDDSFFHRLEESFLVEEDKKHERHPIFGNIVDEVAYHEKYPTIYHLRKKLVDSTDKADLRLIYLALAHMIKFRGHFLIEGDLNPDNSDVDKLFIQLVQTYNQLFEENPINASGVDAKAILSARLSKSRRLENLIAQLPGEKKNGLFGNLIALSLGLTPNFKSNFDLAEDAKLQLSKDTYDDDLDNLLAQIGDQYADLFLAAKNLSDAILLSDILRVNTEITKAPLSASMIKRYDEHHQDLTLLKALVRQQLPEKYKEIFFDQSKNGYAGYIDGGASQEEFYKFIKPILEKMDGTEELLVKLNREDLLRKQRTFDNGSIPHQIHLGELHAILRRQEDFYPFLKDNREKIEKILTFRIPYYVGPLARGNSRFAWMTRKSEETITPWNFEEVVDKGASAQSFIERMTNFDKNLPNEKVLPKHSLLYEYFTVYNELTKVKYVTEGMRKPAFLSGEQKKAIVDLLFKTNRKVTVKQLKEDYFKKIECFDSVEISGVEDRFNASLGTYHDLLKIIKDKDFLDNEENEDILEDIVLTLTLFEDREMIEERLKTYAHLFDDKVMKQLKRRRYTGWGRLSRKLINGIRDKQSGKTILDFLKSDGFANRNFMQLIHDDSLTFKEDIQKAQVSGQGDSLHEHIANLAGSPAIKKGILQTVKVVDELVKVMGRHKPENIVIEMARENQTTQKGQKNSRERMKRIEEGIKELGSQILKEHPVENTQLQNEKLYLYYLQNGRDMYVDQELDINRLSDYDVDHIVPQSFLKDDSIDNKVLTRSDKARGKSDNVPSEEVVKKMKNYWRQLLNAKLITQRKFDNLTKAERGGLSELDKAGFIKRQLVETRQITKHVAQILDSRMNTKYDENDKLIREVKVITLKSKLVSDFRKDFQFYKVREINNYHHAHDAYLNAVVGTALIKKYPKLESEFVYGDYKVYDVRKMIAKSEQEIGKATAKYFFYSNIMNFFKTEITLANGEIRKRPLIETNGETGEIVWDKGRDFATVRKVLSMPQVNIVKKTEVQTGGFSKESILPKRNSDKLIARKKDWDPKKYGGFDSPTVAYSVLVVAKVEKGKSKKLKSVKELLGITIMERSSFEKNPIDFLEAKGYKEVKKDLIIKLPKYSLFELENGRKRMLASAGELQKGNELALPSKYVNFLYLASHYEKLKGSPEDNEQKQLFVEQHKHYLDEIIEQISEFSKRVILADANLDKVLSAYNKHRDKPIREQAENIIHLFTLTNLGAPAAFKYFDTTIDRKRYTSTKEVLDATLIHQSITGLYETRIDLSQLGGDGGEAAAKGGSGGGGGTLNIEDEYRLHETSKEPDVSLGSTWLSDFPQAWAETGGMGLAVRQAPLIIPLKATSTPVSIKQYPMSQEARLGIKPHIQRLLDQGILVPCQSPWNTPLLPVKKPGTNDYRPVQDLREVNKRVEDIHPTVPNPYNLLSGLPPSHQWYTVLDLKDAFFCLRLHPTSQPLFAFEWRDPEMGISGQLTWTRLPQGFKNSPTLFNEALHRDLAGFRIQHPDLILLQYVDDLLLAATSELDCQQGTRALLQTLGDLGYRASAKKAQICQKQVKYLGYLLKEGQRWLTEARKETVMGQPIPKTPRQLREFLGTAGFCRLWIPGFAEMAAPLYPLTKPGTLFNWGPDQQKAFQEIKQALLTAPALGLPDLTKPFELFVDEKQGYAKGVLTQKLGPWRRPVAYLSKKLDPVAAGWPPCLRMVAAIAVLTKDAGKLTMGQPLVILAPHAVEALVKQPPDRWLSNARMTHYQALLLDTDRVQFGPVVALNPATLLPLPEEGLQHDCLDILAEAHGTRSDLMDQPLPDADHTWYTDGSSFLQEGQRKAGAAVTTETEVIWARALPAGTSAQRAELIALTQALKMAEGKKLNVYTDSRYAFATAHIHGEIYRRRGWLTSEGKEIKNKDEILALLKALFLPKRLSIIHCPGHQKGNSAEARGNRMADQAAREVATRETPETSTLLAGKRTADGSEFEKRTADGSEFESPKKKAKVE

SEQ ID NO: 6950 - protein, 2090 aa, synthetic construct
MPAAKRVKLDGGDKKYSIGLDIGTNSVGWAVITDEYKVPSKKFKVLGNTDRHSIKKNLIGALLFDSGETAEATRLKRTARRRYTRRKNRICYLQEIFSNEMAKVDDSFFHRLEESFLVEEDKKHERHPIFGNIVDEVAYHEKYPTIYHLRKKLVDSTDKADLRLIYLALAHMIKFRGHFLIEGDLNPDNSDVDKLFIQLVQTYNQLFEENPINASGVDAKAILSARLSKSRRLENLIAQLPGEKKNGLFGNLIALSLGLTPNFKSNFDLAEDAKLQLSKDTYDDDLDNLLAQIGDQYADLFLAAKNLSDAILLSDILRVNTEITKAPLSASMIKRYDEHHQDLTLLKALVRQQLPEKYKEIFFDQSKNGYAGYIDGGASQEEFYKFIKPILEKMDGTEELLVKLNREDLLRKQRTFDNGSIPHQIHLGELHAILRRQEDFYPFLKDNREKIEKILTFRIPYYVGPLARGNSRFAWMTRKSEETITPWNFEEVVDKGASAQSFIERMTNFDKNLPNEKVLPKHSLLYEYFTVYNELTKVKYVTEGMRKPAFLSGEQKKAIVDLLFKTNRKVTVKQLKEDYFKKIECFDSVEISGVEDRFNASLGTYHDLLKIIKDKDFLDNEENEDILEDIVLTLTLFEDREMIEERLKTYAHLFDDKVMKQLKRRRYTGWGRLSRKLINGIRDKQSGKTILDFLKSDGFANRNFMQLIHDDSLTFKEDIQKAQVSGQGDSLHEHIANLAGSPAIKKGILQTVKVVDELVKVMGRHKPENIVIEMARENQTTQKGQKNSRERMKRIEEGIKELGSQILKEHPVENTQLQNEKLYLYYLQNGRDMYVDQELDINRLSDYDVDHIVPQSFLKDDSIDNKVLTRSDKARGKSDNVPSEEVVKKMKNYWRQLLNAKLITQRKFDNLTKAERGGLSELDKAGFIKRQLVETRQITKHVAQILDSRMNTKYDENDKLIREVKVITLKSKLVSDFRKDFQFYKVREINNYHHAHDAYLNAVVGTALIKKYPKLESEFVYGDYKVYDVRKMIAKSEQEIGKATAKYFFYSNIMNFFKTEITLANGEIRKRPLIETNGETGEIVWDKGRDFATVRKVLSMPQVNIVKKTEVQTGGFSKESILPKRNSDKLIARKKDWDPKKYGGFDSPTVAYSVLVVAKVEKGKSKKLKSVKELLGITIMERSSFEKNPIDFLEAKGYKEVKKDLIIKLPKYSLFELENGRKRMLASAGELQKGNELALPSKYVNFLYLASHYEKLKGSPEDNEQKQLFVEQHKHYLDEIIEQISEFSKRVILADANLDKVLSAYNKHRDKPIREQAENIIHLFTLTNLGAPAAFKYFDTTIDRKRYTSTKEVLDATLIHQSITGLYETRIDLSQLGGDGGEAAAKGGSGGGGGTLQLDDEYRLYSPLVKPDQNIQFWLEQFPQAWAETAGMGLAKQVPPQVIQLKASATPVSVRQYPLSKEAQEGIRPHVQRLIQQGILVPVQSPWNTPLLPVRKPGTNDYRPVQDLREVNKRVQDIHPTVPNPYNLLCALPPQRSWYTVLDLKDAFFCLRLHPTSQPLFAFEWRDPGTGRTGQLTWTRLPQGFKNSPTIFDEALHRDLANFRIQHPQVTLLQYVDDLLLAGATKQDCLEGTKALLLELSDLGYRASAKKAQICRREVTYLGYSLRDGQRWLTEARKKTVVQIPAPTTAKQVREFLGTAGFCRLWIPGFATLAAPLYPLTKEKGEFSWAPEHQKAFDAIKKALLSAPALALPDVTKPFTLYVDERKGVARGVLTQTLGPWRRPVAYLSKKLDPVASGWPVCLKAIAAVAILVKDADKLTLGQNITVIAPHALENIVRQPPDRWMTNARMTHYQSLLLTERVTFAPPAALNPATLLPEETDEPVTHDCHQLLIEETGVRKDLTDIPLTGEVLTWFTDGSSYVVEGKRMAGAAVVDGTRTIWASSLPEGTSAQKAELMALTQALRLAEGKSINIYTDSRYAFATAHVHGAIYKQRGLLTSAGREIKNKEEILSLLEALHLPKRLAIIHCPGHQKAKDPISRGNQMADRVAKQAAQGVNLLAGKRTADGSEFEKRTADGSEFESPKKKAKVE

SEQ ID NO: 6951 - protein, 2087 aa, synthetic construct
MPAAKRVKLDGGDKKYSIGLDIGTNSVGWAVITDEYKVPSKKFKVLGNTDRHSIKKNLIGALLFDSGETAEATRLKRTARRRYTRRKNRICYLQEIFSNEMAKVDDSFFHRLEESFLVEEDKKHERHPIFGNIVDEVAYHEKYPTIYHLRKKLVDSTDKADLRLIYLALAHMIKFRGHFLIEGDLNPDNSDVDKLFIQLVQTYNQLFEENPINASGVDAKAILSARLSKSRRLENLIAQLPGEKKNGLFGNLIALSLGLTPNFKSNFDLAEDAKLQLSKDTYDDDLDNLLAQIGDQYADLFLAAKNLSDAILLSDILRVNTEITKAPLSASMIKRYDEHHQDLTLLKALVRQQLPEKYKEIFFDQSKNGYAGYIDGGASQEEFYKFIKPILEKMDGTEELLVKLNREDLLRKQRTFDNGSIPHQIHLGELHAILRRQEDFYPFLKDNREKIEKILTFRIPYYVGPLARGNSRFAWMTRKSEETITPWNFEEVVDKGASAQSFIERMTNFDKNLPNEKVLPKHSLLYEYFTVYNELTKVKYVTEGMRKPAFLSGEQKKAIVDLLFKTNRKVTVKQLKEDYFKKIECFDSVEISGVEDRFNASLGTYHDLLKIIKDKDFLDNEENEDILEDIVLTLTLFEDREMIEERLKTYAHLFDDKVMKQLKRRRYTGWGRLSRKLINGIRDKQSGKTILDFLKSDGFANRNFMQLIHDDSLTFKEDIQKAQVSGQGDSLHEHIANLAGSPAIKKGILQTVKVVDELVKVMGRHKPENIVIEMARENQTTQKGQKNSRERMKRIEEGIKELGSQILKEHPVENTQLQNEKLYLYYLQNGRDMYVDQELDINRLSDYDVDHIVPQSFLKDDSIDNKVLTRSDKARGKSDNVPSEEVVKKMKNYWRQLLNAKLITQRKFDNLTKAERGGLSELDKAGFIKRQLVETRQITKHVAQILDSRMNTKYDENDKLIREVKVITLKSKLVSDFRKDFQFYKVREINNYHHAHDAYLNAVVGTALIKKYPKLESEFVYGDYKVYDVRKMIAKSEQEIGKATAKYFFYSNIMNFFKTEITLANGEIRKRPLIETNGETGEIVWDKGRDFATVRKVLSMPQVNIVKKTEVQTGGFSKESILPKRNSDKLIARKKDWDPKKYGGFDSPTVAYSVLVVAKVEKGKSKKLKSVKELLGITIMERSSFEKNPIDFLEAKGYKEVKKDLIIKLPKYSLFELENGRKRMLASAGELQKGNELALPSKYVNFLYLASHYEKLKGSPEDNEQKQLFVEQHKHYLDEIIEQISEFSKRVILADANLDKVLSAYNKHRDKPIREQAENIIHLFTLTNLGAPAAFKYFDTTIDRKRYTSTKEVLDATLIHQSITGLYETRIDLSQLGGDGGEAAAKGGSGGGGGIPWLMKKPLQLTTLVPLQEYEERLLKQTMLTGSYKEKLQSLFLKYDALWQHWENQVGHRRIKPHHIATGTVNPRPQKQYPINPKAKASIQTVINDLLKQGVLIQQNSIMNTPVYPVPKPDGKWRMVLDYREVNKTIPLIAAQNQHSAGILSSIFRGKYKTTLDLSNGFWAHSITPESYWLTAFTWLGQQYCWTRLPQGFLNSPALFTADVVDLLKEVPNVQVYVDDIYISHDDPREHLEQLEKVFSLLLNAGYVVSLKKSEIAQHEVEFLGFNITKEGRGLTETFKQKLLNITPPRDLKQLQSILGLLNFARNFIPNFSELVKPLYNIIATANGKYITWTTDNSQQLQNIISMLNSAENLEERNPEVRLIMKVNTSPSAGYIRFYNEFAKRPIMYLNYVYTKAEVKFTNTEKLLTTIHKGLIKALDLGMGQEILVYSPIVSMTKIQKTPLPERKALPIRWITWMSYLEDPRIQFHYDKTLPELQQVPTVTDDIIAKIKHPSEFSMVFYTDGSAIKHPNVNKSHNAGMGIAQVQFKPEFTVINTWSIPLGDHTAQLAEVAAVEFACKKALKIDGPVLIVTDSFYVAESVNKELPYWQSNGFFNNKKKPLKHVSKWKSIADCIQLKPDIIIIHEKGHQPTASTFHTEGNNLADKLATQGSYVVNAGKRTADGSEFEKRTADGSEFESPKKKAKVE

SEQ ID NO: 6952 - protein, 2176 aa, synthetic construct
MPAAKRVKLDGGDKKYSIGLDIGTNSVGWAVITDEYKVPSKKFKVLGNTDRHSIKKNLIGALLFDSGETAEATRLKRTARRRYTRRKNRICYLQEIFSNEMAKVDDSFFHRLEESFLVEEDKKHERHPIFGNIVDEVAYHEKYPTIYHLRKKLVDSTDKADLRLIYLALAHMIKFRGHFLIEGDLNPDNSDVDKLFIQLVQTYNQLFEENPINASGVDAKAILSARLSKSRRLENLIAQLPGEKKNGLFGNLIALSLGLTPNFKSNFDLAEDAKLQLSKDTYDDDLDNLLAQIGDQYADLFLAAKNLSDAILLSDILRVNTEITKAPLSASMIKRYDEHHQDLTLLKALVRQQLPEKYKEIFFDQSKNGYAGYIDGGASQEEFYKFIKPILEKMDGTEELLVKLNREDLLRKQRTFDNGSIPHQIHLGELHAILRRQEDFYPFLKDNREKIEKILTFRIPYYVGPLARGNSRFAWMTRKSEETITPWNFEEVVDKGASAQSFIERMTNFDKNLPNEKVLPKHSLLYEYFTVYNELTKVKYVTEGMRKPAFLSGEQKKAIVDLLFKTNRKVTVKQLKEDYFKKIECFDSVEISGVEDRFNASLGTYHDLLKIIKDKDFLDNEENEDILEDIVLTLTLFEDREMIEERLKTYAHLFDDKVMKQLKRRRYTGWGRLSRKLINGIRDKQSGKTILDFLKSDGFANRNFMQLIHDDSLTFKEDIQKAQVSGQGDSLHEHIANLAGSPAIKKGILQTVKVVDELVKVMGRHKPENIVIEMARENQTTQKGQKNSRERMKRIEEGIKELGSQILKEHPVENTQLQNEKLYLYYLQNGRDMYVDQELDINRLSDYDVDHIVPQSFLKDDSIDNKVLTRSDKARGKSDNVPSEEVVKKMKNYWRQLLNAKLITQRKFDNLTKAERGGLSELDKAGFIKRQLVETRQITKHVAQILDSRMNTKYDENDKLIREVKVITLKSKLVSDFRKDFQFYKVREINNYHHAHDAYLNAVVGTALIKKYPKLESEFVYGDYKVYDVRKMIAKSEQEIGKATAKYFFYSNIMNFFKTEITLANGEIRKRPLIETNGETGEIVWDKGRDFATVRKVLSMPQVNIVKKTEVQTGGFSKESILPKRNSDKLIARKKDWDPKKYGGFDSPTVAYSVLVVAKVEKGKSKKLKSVKELLGITIMERSSFEKNPIDFLEAKGYKEVKKDLIIKLPKYSLFELENGRKRMLASAGELQKGNELALPSKYVNFLYLASHYEKLKGSPEDNEQKQLFVEQHKHYLDEIIEQISEFSKRVILADANLDKVLSAYNKHRDKPIREQAENIIHLFTLTNLGAPAAFKYFDTTIDRKRYTSTKEVLDATLIHQSITGLYETRIDLSQLGGDGGEAAAKGGSGGGGGMDPLQLLQPLEAEIKGTKLKAHWNSGATITCVPQAFLEEEVPIKNIWIKTIHGEKEQPVYYLTFKIQGRKVEAEVISSPYDYILVSPSDIPWLMKKPLQLTTLVPLQEYEERLLKQTMLTGSYKEKLQSLFLKYDALWQHWENQVGHRRIKPHHIATGTVNPRPQKQYPINPKAKASIQTVINDLLKQGVLIQQNSIMNTPVYPVPKPDGKWRMVLDYREVNKTIPLIAAQNQHSAGILSSIFRGKYKTTLDLSNGFWAHSITPESYWLTAFTWLGQQYCWTRLPQGFLNSPALFNADVVDLLKEVPNVQVYVDDIYISHDDPREHLEQLEKVFSLLLNAGYVVSLKKSEIAQHEVEFLGFNITKEGRGLTETFKQKLLNITPPRDLKQLQSILGKLNFARNFIPNFSELVKPLYNIIATAPGKYITWTTDNSQQLQNIISMLNSAENLEERNPEVRLIMKVNTSPSAGYIRFYNEFAKRPIMYLNYVYTKAEVKFTNTEKLLTTIHKGLIKALDLGMGQEILVYSPIVSMTKIQKTPLPERKALPIRWITWMSYLEDPRIQFHYDKTLPELQQVPTVTDDIIAKIKHPSEFSMVFYTDGSAIKHPNVNKSHNAGMGIAQVQFKPEFTVINTWSIPLGDHTAQLAEVAAVEFACKKALKIDGPVLIVTDSFYVAESVNKELPYWQSNGFFNNKKKPLKHVSKWKSIADCIQLKPDIIIIHEKGHQPTASTFHTEGNNLADKLATQGSYVVNAGKRTADGSEFEKRTADGSEFESPKKKAKVE

SEQ ID NO: 6953 - protein, 2094 aa, synthetic construct
MPAAKRVKLDGGDKKYSIGLDIGTNSVGWAVITDEYKVPSKKFKVLGNTDRHSIKKNLIGALLFDSGETAEATRLKRTARRRYTRRKNRICYLQEIFSNEMAKVDDSFFHRLEESFLVEEDKKHERHPIFGNIVDEVAYHEKYPTIYHLRKKLVDSTDKADLRLIYLALAHMIKFRGHFLIEGDLNPDNSDVDKLFIQLVQTYNQLFEENPINASGVDAKAILSARLSKSRRLENLIAQLPGEKKNGLFGNLIALSLGLTPNFKSNFDLAEDAKLQLSKDTYDDDLDNLLAQIGDQYADLFLAAKNLSDAILLSDILRVNTEITKAPLSASMIKRYDEHHQDLTLLKALVRQQLPEKYKEIFFDQSKNGYAGYIDGGASQEEFYKFIKPILEKMDGTEELLVKLNREDLLRKQRTFDNGSIPHQIHLGELHAILRRQEDFYPFLKDNREKIEKILTFRIPYYVGPLARGNSRFAWMTRKSEETITPWNFEEVVDKGASAQSFIERMTNFDKNLPNEKVLPKHSLLYEYFTVYNELTKVKYVTEGMRKPAFLSGEQKKAIVDLLFKTNRKVTVKQLKEDYFKKIECFDSVEISGVEDRFNASLGTYHDLLKIIKDKDFLDNEENEDILEDIVLTLTLFEDREMIEERLKTYAHLFDDKVMKQLKRRRYTGWGRLSRKLINGIRDKQSGKTILDFLKSDGFANRNFMQLIHDDSLTFKEDIQKAQVSGQGDSLHEHIANLAGSPAIKKGILQTVKVVDELVKVMGRHKPENIVIEMARENQTTQKGQKNSRERMKRIEEGIKELGSQILKEHPVENTQLQNEKLYLYYLQNGRDMYVDQELDINRLSDYDVDHIVPQSFLKDDSIDNKVLTRSDKARGKSDNVPSEEVVKKMKNYWRQLLNAKLITQRKFDNLTKAERGGLSELDKAGFIKRQLVETRQITKHVAQILDSRMNTKYDENDKLIREVKVITLKSKLVSDFRKDFQFYKVREINNYHHAHDAYLNAVVGTALIKKYPKLESEFVYGDYKVYDVRKMIAKSEQEIGKATAKYFFYSNIMNFFKTEITLANGEIRKRPLIETNGETGEIVWDKGRDFATVRKVLSMPQVNIVKKTEVQTGGFSKESILPKRNSDKLIARKKDWDPKKYGGFDSPTVAYSVLVVAKVEKGKSKKLKSVKELLGITIMERSSFEKNPIDFLEAKGYKEVKKDLIIKLPKYSLFELENGRKRMLASAGELQKGNELALPSKYVNFLYLASHYEKLKGSPEDNEQKQLFVEQHKHYLDEIIEQISEFSKRVILADANLDKVLSAYNKHRDKPIREQAENIIHLFTLTNLGAPAAFKYFDTTIDRKRYTSTKEVLDATLIHQSITGLYETRIDLSQLGGDGGEAAAKGGSGGGGGVLNLEEEYRLHEKPVPSSIDPSWLQLFPTVWAERAGMGLANQVPPVVVELRSGASPVAVRQYPMSKEAREGIRPHIQRFLDLGVLVPCQSPWNTPLLPVKKPGTNDYRPVQDLREINKRVQDIHPTVPNPYNLLSSLPPSHTWYSVLDLKDAFFCLKLHPNSQPLFAFEWRDPEKGNTGQLTWTRLPQGFKNSPTLFNEALHRDLAPFRALNPQVVLLQYVDDLLVAAPTYRDCKEGTQKLLQELSKLGYRVSAKKAQLCQKEVTYLGYLLKEGKRWLTPARKATVMKIPPPTTPRQVREFLGTAGFCRLWIPGFASLAAPLYPLTKPSIPFIWTEEHQKAFDRIKEALLSAPALALPDLTKPFTLYVDERAGVARGVLTQTLGPWRRPVAYLSKKLDPVASGWPTCLKAVAAVALLLKDADKLTLGQNVTVIASHSLESIVRQPPDRWMTNARMTHYQSLLLNERVSFAPPAVLNPATLLPVESEATPVHRCSEILAEETGTRRDLKDQPLPGVPAWYTDGSSFIAEGKRRAGAAIVDGKRTVWASSLPEGTSAQKAELVALTQALRLAEGKDINIYTDSRYAFATAHIHGAIYKQRGWLTSAGKDIKNKEEILALLEAIHLPKRVAIIHCPGHQKGNDPVATGNRRADEAAKQAALSTRVLAETTKPAGKRTADGSEFEKRTADGSEFESPKKKAKVE

SEQ ID NO: 6954 - protein, 2094 aa, synthetic construct
MPAAKRVKLDGGDKKYSIGLDIGTNSVGWAVITDEYKVPSKKFKVLGNTDRHSIKKNLIGALLFDSGETAEATRLKRTARRRYTRRKNRICYLQEIFSNEMAKVDDSFFHRLEESFLVEEDKKHERHPIFGNIVDEVAYHEKYPTIYHLRKKLVDSTDKADLRLIYLALAHMIKFRGHFLIEGDLNPDNSDVDKLFIQLVQTYNQLFEENPINASGVDAKAILSARLSKSRRLENLIAQLPGEKKNGLFGNLIALSLGLTPNFKSNFDLAEDAKLQLSKDTYDDDLDNLLAQIGDQYADLFLAAKNLSDAILLSDILRVNTEITKAPLSASMIKRYDEHHQDLTLLKALVRQQLPEKYKEIFFDQSKNGYAGYIDGGASQEEFYKFIKPILEKMDGTEELLVKLNREDLLRKQRTFDNGSIPHQIHLGELHAILRRQEDFYPFLKDNREKIEKILTFRIPYYVGPLARGNSRFAWMTRKSEETITPWNFEEVVDKGASAQSFIERMTNFDKNLPNEKVLPKHSLLYEYFTVYNELTKVKYVTEGMRKPAFLSGEQKKAIVDLLFKTNRKVTVKQLKEDYFKKIECFDSVEISGVEDRFNASLGTYHDLLKIIKDKDFLDNEENEDILEDIVLTLTLFEDREMIEERLKTYAHLFDDKVMKQLKRRRYTGWGRLSRKLINGIRDKQSGKTILDFLKSDGFANRNFMQLIHDDSLTFKEDIQKAQVSGQGDSLHEHIANLAGSPAIKKGILQTVKVVDELVKVMGRHKPENIVIEMARENQTTQKGQKNSRERMKRIEEGIKELGSQILKEHPVENTQLQNEKLYLYYLQNGRDMYVDQELDINRLSDYDVDHIVPQSFLKDDSIDNKVLTRSDKARGKSDNVPSEEVVKKMKNYWRQLLNAKLITQRKFDNLTKAERGGLSELDKAGFIKRQLVETRQITKHVAQILDSRMNTKYDENDKLIREVKVITLKSKLVSDFRKDFQFYKVREINNYHHAHDAYLNAVVGTALIKKYPKLESEFVYGDYKVYDVRKMIAKSEQEIGKATAKYFFYSNIMNFFKTEITLANGEIRKRPLIETNGETGEIVWDKGRDFATVRKVLSMPQVNIVKKTEVQTGGFSKESILPKRNSDKLIARKKDWDPKKYGGFDSPTVAYSVLVVAKVEKGKSKKLKSVKELLGITIMERSSFEKNPIDFLEAKGYKEVKKDLIIKLPKYSLFELENGRKRMLASAGELQKGNELALPSKYVNFLYLASHYEKLKGSPEDNEQKQLFVEQHKHYLDEIIEQISEFSKRVILADANLDKVLSAYNKHRDKPIREQAENIIHLFTLTNLGAPAAFKYFDTTIDRKRYTSTKEVLDATLIHQSITGLYETRIDLSQLGGDGGEAAAKGGSGGGGGVLNLEEEYRLHEKPVPSSIDPSWLQLFPTVWAERAGMGLANQVPPVVVELRSGASPVAVRQYPMSKEAREGIRPHIQRFLDLGVLVPCQSPWNTPLLPVKKPGTNDYRPVQDLREINKRVQDIHPTVPNPYNLLSSLPPSHTWYSVLDLKDAFFCLKLHPNSQPLFAFEWRDPEKGNTGQLTWTRLPQGFKNSPTLFNEALHRDLAPFRALNPQVVLLQYVDDLLVAAPTYRDCKEGTQKLLQELSKLGYRVSAKKAQLCQKEVTYLGYLLKEGKRWLTPARKATVMKIPPPTTPRQVREFLGKAGFCRLFIPGFASLAAPLYPLTKPSIPFIWTEEHQKAFDRIKEALLSAPALALPDLTKPFTLYVDERAGVARGVLTQTLGPWRRPVAYLSKKLDPVASGWPTCLKAVAAVALLLKDADKLTLGQNVTVIASHSLESIVRQPPDRWMTNARMTHYQSLLLNERVSFAPPAVLNPATLLPVESEATPVHRCSEILAEETGTRRDLKDQPLPGVPAWYTDGSSFIAEGKRRAGAAIVDGKRTVWASSLPEGTSAQKAELVALTQALRLAEGKDINIYTDSRYAFATAHIHGAIYKQRGWLTSAGKDIKNKEEILALLEAIHLPKRVAIIHCPGHQKGNDPVATGNRRADEAAKQAALSTRVLAETTKPAGKRTADGSEFEKRTADGSEFESPKKKAKVE

SEQ ID NO: 6955 - protein, 2096 aa, synthetic construct
MPAAKRVKLDGGDKKYSIGLDIGTNSVGWAVITDEYKVPSKKFKVLGNTDRHSIKKNLIGALLFDSGETAEATRLKRTARRRYTRRKNRICYLQEIFSNEMAKVDDSFFHRLEESFLVEEDKKHERHPIFGNIVDEVAYHEKYPTIYHLRKKLVDSTDKADLRLIYLALAHMIKFRGHFLIEGDLNPDNSDVDKLFIQLVQTYNQLFEENPINASGVDAKAILSARLSKSRRLENLIAQLPGEKKNGLFGNLIALSLGLTPNFKSNFDLAEDAKLQLSKDTYDDDLDNLLAQIGDQYADLFLAAKNLSDAILLSDILRVNTEITKAPLSASMIKRYDEHHQDLTLLKALVRQQLPEKYKEIFFDQSKNGYAGYIDGGASQEEFYKFIKPILEKMDGTEELLVKLNREDLLRKQRTFDNGSIPHQIHLGELHAILRRQEDFYPFLKDNREKIEKILTFRIPYYVGPLARGNSRFAWMTRKSEETITPWNFEEVVDKGASAQSFIERMTNFDKNLPNEKVLPKHSLLYEYFTVYNELTKVKYVTEGMRKPAFLSGEQKKAIVDLLFKTNRKVTVKQLKEDYFKKIECFDSVEISGVEDRFNASLGTYHDLLKIIKDKDFLDNEENEDILEDIVLTLTLFEDREMIEERLKTYAHLFDDKVMKQLKRRRYTGWGRLSRKLINGIRDKQSGKTILDFLKSDGFANRNFMQLIHDDSLTFKEDIQKAQVSGQGDSLHEHIANLAGSPAIKKGILQTVKVVDELVKVMGRHKPENIVIEMARENQTTQKGQKNSRERMKRIEEGIKELGSQILKEHPVENTQLQNEKLYLYYLQNGRDMYVDQELDINRLSDYDVDHIVPQSFLKDDSIDNKVLTRSDKARGKSDNVPSEEVVKKMKNYWRQLLNAKLITQRKFDNLTKAERGGLSELDKAGFIKRQLVETRQITKHVAQILDSRMNTKYDENDKLIREVKVITLKSKLVSDFRKDFQFYKVREINNYHHAHDAYLNAVVGTALIKKYPKLESEFVYGDYKVYDVRKMIAKSEQEIGKATAKYFFYSNIMNFFKTEITLANGEIRKRPLIETNGETGEIVWDKGRDFATVRKVLSMPQVNIVKKTEVQTGGFSKESILPKRNSDKLIARKKDWDPKKYGGFDSPTVAYSVLVVAKVEKGKSKKLKSVKELLGITIMERSSFEKNPIDFLEAKGYKEVKKDLIIKLPKYSLFELENGRKRMLASAGELQKGNELALPSKYVNFLYLASHYEKLKGSPEDNEQKQLFVEQHKHYLDEIIEQISEFSKRVILADANLDKVLSAYNKHRDKPIREQAENIIHLFTLTNLGAPAAFKYFDTTIDRKRYTSTKEVLDATLIHQSITGLYETRIDLSQLGGDGGEAAAKGGSGGGGGTLNIEDEYRLHETSKEPDVPLGSTWLSDFPQAWAETGGMGLAVRQAPLIIPLKATSTPVSIKQYPMSQEARLGIKPHIQRLLDQGILVPCQSPWNTPLLPVKKPGTNDYRPVQDLREVNKRVEDIHPTVPNPYNLLSGLPPSHQWYTVLDLKDAFFCLRLHPTSQPLFAFEWRDPEMGISGQLTWTRLPQGFKNSPTLFDEALHRDLADFRIQHPDLILLQYVDDLLLAATSEQDCQRGTRALLQTLGNLGYRASAKKAQICQKQVKYLGYLLKEGQRWLTEARKETVMGQPTPKTPRQLREFLGTAGFCRLWIPGFAEMAAPLYPLTKTGTLFNWGPDQQKAYQEIKQALLTAPALGLPDLTKPFELFVDEKQGYAKGVLTQKLGPWRRPVAYLSKKLDPVAAGWPPCLRMVAAIAVLTKDAGKLTMGQPLVILAPHAVEALVKQPPDRWLSNARMTHYQAMLLDTDRVQFGPVVALNPATLLPLPEKEAPHDCLEILAETHGTRPDLTDQPIPDADYTWYTDGSSFLQEGQRRAGAAVTTETEVIWARALPAGTSAQRAELIALTQALKMAEGKKLNVYTDSRYAFATAHVHGEIYRRRGLLTSEGREIKNKNEILALLKALFLPKRLSIIHCPGHQKGNSAEARGNRMADQAAREAAMKAVLETSTLLAGKRTADGSEFEKRTADGSEFESPKKKAKVE

SEQ ID NO: 6956 - protein, 2096 aa, synthetic construct
MPAAKRVKLDGGDKKYSIGLDIGTNSVGWAVITDEYKVPSKKFKVLGNTDRHSIKKNLIGALLFDSGETAEATRLKRTARRRYTRRKNRICYLQEIFSNEMAKVDDSFFHRLEESFLVEEDKKHERHPIFGNIVDEVAYHEKYPTIYHLRKKLVDSTDKADLRLIYLALAHMIKFRGHFLIEGDLNPDNSDVDKLFIQLVQTYNQLFEENPINASGVDAKAILSARLSKSRRLENLIAQLPGEKKNGLFGNLIALSLGLTPNFKSNFDLAEDAKLQLSKDTYDDDLDNLLAQIGDQYADLFLAAKNLSDAILLSDILRVNTEITKAPLSASMIKRYDEHHQDLTLLKALVRQQLPEKYKEIFFDQSKNGYAGYIDGGASQEEFYKFIKPILEKMDGTEELLVKLNREDLLRKQRTFDNGSIPHQIHLGELHAILRRQEDFYPFLKDNREKIEKILTFRIPYYVGPLARGNSRFAWMTRKSEETITPWNFEEVVDKGASAQSFIERMTNFDKNLPNEKVLPKHSLLYEYFTVYNELTKVKYVTEGMRKPAFLSGEQKKAIVDLLFKTNRKVTVKQLKEDYFKKIECFDSVEISGVEDRFNASLGTYHDLLKIIKDKDFLDNEENEDILEDIVLTLTLFEDREMIEERLKTYAHLFDDKVMKQLKRRRYTGWGRLSRKLINGIRDKQSGKTILDFLKSDGFANRNFMQLIHDDSLTFKEDIQKAQVSGQGDSLHEHIANLAGSPAIKKGILQTVKVVDELVKVMGRHKPENIVIEMARENQTTQKGQKNSRERMKRIEEGIKELGSQILKEHPVENTQLQNEKLYLYYLQNGRDMYVDQELDINRLSDYDVDHIVPQSFLKDDSIDNKVLTRSDKARGKSDNVPSEEVVKKMKNYWRQLLNAKLITQRKFDNLTKAERGGLSELDKAGFIKRQLVETRQITKHVAQILDSRMNTKYDENDKLIREVKVITLKSKLVSDFRKDFQFYKVREINNYHHAHDAYLNAVVGTALIKKYPKLESEFVYGDYKVYDVRKMIAKSEQEIGKATAKYFFYSNIMNFFKTEITLANGEIRKRPLIETNGETGEIVWDKGRDFATVRKVLSMPQVNIVKKTEVQTGGFSKESILPKRNSDKLIARKKDWDPKKYGGFDSPTVAYSVLVVAKVEKGKSKKLKSVKELLGITIMERSSFEKNPIDFLEAKGYKEVKKDLIIKLPKYSLFELENGRKRMLASAGELQKGNELALPSKYVNFLYLASHYEKLKGSPEDNEQKQLFVEQHKHYLDEIIEQISEFSKRVILADANLDKVLSAYNKHRDKPIREQAENIIHLFTLTNLGAPAAFKYFDTTIDRKRYTSTKEVLDATLIHQSITGLYETRIDLSQLGGDGGEAAAKGGSGGGGGTLNIEDEYRLHETSKEPDVPLGSTWLSDFPQAWAETGGMGLAVRQAPLIIPLKATSTPVSIKQYPMSQEARLGIKPHIQRLLDQGILVPCQSPWNTPLLPVKKPGTNDYRPVQDLREVNKRVEDIHPTVPNPYNLLSGLPPSHQWYTVLDLKDAFFCLRLHPTSQPLFAFEWRDPEMGISGQLTWTRLPQGFKNSPTLFNEALHRDLADFRIQHPDLILLQYVDDLLLAATSEQDCQRGTRALLQTLGNLGYRASAKKAQICQKQVKYLGYLLKEGQRWLTEARKETVMGQPTPKTPRQLREFLGTAGFCRLWIPGFAEMAAPLYPLTKPGTLFNWGPDQQKAYQEIKQALLTAPALGLPDLTKPFELFVDEKQGYAKGVLTQKLGPWRRPVAYLSKKLDPVAAGWPPCLRMVAAIAVLTKDAGKLTMGQPLVILAPHAVEALVKQPPDRWLSNARMTHYQAMLLDTDRVQFGPVVALNPATLLPLPEKEAPHDCLEILAETHGTRPDLTDQPIPDADYTWYTDGSSFLQEGQRRAGAAVTTETEVIWARALPAGTSAQRAELIALTQALKMAEGKKLNVYTDSRYAFATAHVHGEIYRRRGWLTSEGREIKNKNEILALLKALFLPKRLSIIHCPGHQKGNSAEARGNRMADQAAREAAMKAVLETSTLLAGKRTADGSEFEKRTADGSEFESPKKKAKVE

SEQ ID NO: 6957 - protein, 2102 aa, synthetic construct
MPAAKRVKLDGGDKKYSIGLDIGTNSVGWAVITDEYKVPSKKFKVLGNTDRHSIKKNLIGALLFDSGETAEATRLKRTARRRYTRRKNRICYLQEIFSNEMAKVDDSFFHRLEESFLVEEDKKHERHPIFGNIVDEVAYHEKYPTIYHLRKKLVDSTDKADLRLIYLALAHMIKFRGHFLIEGDLNPDNSDVDKLFIQLVQTYNQLFEENPINASGVDAKAILSARLSKSRRLENLIAQLPGEKKNGLFGNLIALSLGLTPNFKSNFDLAEDAKLQLSKDTYDDDLDNLLAQIGDQYADLFLAAKNLSDAILLSDILRVNTEITKAPLSASMIKRYDEHHQDLTLLKALVRQQLPEKYKEIFFDQSKNGYAGYIDGGASQEEFYKFIKPILEKMDGTEELLVKLNREDLLRKQRTFDNGSIPHQIHLGELHAILRRQEDFYPFLKDNREKIEKILTFRIPYYVGPLARGNSRFAWMTRKSEETITPWNFEEVVDKGASAQSFIERMTNFDKNLPNEKVLPKHSLLYEYFTVYNELTKVKYVTEGMRKPAFLSGEQKKAIVDLLFKTNRKVTVKQLKEDYFKKIECFDSVEISGVEDRFNASLGTYHDLLKIIKDKDFLDNEENEDILEDIVLTLTLFEDREMIEERLKTYAHLFDDKVMKQLKRRRYTGWGRLSRKLINGIRDKQSGKTILDFLKSDGFANRNFMQLIHDDSLTFKEDIQKAQVSGQGDSLHEHIANLAGSPAIKKGILQTVKVVDELVKVMGRHKPENIVIEMARENQTTQKGQKNSRERMKRIEEGIKELGSQILKEHPVENTQLQNEKLYLYYLQNGRDMYVDQELDINRLSDYDVDHIVPQSFLKDDSIDNKVLTRSDKARGKSDNVPSEEVVKKMKNYWRQLLNAKLITQRKFDNLTKAERGGLSELDKAGFIKRQLVETRQITKHVAQILDSRMNTKYDENDKLIREVKVITLKSKLVSDFRKDFQFYKVREINNYHHAHDAYLNAVVGTALIKKYPKLESEFVYGDYKVYDVRKMIAKSEQEIGKATAKYFFYSNIMNFFKTEITLANGEIRKRPLIETNGETGEIVWDKGRDFATVRKVLSMPQVNIVKKTEVQTGGFSKESILPKRNSDKLIARKKDWDPKKYGGFDSPTVAYSVLVVAKVEKGKSKKLKSVKELLGITIMERSSFEKNPIDFLEAKGYKEVKKDLIIKLPKYSLFELENGRKRMLASAGELQKGNELALPSKYVNFLYLASHYEKLKGSPEDNEQKQLFVEQHKHYLDEIIEQISEFSKRVILADANLDKVLSAYNKHRDKPIREQAENIIHLFTLTNLGAPAAFKYFDTTIDRKRYTSTKEVLDATLIHQSITGLYETRIDLSQLGGDGGEAAAKGGGGGSGGTVSLQDEHRLFDIPVTTSLPDVWLQDFPQAWAETGGLGRAKCQAPIIIDLKPTAVPVSIKQYPMSLEAHMGIRQHIIKFLELGVLRPCRSPWNTPLLPVKKPGTQDYRPVQDLREINKRTVDIHPTVPNPYNLLSTLKPDYSWYTVLDLKDAFFCLPLAPQSQELFAFEWKDPERGISGQLTWTRLPQGFKNSPTLFNEALHRDLTDFRTQHPEVTLLQYVDDLLLAAPTKKACTQGTRHLLQELGEKGYRASAKKAQICQTKVTYLGYILSEGKRWLTPGRIETVARIPPPRNPREVREFLGKAGFCRLFIPGFAELAAPLYALTKPSTPFTWQTEHQLAFEALKKALLSAPALGLPDTSKPFTLFLDERQGIAKGVLTQKLGPWKRPVAYLSKKLDPVAAGWPPCLRIMAATAMLVKDSAKLTLGQPLTVITPHTLEAIVRQPPDRWITNARLTHYQALLLDTDRVQFGPPVTLNPATLLPVPENQPSPHDCRQVLAETHGTREDLKDQELPDADHTWYTDGSSYLDSGTRRAGAAVVDGHNTIWAQSLPPGTSAQKAELIALTKALELSKGKKANIYTDSRYAFATAHTHGSIYERRGWLTSEGKEIKNKAEIIALLKALFLPQEVAIIHCPGHQKGQDPVAVGNRQADRVARQAAMAEVLTLATEPDNTSHITAGKRTADGSEFEKRTADGSEFESPKKKAKVE

SEQ ID NO: 6958 - protein, 2095 aa, synthetic construct
MPAAKRVKLDGGDKKYSIGLDIGTNSVGWAVITDEYKVPSKKFKVLGNTDRHSIKKNLIGALLFDSGETAEATRLKRTARRRYTRRKNRICYLQEIFSNEMAKVDDSFFHRLEESFLVEEDKKHERHPIFGNIVDEVAYHEKYPTIYHLRKKLVDSTDKADLRLIYLALAHMIKFRGHFLIEGDLNPDNSDVDKLFIQLVQTYNQLFEENPINASGVDAKAILSARLSKSRRLENLIAQLPGEKKNGLFGNLIALSLGLTPNFKSNFDLAEDAKLQLSKDTYDDDLDNLLAQIGDQYADLFLAAKNLSDAILLSDILRVNTEITKAPLSASMIKRYDEHHQDLTLLKALVRQQLPEKYKEIFFDQSKNGYAGYIDGGASQEEFYKFIKPILEKMDGTEELLVKLNREDLLRKQRTFDNGSIPHQIHLGELHAILRRQEDFYPFLKDNREKIEKILTFRIPYYVGPLARGNSRFAWMTRKSEETITPWNFEEVVDKGASAQSFIERMTNFDKNLPNEKVLPKHSLLYEYFTVYNELTKVKYVTEGMRKPAFLSGEQKKAIVDLLFKTNRKVTVKQLKEDYFKKIECFDSVEISGVEDRFNASLGTYHDLLKIIKDKDFLDNEENEDILEDIVLTLTLFEDREMIEERLKTYAHLFDDKVMKQLKRRRYTGWGRLSRKLINGIRDKQSGKTILDFLKSDGFANRNFMQLIHDDSLTFKEDIQKAQVSGQGDSLHEHIANLAGSPAIKKGILQTVKVVDELVKVMGRHKPENIVIEMARENQTTQKGQKNSRERMKRIEEGIKELGSQILKEHPVENTQLQNEKLYLYYLQNGRDMYVDQELDINRLSDYDVDHIVPQSFLKDDSIDNKVLTRSDKARGKSDNVPSEEVVKKMKNYWRQLLNAKLITQRKFDNLTKAERGGLSELDKAGFIKRQLVETRQITKHVAQILDSRMNTKYDENDKLIREVKVITLKSKLVSDFRKDFQFYKVREINNYHHAHDAYLNAVVGTALIKKYPKLESEFVYGDYKVYDVRKMIAKSEQEIGKATAKYFFYSNIMNFFKTEITLANGEIRKRPLIETNGETGEIVWDKGRDFATVRKVLSMPQVNIVKKTEVQTGGFSKESILPKRNSDKLIARKKDWDPKKYGGFDSPTVAYSVLVVAKVEKGKSKKLKSVKELLGITIMERSSFEKNPIDFLEAKGYKEVKKDLIIKLPKYSLFELENGRKRMLASAGELQKGNELALPSKYVNFLYLASHYEKLKGSPEDNEQKQLFVEQHKHYLDEIIEQISEFSKRVILADANLDKVLSAYNKHRDKPIREQAENIIHLFTLTNLGAPAAFKYFDTTIDRKRYTSTKEVLDATLIHQSITGLYETRIDLSQLGGDGGEAAAKGGGGGSGGTLQLEEEYRLFEPESTQKQEMDIWLKNFPQAWAETGGMGTAHCQAPVLIQLKATATPISIRQYPMPHEAYQGIKPHIRRMLDQGILKPCQSPWNTPLLPVKKPGTEDYRPVQDLREVNKRVEDIHPTVPNPYNLLSTLPPSHPWYTVLDLKDAFFCLRLHSESQLLFAFEWRDPEIGLSGQLTWTRLPQGFKNSPTLFNEALHSDLADFRVRYPALVLLQYVDDLLLAAATRTECLEGTKALLETLGNKGYRASAKKAQICLQEVTYLGYSLKDGQRWLTKARKEAILSIPVPKNSRQVREFLGTAGYCRLWIPGFAELAAPLYPLTRPGTLFQWGTEQQLAFEDIKKALLSSPALGLPDITKPFELFIDENSGFAKGVLVQKLGPWKRPVAYLSKKLDTVASGWPPCLRMVAAIAILVKDAGKLTLGQPLTILTSHPVEALVRQPPNKWLSNARMTHYQAMLLDAERVHFGPTVSLNPATLLPLPSGGNHHDCLQILAETHGTRPDLTDQPLPDADLTWYTDGSSFIRNGEREAGAAVTTESEVIWAAPLPPGTSAQRAELIALTQALKMAEGKKLTVYTDSRYAFATTHVHGEIYRRRGWLTSEGKEIKNKNEILALLEALFLPKRLSIIHCPGHQKGDSPQAKGNRLADDTAKKAATETHSSLTVLPAGKRTADGSEFEKRTADGSEFESPKKKAKVE

SEQ ID NO: 6959 - protein, 2087 aa, synthetic construct
MPAAKRVKLDGGDKKYSIGLDIGTNSVGWAVITDEYKVPSKKFKVLGNTDRHSIKKNLIGALLFDSGETAEATRLKRTARRRYTRRKNRICYLQEIFSNEMAKVDDSFFHRLEESFLVEEDKKHERHPIFGNIVDEVAYHEKYPTIYHLRKKLVDSTDKADLRLIYLALAHMIKFRGHFLIEGDLNPDNSDVDKLFIQLVQTYNQLFEENPINASGVDAKAILSARLSKSRRLENLIAQLPGEKKNGLFGNLIALSLGLTPNFKSNFDLAEDAKLQLSKDTYDDDLDNLLAQIGDQYADLFLAAKNLSDAILLSDILRVNTEITKAPLSASMIKRYDEHHQDLTLLKALVRQQLPEKYKEIFFDQSKNGYAGYIDGGASQEEFYKFIKPILEKMDGTEELLVKLNREDLLRKQRTFDNGSIPHQIHLGELHAILRRQEDFYPFLKDNREKIEKILTFRIPYYVGPLARGNSRFAWMTRKSEETITPWNFEEVVDKGASAQSFIERMTNFDKNLPNEKVLPKHSLLYEYFTVYNELTKVKYVTEGMRKPAFLSGEQKKAIVDLLFKTNRKVTVKQLKEDYFKKIECFDSVEISGVEDRFNASLGTYHDLLKIIKDKDFLDNEENEDILEDIVLTLTLFEDREMIEERLKTYAHLFDDKVMKQLKRRRYTGWGRLSRKLINGIRDKQSGKTILDFLKSDGFANRNFMQLIHDDSLTFKEDIQKAQVSGQGDSLHEHIANLAGSPAIKKGILQTVKVVDELVKVMGRHKPENIVIEMARENQTTQKGQKNSRERMKRIEEGIKELGSQILKEHPVENTQLQNEKLYLYYLQNGRDMYVDQELDINRLSDYDVDHIVPQSFLKDDSIDNKVLTRSDKARGKSDNVPSEEVVKKMKNYWRQLLNAKLITQRKFDNLTKAERGGLSELDKAGFIKRQLVETRQITKHVAQILDSRMNTKYDENDKLIREVKVITLKSKLVSDFRKDFQFYKVREINNYHHAHDAYLNAVVGTALIKKYPKLESEFVYGDYKVYDVRKMIAKSEQEIGKATAKYFFYSNIMNFFKTEITLANGEIRKRPLIETNGETGEIVWDKGRDFATVRKVLSMPQVNIVKKTEVQTGGFSKESILPKRNSDKLIARKKDWDPKKYGGFDSPTVAYSVLVVAKVEKGKSKKLKSVKELLGITIMERSSFEKNPIDFLEAKGYKEVKKDLIIKLPKYSLFELENGRKRMLASAGELQKGNELALPSKYVNFLYLASHYEKLKGSPEDNEQKQLFVEQHKHYLDEIIEQISEFSKRVILADANLDKVLSAYNKHRDKPIREQAENIIHLFTLTNLGAPAAFKYFDTTIDRKRYTSTKEVLDATLIHQSITGLYETRIDLSQLGGDGGEAAAKGGGGGSGGVPWLTQQPLQLTILVPLQEYQEKILSKTALPEDQKQQLKTLFVKYDNLWQHWENQVGHRKIRPHNIATGDYPPRPQKQYPINPKAKPSIQIVIDDLLKQGVLTPQNSTMNTPVYPVPKPDGRWRMVLDYREVNKTIPLTAAQNQHSAGILATIVRQKYKTTLDLANGFWAHPITPESYWLTAFTWQGKQYCWTRLPQGFLNSPALFNADVVDLLKEIPNVQVYVDDIYLSHDDPKEHVQQLEKVFQILLQAGYVVSLKKSEIGQKTVEFLGFNITKEGRGLTDTFKTKLLNITPPKDLKQLQSILGKLNFARNFIPNFAELVQPLYNLIAPAKGKYIEWSEENTKQLNMVIEALNTASNLEERLPEQRLVIKVNTSPSAGYVRYYNETGKKPIMYLNYVFSKAELKFSMLEKLLTTMHKALIKAMDLAMGQEILVYSPIVSMTKIQKTPLPERKALPIRWITWMTYLEDPRIQFHYDKTLPELKHIPDVYTSSQSPVKHPSQYEGVFYTDGSAIKSPDPTKSNNAGMGIVHATYKPEYQVLNQWSIPLGNHTAQMAEIAAVEFACKKALKIPGPVLVITDSFYVAESANKELPYWKSNGFVNNKKKPLKHISKWKSIAECLSMKPDITIQHEKGISLQIPVFILKGNALADKLATQGSYVVNAGKRTADGSEFEKRTADGSEFESPKKKAKVE

SEQ ID NO: 6960 - protein, 2218 aa, synthetic construct
MPAAKRVKLDGGDKKYSIGLDIGTNSVGWAVITDEYKVPSKKFKVLGNTDRHSIKKNLIGALLFDSGETAEATRLKRTARRRYTRRKNRICYLQEIFSNEMAKVDDSFFHRLEESFLVEEDKKHERHPIFGNIVDEVAYHEKYPTIYHLRKKLVDSTDKADLRLIYLALAHMIKFRGHFLIEGDLNPDNSDVDKLFIQLVQTYNQLFEENPINASGVDAKAILSARLSKSRRLENLIAQLPGEKKNGLFGNLIALSLGLTPNFKSNFDLAEDAKLQLSKDTYDDDLDNLLAQIGDQYADLFLAAKNLSDAILLSDILRVNTEITKAPLSASMIKRYDEHHQDLTLLKALVRQQLPEKYKEIFFDQSKNGYAGYIDGGASQEEFYKFIKPILEKMDGTEELLVKLNREDLLRKQRTFDNGSIPHQIHLGELHAILRRQEDFYPFLKDNREKIEKILTFRIPYYVGPLARGNSRFAWMTRKSEETITPWNFEEVVDKGASAQSFIERMTNFDKNLPNEKVLPKHSLLYEYFTVYNELTKVKYVTEGMRKPAFLSGEQKKAIVDLLFKTNRKVTVKQLKEDYFKKIECFDSVEISGVEDRFNASLGTYHDLLKIIKDKDFLDNEENEDILEDIVLTLTLFEDREMIEERLKTYAHLFDDKVMKQLKRRRYTGWGRLSRKLINGIRDKQSGKTILDFLKSDGFANRNFMQLIHDDSLTFKEDIQKAQVSGQGDSLHEHIANLAGSPAIKKGILQTVKVVDELVKVMGRHKPENIVIEMARENQTTQKGQKNSRERMKRIEEGIKELGSQILKEHPVENTQLQNEKLYLYYLQNGRDMYVDQELDINRLSDYDVDHIVPQSFLKDDSIDNKVLTRSDKARGKSDNVPSEEVVKKMKNYWRQLLNAKLITQRKFDNLTKAERGGLSELDKAGFIKRQLVETRQITKHVAQILDSRMNTKYDENDKLIREVKVITLKSKLVSDFRKDFQFYKVREINNYHHAHDAYLNAVVGTALIKKYPKLESEFVYGDYKVYDVRKMIAKSEQEIGKATAKYFFYSNIMNFFKTEITLANGEIRKRPLIETNGETGEIVWDKGRDFATVRKVLSMPQVNIVKKTEVQTGGFSKESILPKRNSDKLIARKKDWDPKKYGGFDSPTVAYSVLVVAKVEKGKSKKLKSVKELLGITIMERSSFEKNPIDFLEAKGYKEVKKDLIIKLPKYSLFELENGRKRMLASAGELQKGNELALPSKYVNFLYLASHYEKLKGSPEDNEQKQLFVEQHKHYLDEIIEQISEFSKRVILADANLDKVLSAYNKHRDKPIREQAENIIHLFTLTNLGAPAAFKYFDTTIDRKRYTSTKEVLDATLIHQSITGLYETRIDLSQLGGDGGEAAAKGGGGGSGGTLGDQGSRGSDPLPEPRVTLTVEGIPTEFLVNTGAEHSVLTKPMGKMGSKRTVVAGATGSKVYPWTTKRLLKIGQKQVTHSFLVIPECPAPLLGRDLLTKLKAQIQFSTEGPQVTWEDRPAMCLVLNLEEEYRLHEKPVPPSIDPSWLQLFPMVWAEKAGMGLANQVPPVVVELKSDASPVAVRQYPMSKEAREGIRPHIQRFLDLGILVPCQSPWNTPLLPVKKPGTNDYRPVQDLREVNKRVQDIHPTVPNPYNLLSSLPPSHTWYSVLDLKDAFFCLKLHPNSQPLFAFEWRDPEKGNTGQLTWTRLPQGFKNSPTLFDEALHRDLASFRALNPQVVMLQYVDDLLVAAPTYRDCKEGTRRLLQELSKLGYRVSAKKAQLCREEVTYLGYLLKGGKRWLTPARKATVMKIPTPTTPRQVREFLGTAGFCRLWIPGFASLAAPLYPLTREKVPFTWTEAHQEAFGRIKEALLSAPALALPDLTKPFALYVDEKEGVARGVLTQTLGPWRRPVAYLSKKLDPVASGWPTCLKAIAAVALLLKDADKLTLGQNVLVIAPHNLESIVRQPPDRWMTNARMTHYQSLLLNERVSFAPPAILNPATLLPVESDDTPIHICSEILAEETGTRPDLRDQPLPGVPAWYTDGSSFIMDGRRQAGAAIVDNKRTVWASNLPEGTSAQKAELIALTQALRLAEGKSINIYTDSRYAFATAHVHGAIYKQRGLLTSAGKDIKNKEEILALLEAIHLPKRVAIIHCPGHQRGTDPVATGNRKADEAAKQAAQSTRILTETTKNAGKRTADGSEFEKRTADGSEFESPKKKAKVE

SEQ ID NO: 6961 - protein, 2218 aa, synthetic construct
MPAAKRVKLDGGDKKYSIGLDIGTNSVGWAVITDEYKVPSKKFKVLGNTDRHSIKKNLIGALLFDSGETAEATRLKRTARRRYTRRKNRICYLQEIFSNEMAKVDDSFFHRLEESFLVEEDKKHERHPIFGNIVDEVAYHEKYPTIYHLRKKLVDSTDKADLRLIYLALAHMIKFRGHFLIEGDLNPDNSDVDKLFIQLVQTYNQLFEENPINASGVDAKAILSARLSKSRRLENLIAQLPGEKKNGLFGNLIALSLGLTPNFKSNFDLAEDAKLQLSKDTYDDDLDNLLAQIGDQYADLFLAAKNLSDAILLSDILRVNTEITKAPLSASMIKRYDEHHQDLTLLKALVRQQLPEKYKEIFFDQSKNGYAGYIDGGASQEEFYKFIKPILEKMDGTEELLVKLNREDLLRKQRTFDNGSIPHQIHLGELHAILRRQEDFYPFLKDNREKIEKILTFRIPYYVGPLARGNSRFAWMTRKSEETITPWNFEEVVDKGASAQSFIERMTNFDKNLPNEKVLPKHSLLYEYFTVYNELTKVKYVTEGMRKPAFLSGEQKKAIVDLLFKTNRKVTVKQLKEDYFKKIECFDSVEISGVEDRFNASLGTYHDLLKIIKDKDFLDNEENEDILEDIVLTLTLFEDREMIEERLKTYAHLFDDKVMKQLKRRRYTGWGRLSRKLINGIRDKQSGKTILDFLKSDGFANRNFMQLIHDDSLTFKEDIQKAQVSGQGDSLHEHIANLAGSPAIKKGILQTVKVVDELVKVMGRHKPENIVIEMARENQTTQKGQKNSRERMKRIEEGIKELGSQILKEHPVENTQLQNEKLYLYYLQNGRDMYVDQELDINRLSDYDVDHIVPQSFLKDDSIDNKVLTRSDKARGKSDNVPSEEVVKKMKNYWRQLLNAKLITQRKFDNLTKAERGGLSELDKAGFIKRQLVETRQITKHVAQILDSRMNTKYDENDKLIREVKVITLKSKLVSDFRKDFQFYKVREINNYHHAHDAYLNAVVGTALIKKYPKLESEFVYGDYKVYDVRKMIAKSEQEIGKATAKYFFYSNIMNFFKTEITLANGEIRKRPLIETNGETGEIVWDKGRDFATVRKVLSMPQVNIVKKTEVQTGGFSKESILPKRNSDKLIARKKDWDPKKYGGFDSPTVAYSVLVVAKVEKGKSKKLKSVKELLGITIMERSSFEKNPIDFLEAKGYKEVKKDLIIKLPKYSLFELENGRKRMLASAGELQKGNELALPSKYVNFLYLASHYEKLKGSPEDNEQKQLFVEQHKHYLDEIIEQISEFSKRVILADANLDKVLSAYNKHRDKPIREQAENIIHLFTLTNLGAPAAFKYFDTTIDRKRYTSTKEVLDATLIHQSITGLYETRIDLSQLGGDGGEAAAKGGGGGSGGTLGDQGSRGSDPLPEPRVTLTVEGIPTEFLVNTGAEHSVLTKPMGKMGSKRTVVAGATGSKVYPWTTKRLLKIGQKQVTHSFLVIPECPAPLLGRDLLTKLKAQIQFSTEGPQVTWEDRPAMCLVLNLEEEYRLHEKPVPPSIDPSWLQLFPMVWAEKAGMGLANQVPPVVVELKSDASPVAVRQYPMSKEAREGIRPHIQRFLDLGILVPCQSPWNTPLLPVKKPGTNDYRPVQDLREVNKRVQDIHPTVPNPYNLLSSLPPSHTWYSVLDLKDAFFCLKLHPNSQPLFAFEWRDPEKGNTGQLTWTRLPQGFKNSPTLFNEALHRDLASFRALNPQVVMLQYVDDLLVAAPTYRDCKEGTRRLLQELSKLGYRVSAKKAQLCREEVTYLGYLLKGGKRWLTPARKATVMKIPTPTTPRQVREFLGTAGFCRLWIPGFASLAAPLYPLTRPKVPFTWTEAHQEAFGRIKEALLSAPALALPDLTKPFALYVDEKEGVARGVLTQTLGPWRRPVAYLSKKLDPVASGWPTCLKAIAAVALLLKDADKLTLGQNVLVIAPHNLESIVRQPPDRWMTNARMTHYQSLLLNERVSFAPPAILNPATLLPVESDDTPIHICSEILAEETGTRPDLRDQPLPGVPAWYTDGSSFIMDGRRQAGAAIVDNKRTVWASNLPEGTSAQKAELIALTQALRLAEGKSINIYTDSRYAFATAHVHGAIYKQRGWLTSAGKDIKNKEEILALLEAIHLPKRVAIIHCPGHQRGTDPVATGNRKADEAAKQAAQSTRILTETTKNAGKRTADGSEFEKRTADGSEFESPKKKAKVE

SEQ ID NO: 6962 - protein, 2218 aa, synthetic construct
MPAAKRVKLDGGDKKYSIGLDIGTNSVGWAVITDEYKVPSKKFKVLGNTDRHSIKKNLIGALLFDSGETAEATRLKRTARRRYTRRKNRICYLQEIFSNEMAKVDDSFFHRLEESFLVEEDKKHERHPIFGNIVDEVAYHEKYPTIYHLRKKLVDSTDKADLRLIYLALAHMIKFRGHFLIEGDLNPDNSDVDKLFIQLVQTYNQLFEENPINASGVDAKAILSARLSKSRRLENLIAQLPGEKKNGLFGNLIALSLGLTPNFKSNFDLAEDAKLQLSKDTYDDDLDNLLAQIGDQYADLFLAAKNLSDAILLSDILRVNTEITKAPLSASMIKRYDEHHQDLTLLKALVRQQLPEKYKEIFFDQSKNGYAGYIDGGASQEEFYKFIKPILEKMDGTEELLVKLNREDLLRKQRTFDNGSIPHQIHLGELHAILRRQEDFYPFLKDNREKIEKILTFRIPYYVGPLARGNSRFAWMTRKSEETITPWNFEEVVDKGASAQSFIERMTNFDKNLPNEKVLPKHSLLYEYFTVYNELTKVKYVTEGMRKPAFLSGEQKKAIVDLLFKTNRKVTVKQLKEDYFKKIECFDSVEISGVEDRFNASLGTYHDLLKIIKDKDFLDNEENEDILEDIVLTLTLFEDREMIEERLKTYAHLFDDKVMKQLKRRRYTGWGRLSRKLINGIRDKQSGKTILDFLKSDGFANRNFMQLIHDDSLTFKEDIQKAQVSGQGDSLHEHIANLAGSPAIKKGILQTVKVVDELVKVMGRHKPENIVIEMARENQTTQKGQKNSRERMKRIEEGIKELGSQILKEHPVENTQLQNEKLYLYYLQNGRDMYVDQELDINRLSDYDVDHIVPQSFLKDDSIDNKVLTRSDKARGKSDNVPSEEVVKKMKNYWRQLLNAKLITQRKFDNLTKAERGGLSELDKAGFIKRQLVETRQITKHVAQILDSRMNTKYDENDKLIREVKVITLKSKLVSDFRKDFQFYKVREINNYHHAHDAYLNAVVGTALIKKYPKLESEFVYGDYKVYDVRKMIAKSEQEIGKATAKYFFYSNIMNFFKTEITLANGEIRKRPLIETNGETGEIVWDKGRDFATVRKVLSMPQVNIVKKTEVQTGGFSKESILPKRNSDKLIARKKDWDPKKYGGFDSPTVAYSVLVVAKVEKGKSKKLKSVKELLGITIMERSSFEKNPIDFLEAKGYKEVKKDLIIKLPKYSLFELENGRKRMLASAGELQKGNELALPSKYVNFLYLASHYEKLKGSPEDNEQKQLFVEQHKHYLDEIIEQISEFSKRVILADANLDKVLSAYNKHRDKPIREQAENIIHLFTLTNLGAPAAFKYFDTTIDRKRYTSTKEVLDATLIHQSITGLYETRIDLSQLGGDGGEAAAKGGGGGSGGTLGDQGSRGSDPLPEPRVTLTVEGIPTEFLVNTGAEHSVLTKPMGKMGSKRTVVAGATGSKVYPWTTKRLLKIGQKQVTHSFLVIPECPAPLLGRDLLTKLKAQIQFSTEGPQVTWEDRPAMCLVLNLEEEYRLHEKPVPPSIDPSWLQLFPMVWAEKAGMGLANQVPPVVVELKSDASPVAVRQYPMSKEAREGIRPHIQRFLDLGILVPCQSPWNTPLLPVKKPGTNDYRPVQDLREVNKRVQDIHPTVPNPYNLLSSLPPSHTWYSVLDLKDAFFCLKLHPNSQPLFAFEWRDPEKGNTGQLTWTRLPQGFKNSPTLFNEALHRDLASFRALNPQVVMLQYVDDLLVAAPTYRDCKEGTRRLLQELSKLGYRVSAKKAQLCREEVTYLGYLLKGGKRWLTPARKATVMKIPTPTTPRQVREFLGKAGFCRLFIPGFASLAAPLYPLTRPKVPFTWTEAHQEAFGRIKEALLSAPALALPDLTKPFALYVDEKEGVARGVLTQTLGPWRRPVAYLSKKLDPVASGWPTCLKAIAAVALLLKDADKLTLGQNVLVIAPHNLESIVRQPPDRWMTNARMTHYQSLLLNERVSFAPPAILNPATLLPVESDDTPIHICSEILAEETGTRPDLRDQPLPGVPAWYTDGSSFIMDGRRQAGAAIVDNKRTVWASNLPEGTSAQKAELIALTQALRLAEGKSINIYTDSRYAFATAHVHGAIYKQRGWLTSAGKDIKNKEEILALLEAIHLPKRVAIIHCPGHQRGTDPVATGNRKADEAAKQAAQSTRILTETTKNAGKRTADGSEFEKRTADGSEFESPKKKAKVE

SEQ ID NO: 6963 - protein, 2096 aa, synthetic construct
MPAAKRVKLDGGDKKYSIGLDIGTNSVGWAVITDEYKVPSKKFKVLGNTDRHSIKKNLIGALLFDSGETAEATRLKRTARRRYTRRKNRICYLQEIFSNEMAKVDDSFFHRLEESFLVEEDKKHERHPIFGNIVDEVAYHEKYPTIYHLRKKLVDSTDKADLRLIYLALAHMIKFRGHFLIEGDLNPDNSDVDKLFIQLVQTYNQLFEENPINASGVDAKAILSARLSKSRRLENLIAQLPGEKKNGLFGNLIALSLGLTPNFKSNFDLAEDAKLQLSKDTYDDDLDNLLAQIGDQYADLFLAAKNLSDAILLSDILRVNTEITKAPLSASMIKRYDEHHQDLTLLKALVRQQLPEKYKEIFFDQSKNGYAGYIDGGASQEEFYKFIKPILEKMDGTEELLVKLNREDLLRKQRTFDNGSIPHQIHLGELHAILRRQEDFYPFLKDNREKIEKILTFRIPYYVGPLARGNSRFAWMTRKSEETITPWNFEEVVDKGASAQSFIERMTNFDKNLPNEKVLPKHSLLYEYFTVYNELTKVKYVTEGMRKPAFLSGEQKKAIVDLLFKTNRKVTVKQLKEDYFKKIECFDSVEISGVEDRFNASLGTYHDLLKIIKDKDFLDNEENEDILEDIVLTLTLFEDREMIEERLKTYAHLFDDKVMKQLKRRRYTGWGRLSRKLINGIRDKQSGKTILDFLKSDGFANRNFMQLIHDDSLTFKEDIQKAQVSGQGDSLHEHIANLAGSPAIKKGILQTVKVVDELVKVMGRHKPENIVIEMARENQTTQKGQKNSRERMKRIEEGIKELGSQILKEHPVENTQLQNEKLYLYYLQNGRDMYVDQELDINRLSDYDVDHIVPQSFLKDDSIDNKVLTRSDKARGKSDNVPSEEVVKKMKNYWRQLLNAKLITQRKFDNLTKAERGGLSELDKAGFIKRQLVETRQITKHVAQILDSRMNTKYDENDKLIREVKVITLKSKLVSDFRKDFQFYKVREINNYHHAHDAYLNAVVGTALIKKYPKLESEFVYGDYKVYDVRKMIAKSEQEIGKATAKYFFYSNIMNFFKTEITLANGEIRKRPLIETNGETGEIVWDKGRDFATVRKVLSMPQVNIVKKTEVQTGGFSKESILPKRNSDKLIARKKDWDPKKYGGFDSPTVAYSVLVVAKVEKGKSKKLKSVKELLGITIMERSSFEKNPIDFLEAKGYKEVKKDLIIKLPKYSLFELENGRKRMLASAGELQKGNELALPSKYVNFLYLASHYEKLKGSPEDNEQKQLFVEQHKHYLDEIIEQISEFSKRVILADANLDKVLSAYNKHRDKPIREQAENIIHLFTLTNLGAPAAFKYFDTTIDRKRYTSTKEVLDATLIHQSITGLYETRIDLSQLGGDGGEAAAKGGGGGSGGTLNLEDEYRLYETSAEPEVSPGSTWLSDFPQAWAETGGMGLAVRQAPLIIPLKATSTPVSIKQYPMSQEAKLGIKPHIQRLLDQGILVPCQSPWNTPLLPVKKPGTNDYRPVQDLREVNKRVEDIHPTVPNPYNLLSGLPPSHRWYTVLDLKDAFFCLRLHPTSQPLFAFEWRDPGMGISGQLTWTRLPQGFKNSPTLFNEALHRDLADFRIQHPDLILLQYVDDILLAATSELDCQQGTRALLLTLGNLGYRASAKKAQLCQKQVKYLGYLLKEGQRWLTEARKETVMGQPTPKTPRQLREFLGKAGFCRLFIPGFAEMAAPLYPLTKPGTLFNWGPDQQKAYQEIKQALLTAPALGLPDLTKPFELFVDEKQGYAKGVLTQKLGPWRRPVAYLSKKLDPVAAGWPPCLRMVAAIAVLRKDAGKLTMGQPLVILAPHAVEALVKQPPDRWLSNARMTHYQAMLLDTDRVQFGPVVALNPATLLPLPEEGAPHDCLEILAETHGTRPDLTDQPIPDADHTWYTDGSSFLQEGQRKAGAAVTTETEVIWARALPAGTSAQRAELIALTQALKMAEGKRLNVYTDSRYAFATAHIHGEIYRRRGWLTSEGREIKNKSEILALLKALFLPKRLSIIHCLGHQKGDSAEARGNRLADQAAREAAIKTPPDTSTLLAGKRTADGSEFEKRTADGSEFESPKKKAKVE

SEQ ID NO: 6964 - protein, 2096 aa, synthetic construct
MPAAKRVKLDGGDKKYSIGLDIGTNSVGWAVITDEYKVPSKKFKVLGNTDRHSIKKNLIGALLFDSGETAEATRLKRTARRRYTRRKNRICYLQEIFSNEMAKVDDSFFHRLEESFLVEEDKKHERHPIFGNIVDEVAYHEKYPTIYHLRKKLVDSTDKADLRLIYLALAHMIKFRGHFLIEGDLNPDNSDVDKLFIQLVQTYNQLFEENPINASGVDAKAILSARLSKSRRLENLIAQLPGEKKNGLFGNLIALSLGLTPNFKSNFDLAEDAKLQLSKDTYDDDLDNLLAQIGDQYADLFLAAKNLSDAILLSDILRVNTEITKAPLSASMIKRYDEHHQDLTLLKALVRQQLPEKYKEIFFDQSKNGYAGYIDGGASQEEFYKFIKPILEKMDGTEELLVKLNREDLLRKQRTFDNGSIPHQIHLGELHAILRRQEDFYPFLKDNREKIEKILTFRIPYYVGPLARGNSRFAWMTRKSEETITPWNFEEVVDKGASAQSFIERMTNFDKNLPNEKVLPKHSLLYEYFTVYNELTKVKYVTEGMRKPAFLSGEQKKAIVDLLFKTNRKVTVKQLKEDYFKKIECFDSVEISGVEDRFNASLGTYHDLLKIIKDKDFLDNEENEDILEDIVLTLTLFEDREMIEERLKTYAHLFDDKVMKQLKRRRYTGWGRLSRKLINGIRDKQSGKTILDFLKSDGFANRNFMQLIHDDSLTFKEDIQKAQVSGQGDSLHEHIANLAGSPAIKKGILQTVKVVDELVKVMGRHKPENIVIEMARENQTTQKGQKNSRERMKRIEEGIKELGSQILKEHPVENTQLQNEKLYLYYLQNGRDMYVDQELDINRLSDYDVDHIVPQSFLKDDSIDNKVLTRSDKARGKSDNVPSEEVVKKMKNYWRQLLNAKLITQRKFDNLTKAERGGLSELDKAGFIKRQLVETRQITKHVAQILDSRMNTKYDENDKLIREVKVITLKSKLVSDFRKDFQFYKVREINNYHHAHDAYLNAVVGTALIKKYPKLESEFVYGDYKVYDVRKMIAKSEQEIGKATAKYFFYSNIMNFFKTEITLANGEIRKRPLIETNGETGEIVWDKGRDFATVRKVLSMPQVNIVKKTEVQTGGFSKESILPKRNSDKLIARKKDWDPKKYGGFDSPTVAYSVLVVAKVEKGKSKKLKSVKELLGITIMERSSFEKNPIDFLEAKGYKEVKKDLIIKLPKYSLFELENGRKRMLASAGELQKGNELALPSKYVNFLYLASHYEKLKGSPEDNEQKQLFVEQHKHYLDEIIEQISEFSKRVILADANLDKVLSAYNKHRDKPIREQAENIIHLFTLTNLGAPAAFKYFDTTIDRKRYTSTKEVLDATLIHQSITGLYETRIDLSQLGGDGGEAAAKGGGGGSGGTLGIEDEYRLHETSTEPDVSLGSTWLSDFPQAWAETGGMGLAVRQAPLIIPLKATSTPVSIQQYPMSHEARLGIKPHIQRLLDQGILVPCQSPWNTPLLPVKKPGTNDYRPVQDLREVNKRVEDIHPTVPNPYNLLSGLPPSHQWYTVLDLKDAFFCLRLHPTSQPLFAFEWRDPGMGISGQLTWTRLPQGFKNSPTLFDEALHRDLADFRIQHPDLILLQYVDDILLAATSELDCQQGTRALLQTLGDLGYRASAKKAQICQKQVKYLGYLLREGQRWLTEARKETVMGQPVPKTPRQLREFLGTAGFCRLWIPGFAEMAAPLYPLTKTGTLFSWGPDQQKAYQEIKQALLTAPALGLPDLTKPFELFVDEKQGYAKGVLTQKLGPWRRPVAYLSKKLDPVAAGWPPCLRMVAAIAVLTKDAGKLTMGQPLVILAPHAVEALVKQPPDRWLSNARMTHYQAMLLDTDRVQFGPVVALNPATLLPLPEEGAPHDCLEILAETHGTRPDLTDQPIPDADHTWYTDGSSFLQEGQRKAGAAVTTETEVIWAGALPAGTSAQRAELIALTQALKMAEGKRLNVYTDSRYAFATAHIHGEIYRRRGLLTSEGREIKNKSEILALLKALFLPKRLSIIHCLGHQKGDSAEARGNRLADQAAREAAIKTPPDTSTLLAGKRTADGSEFEKRTADGSEFESPKKKAKVE

SEQ ID NO: 6965 - protein, 2096 aa, synthetic construct
MPAAKRVKLDGGDKKYSIGLDIGTNSVGWAVITDEYKVPSKKFKVLGNTDRHSIKKNLIGALLFDSGETAEATRLKRTARRRYTRRKNRICYLQEIFSNEMAKVDDSFFHRLEESFLVEEDKKHERHPIFGNIVDEVAYHEKYPTIYHLRKKLVDSTDKADLRLIYLALAHMIKFRGHFLIEGDLNPDNSDVDKLFIQLVQTYNQLFEENPINASGVDAKAILSARLSKSRRLENLIAQLPGEKKNGLFGNLIALSLGLTPNFKSNFDLAEDAKLQLSKDTYDDDLDNLLAQIGDQYADLFLAAKNLSDAILLSDILRVNTEITKAPLSASMIKRYDEHHQDLTLLKALVRQQLPEKYKEIFFDQSKNGYAGYIDGGASQEEFYKFIKPILEKMDGTEELLVKLNREDLLRKQRTFDNGSIPHQIHLGELHAILRRQEDFYPFLKDNREKIEKILTFRIPYYVGPLARGNSRFAWMTRKSEETITPWNFEEVVDKGASAQSFIERMTNFDKNLPNEKVLPKHSLLYEYFTVYNELTKVKYVTEGMRKPAFLSGEQKKAIVDLLFKTNRKVTVKQLKEDYFKKIECFDSVEISGVEDRFNASLGTYHDLLKIIKDKDFLDNEENEDILEDIVLTLTLFEDREMIEERLKTYAHLFDDKVMKQLKRRRYTGWGRLSRKLINGIRDKQSGKTILDFLKSDGFANRNFMQLIHDDSLTFKEDIQKAQVSGQGDSLHEHIANLAGSPAIKKGILQTVKVVDELVKVMGRHKPENIVIEMARENQTTQKGQKNSRERMKRIEEGIKELGSQILKEHPVENTQLQNEKLYLYYLQNGRDMYVDQELDINRLSDYDVDHIVPQSFLKDDSIDNKVLTRSDKARGKSDNVPSEEVVKKMKNYWRQLLNAKLITQRKFDNLTKAERGGLSELDKAGFIKRQLVETRQITKHVAQILDSRMNTKYDENDKLIREVKVITLKSKLVSDFRKDFQFYKVREINNYHHAHDAYLNAVVGTALIKKYPKLESEFVYGDYKVYDVRKMIAKSEQEIGKATAKYFFYSNIMNFFKTEITLANGEIRKRPLIETNGETGEIVWDKGRDFATVRKVLSMPQVNIVKKTEVQTGGFSKESILPKRNSDKLIARKKDWDPKKYGGFDSPTVAYSVLVVAKVEKGKSKKLKSVKELLGITIMERSSFEKNPIDFLEAKGYKEVKKDLIIKLPKYSLFELENGRKRMLASAGELQKGNELALPSKYVNFLYLASHYEKLKGSPEDNEQKQLFVEQHKHYLDEIIEQISEFSKRVILADANLDKVLSAYNKHRDKPIREQAENIIHLFTLTNLGAPAAFKYFDTTIDRKRYTSTKEVLDATLIHQSITGLYETRIDLSQLGGDGGEAAAKGGGGGSGGTLNIEDEYRLHETSKGPDVPLGSTWLSDFPQAWAETGGMGLAVRQAPLIIPLKATSTPVSIKQYPMSQEARLGIKPHIQRLLDQGILVPCQSPWNTPLLPVKKPGTNDYRPVQDLREVNKRVEDIHPTVPNPYNLLSGLPPSHQWYTVLDLKDAFFCLRLHPTSQSLFAFEWRDPEMGISGQLTWTRLPQGFKNSPTLFDEALHRDLADFRIQHPDLILLQYVDDLLLAATSELDCQQGTRALLQTLGDLGYRASAKKAQICQKQVKYLGYLLKEGQRWLTEARKETVMGQPTPKTPRQLREFLGTAGFCRLWIPGFAEMAAPLYPLTKTGTLFEWGPDQQKAYQEIKQALLTAPALGLPDLTKPFELFVDEKQGYAKGVLTQKLGPWRRPVAYLSKKLDPVAAGWPPCLRMVAAIAVLTKDAGKLTMGQPLVILAPHAVEALVKQPPDRWLSNARMTHYQALLLDTDRVQFGPIVALNPATLLPLPEEGLQHDCLDILAEAHGTRPDLTDQPLPDADHTWYTDGSSFLQEGQRKAGAAVTTETEVVWAKALPAGTSAQRAELIALTQALKMAEGKKLNVYTDSRYAFATAHIHGEIYRRRGLLTSEGKEIKNKDEILALLKALFLPKRLSIIHCPGHQKGNRAEARGNRMADQAAREVATRETPETSTLLAGKRTADGSEFEKRTADGSEFESPKKKAKVE

SEQ ID NO: 6966 - protein, 2087 aa, synthetic construct
MPAAKRVKLDGGDKKYSIGLDIGTNSVGWAVITDEYKVPSKKFKVLGNTDRHSIKKNLIGALLFDSGETAEATRLKRTARRRYTRRKNRICYLQEIFSNEMAKVDDSFFHRLEESFLVEEDKKHERHPIFGNIVDEVAYHEKYPTIYHLRKKLVDSTDKADLRLIYLALAHMIKFRGHFLIEGDLNPDNSDVDKLFIQLVQTYNQLFEENPINASGVDAKAILSARLSKSRRLENLIAQLPGEKKNGLFGNLIALSLGLTPNFKSNFDLAEDAKLQLSKDTYDDDLDNLLAQIGDQYADLFLAAKNLSDAILLSDILRVNTEITKAPLSASMIKRYDEHHQDLTLLKALVRQQLPEKYKEIFFDQSKNGYAGYIDGGASQEEFYKFIKPILEKMDGTEELLVKLNREDLLRKQRTFDNGSIPHQIHLGELHAILRRQEDFYPFLKDNREKIEKILTFRIPYYVGPLARGNSRFAWMTRKSEETITPWNFEEVVDKGASAQSFIERMTNFDKNLPNEKVLPKHSLLYEYFTVYNELTKVKYVTEGMRKPAFLSGEQKKAIVDLLFKTNRKVTVKQLKEDYFKKIECFDSVEISGVEDRFNASLGTYHDLLKIIKDKDFLDNEENEDILEDIVLTLTLFEDREMIEERLKTYAHLFDDKVMKQLKRRRYTGWGRLSRKLINGIRDKQSGKTILDFLKSDGFANRNFMQLIHDDSLTFKEDIQKAQVSGQGDSLHEHIANLAGSPAIKKGILQTVKVVDELVKVMGRHKPENIVIEMARENQTTQKGQKNSRERMKRIEEGIKELGSQILKEHPVENTQLQNEKLYLYYLQNGRDMYVDQELDINRLSDYDVDHIVPQSFLKDDSIDNKVLTRSDKARGKSDNVPSEEVVKKMKNYWRQLLNAKLITQRKFDNLTKAERGGLSELDKAGFIKRQLVETRQITKHVAQILDSRMNTKYDENDKLIREVKVITLKSKLVSDFRKDFQFYKVREINNYHHAHDAYLNAVVGTALIKKYPKLESEFVYGDYKVYDVRKMIAKSEQEIGKATAKYFFYSNIMNFFKTEITLANGEIRKRPLIETNGETGEIVWDKGRDFATVRKVLSMPQVNIVKKTEVQTGGFSKESILPKRNSDKLIARKKDWDPKKYGGFDSPTVAYSVLVVAKVEKGKSKKLKSVKELLGITIMERSSFEKNPIDFLEAKGYKEVKKDLIIKLPKYSLFELENGRKRMLASAGELQKGNELALPSKYVNFLYLASHYEKLKGSPEDNEQKQLFVEQHKHYLDEIIEQISEFSKRVILADANLDKVLSAYNKHRDKPIREQAENIIHLFTLTNLGAPAAFKYFDTTIDRKRYTSTKEVLDATLIHQSITGLYETRIDLSQLGGDGGEAAAKGGGGGSGGIPWLMKKPLQLTTLVPLQEYEERLLKQTMLTGSYKEKLQSLFLKYDALWQHWENQVGHRRIKPHHIATGTVNPRPQKQYPINPKAKASIQTVINDLLKQGVLIQQNSIMNTPVYPVPKPDGKWRMVLDYREVNKTIPLIAAQNQHSAGILSSIFRGKYKTTLDLSNGFWAHSITPESYWLTAFTWLGQQYCWTRLPQGFLNSPALFNADVVDLLKEVPNVQVYVDDIYISHDDPREHLEQLEKVFSLLLNAGYVVSLKKSEIAQHEVEFLGFNITKEGRGLTETFKQKLLNITPPRDLKQLQSILGLLNFARNFIPNFSELVKPLYNIIATAPGKYITWTTDNSQQLQNIISMLNSAENLEERNPEVRLIMKVNTSPSAGYIRFYNEFAKRPIMYLNYVYTKAEVKFTNTEKLLTTIHKGLIKALDLGMGQEILVYSPIVSMTKIQKTPLPERKALPIRWITWMSYLEDPRIQFHYDKTLPELQQVPTVTDDIIAKIKHPSEFSMVFYTDGSAIKHPNVNKSHNAGMGIAQVQFKPEFTVINTWSIPLGDHTAQLAEVAAVEFACKKALKIDGPVLIVTDSFYVAESVNKELPYWQSNGFFNNKKKPLKHVSKWKSIADCIQLKPDIIIIHEKGHQPTASTFHTEGNNLADKLATQGSYVVNAGKRTADGSEFEKRTADGSEFESPKKKAKVE

SEQ ID NO: 6967 - protein, 2087 aa, synthetic construct
MPAAKRVKLDGGDKKYSIGLDIGTNSVGWAVITDEYKVPSKKFKVLGNTDRHSIKKNLIGALLFDSGETAEATRLKRTARRRYTRRKNRICYLQEIFSNEMAKVDDSFFHRLEESFLVEEDKKHERHPIFGNIVDEVAYHEKYPTIYHLRKKLVDSTDKADLRLIYLALAHMIKFRGHFLIEGDLNPDNSDVDKLFIQLVQTYNQLFEENPINASGVDAKAILSARLSKSRRLENLIAQLPGEKKNGLFGNLIALSLGLTPNFKSNFDLAEDAKLQLSKDTYDDDLDNLLAQIGDQYADLFLAAKNLSDAILLSDILRVNTEITKAPLSASMIKRYDEHHQDLTLLKALVRQQLPEKYKEIFFDQSKNGYAGYIDGGASQEEFYKFIKPILEKMDGTEELLVKLNREDLLRKQRTFDNGSIPHQIHLGELHAILRRQEDFYPFLKDNREKIEKILTFRIPYYVGPLARGNSRFAWMTRKSEETITPWNFEEVVDKGASAQSFIERMTNFDKNLPNEKVLPKHSLLYEYFTVYNELTKVKYVTEGMRKPAFLSGEQKKAIVDLLFKTNRKVTVKQLKEDYFKKIECFDSVEISGVEDRFNASLGTYHDLLKIIKDKDFLDNEENEDILEDIVLTLTLFEDREMIEERLKTYAHLFDDKVMKQLKRRRYTGWGRLSRKLINGIRDKQSGKTILDFLKSDGFANRNFMQLIHDDSLTFKEDIQKAQVSGQGDSLHEHIANLAGSPAIKKGILQTVKVVDELVKVMGRHKPENIVIEMARENQTTQKGQKNSRERMKRIEEGIKELGSQILKEHPVENTQLQNEKLYLYYLQNGRDMYVDQELDINRLSDYDVDHIVPQSFLKDDSIDNKVLTRSDKARGKSDNVPSEEVVKKMKNYWRQLLNAKLITQRKFDNLTKAERGGLSELDKAGFIKRQLVETRQITKHVAQILDSRMNTKYDENDKLIREVKVITLKSKLVSDFRKDFQFYKVREINNYHHAHDAYLNAVVGTALIKKYPKLESEFVYGDYKVYDVRKMIAKSEQEIGKATAKYFFYSNIMNFFKTEITLANGEIRKRPLIETNGETGEIVWDKGRDFATVRKVLSMPQVNIVKKTEVQTGGFSKESILPKRNSDKLIARKKDWDPKKYGGFDSPTVAYSVLVVAKVEKGKSKKLKSVKELLGITIMERSSFEKNPIDFLEAKGYKEVKKDLIIKLPKYSLFELENGRKRMLASAGELQKGNELALPSKYVNFLYLASHYEKLKGSPEDNEQKQLFVEQHKHYLDEIIEQISEFSKRVILADANLDKVLSAYNKHRDKPIREQAENIIHLFTLTNLGAPAAFKYFDTTIDRKRYTSTKEVLDATLIHQSITGLYETRIDLSQLGGDGGEAAAKGGGGGSGGIPWLMKKPLQLTTLVPLQEYEERLLKQTMLTGSYKEKLQSLFLKYDALWQHWENQVGHRRIKPHHIATGTVNPRPQKQYPINPKAKASIQTVINDLLKQGVLIQQNSIMNTPVYPVPKPDGKWRMVLDYREVNKTIPLIAAQNQHSAGILSSIFRGKYKTTLDLSNGFWAHSITPESYWLTAFTWLGQQYCWTRLPQGFLNSPALFNADVVDLLKEVPNVQVYVDDIYISHDDPREHLEQLEKVFSLLLNAGYVVSLKKSEIAQHEVEFLGFNITKEGRGLTETFKQKLLNITPPRDLKQLQSILGKLNFARNFIPNFSELVKPLYNIIATAPGKYITWTTDNSQQLQNIISMLNSAENLEERNPEVRLIMKVNTSPSAGYIRFYNEFAKRPIMYLNYVYTKAEVKFTNTEKLLTTIHKGLIKALDLGMGQEILVYSPIVSMTKIQKTPLPERKALPIRWITWMSYLEDPRIQFHYDKTLPELQQVPTVTDDIIAKIKHPSEFSMVFYTDGSAIKHPNVNKSHNAGMGIAQVQFKPEFTVINTWSIPLGDHTAQLAEVAAVEFACKKALKIDGPVLIVTDSFYVAESVNKELPYWQSNGFFNNKKKPLKHVSKWKSIADCIQLKPDIIIIHEKGHQPTASTFHTEGNNLADKLATQGSYVVNAGKRTADGSEFEKRTADGSEFESPKKKAKVE

SEQ ID NO: 6968 - protein, 2094 aa, synthetic construct
MPAAKRVKLDGGDKKYSIGLDIGTNSVGWAVITDEYKVPSKKFKVLGNTDRHSIKKNLIGALLFDSGETAEATRLKRTARRRYTRRKNRICYLQEIFSNEMAKVDDSFFHRLEESFLVEEDKKHERHPIFGNIVDEVAYHEKYPTIYHLRKKLVDSTDKADLRLIYLALAHMIKFRGHFLIEGDLNPDNSDVDKLFIQLVQTYNQLFEENPINASGVDAKAILSARLSKSRRLENLIAQLPGEKKNGLFGNLIALSLGLTPNFKSNFDLAEDAKLQLSKDTYDDDLDNLLAQIGDQYADLFLAAKNLSDAILLSDILRVNTEITKAPLSASMIKRYDEHHQDLTLLKALVRQQLPEKYKEIFFDQSKNGYAGYIDGGASQEEFYKFIKPILEKMDGTEELLVKLNREDLLRKQRTFDNGSIPHQIHLGELHAILRRQEDFYPFLKDNREKIEKILTFRIPYYVGPLARGNSRFAWMTRKSEETITPWNFEEVVDKGASAQSFIERMTNFDKNLPNEKVLPKHSLLYEYFTVYNELTKVKYVTEGMRKPAFLSGEQKKAIVDLLFKTNRKVTVKQLKEDYFKKIECFDSVEISGVEDRFNASLGTYHDLLKIIKDKDFLDNEENEDILEDIVLTLTLFEDREMIEERLKTYAHLFDDKVMKQLKRRRYTGWGRLSRKLINGIRDKQSGKTILDFLKSDGFANRNFMQLIHDDSLTFKEDIQKAQVSGQGDSLHEHIANLAGSPAIKKGILQTVKVVDELVKVMGRHKPENIVIEMARENQTTQKGQKNSRERMKRIEEGIKELGSQILKEHPVENTQLQNEKLYLYYLQNGRDMYVDQELDINRLSDYDVDHIVPQSFLKDDSIDNKVLTRSDKARGKSDNVPSEEVVKKMKNYWRQLLNAKLITQRKFDNLTKAERGGLSELDKAGFIKRQLVETRQITKHVAQILDSRMNTKYDENDKLIREVKVITLKSKLVSDFRKDFQFYKVREINNYHHAHDAYLNAVVGTALIKKYPKLESEFVYGDYKVYDVRKMIAKSEQEIGKATAKYFFYSNIMNFFKTEITLANGEIRKRPLIETNGETGEIVWDKGRDFATVRKVLSMPQVNIVKKTEVQTGGFSKESILPKRNSDKLIARKKDWDPKKYGGFDSPTVAYSVLVVAKVEKGKSKKLKSVKELLGITIMERSSFEKNPIDFLEAKGYKEVKKDLIIKLPKYSLFELENGRKRMLASAGELQKGNELALPSKYVNFLYLASHYEKLKGSPEDNEQKQLFVEQHKHYLDEIIEQISEFSKRVILADANLDKVLSAYNKHRDKPIREQAENIIHLFTLTNLGAPAAFKYFDTTIDRKRYTSTKEVLDATLIHQSITGLYETRIDLSQLGGDGGEAAAKGGGGGSGGVLNLEEEYRLHEKPVPSSIDPSWLQLFPTVWAERAGMGLANQVPPVVVELRSGASPVAVRQYPMSKEAREGIRPHIQRFLDLGVLVPCQSPWNTPLLPVKKPGTNDYRPVQDLREINKRVQDIHPTVPNPYNLLSSLPPSHTWYSVLDLKDAFFCLKLHPNSQPLFAFEWRDPEKGNTGQLTWTRLPQGFKNSPTLFNEALHRDLAPFRALNPQVVLLQYVDDLLVAAPTYRDCKEGTQKLLQELSKLGYRVSAKKAQLCQKEVTYLGYLLKEGKRWLTPARKATVMKIPPPTTPRQVREFLGKAGFCRLFIPGFASLAAPLYPLTKPSIPFIWTEEHQKAFDRIKEALLSAPALALPDLTKPFTLYVDERAGVARGVLTQTLGPWRRPVAYLSKKLDPVASGWPTCLKAVAAVALLLKDADKLTLGQNVTVIASHSLESIVRQPPDRWMTNARMTHYQSLLLNERVSFAPPAVLNPATLLPVESEATPVHRCSEILAEETGTRRDLKDQPLPGVPAWYTDGSSFIAEGKRRAGAAIVDGKRTVWASSLPEGTSAQKAELVALTQALRLAEGKDINIYTDSRYAFATAHIHGAIYKQRGWLTSAGKDIKNKEEILALLEAIHLPKRVAIIHCPGHQKGNDPVATGNRRADEAAKQAALSTRVLAETTKPAGKRTADGSEFEKRTADGSEFESPKKKAKVE

SEQ ID NO: 6969 - protein, 2096 aa, synthetic construct
MPAAKRVKLDGGDKKYSIGLDIGTNSVGWAVITDEYKVPSKKFKVLGNTDRHSIKKNLIGALLFDSGETAEATRLKRTARRRYTRRKNRICYLQEIFSNEMAKVDDSFFHRLEESFLVEEDKKHERHPIFGNIVDEVAYHEKYPTIYHLRKKLVDSTDKADLRLIYLALAHMIKFRGHFLIEGDLNPDNSDVDKLFIQLVQTYNQLFEENPINASGVDAKAILSARLSKSRRLENLIAQLPGEKKNGLFGNLIALSLGLTPNFKSNFDLAEDAKLQLSKDTYDDDLDNLLAQIGDQYADLFLAAKNLSDAILLSDILRVNTEITKAPLSASMIKRYDEHHQDLTLLKALVRQQLPEKYKEIFFDQSKNGYAGYIDGGASQEEFYKFIKPILEKMDGTEELLVKLNREDLLRKQRTFDNGSIPHQIHLGELHAILRRQEDFYPFLKDNREKIEKILTFRIPYYVGPLARGNSRFAWMTRKSEETITPWNFEEVVDKGASAQSFIERMTNFDKNLPNEKVLPKHSLLYEYFTVYNELTKVKYVTEGMRKPAFLSGEQKKAIVDLLFKTNRKVTVKQLKEDYFKKIECFDSVEISGVEDRFNASLGTYHDLLKIIKDKDFLDNEENEDILEDIVLTLTLFEDREMIEERLKTYAHLFDDKVMKQLKRRRYTGWGRLSRKLINGIRDKQSGKTILDFLKSDGFANRNFMQLIHDDSLTFKEDIQKAQVSGQGDSLHEHIANLAGSPAIKKGILQTVKVVDELVKVMGRHKPENIVIEMARENQTTQKGQKNSRERMKRIEEGIKELGSQILKEHPVENTQLQNEKLYLYYLQNGRDMYVDQELDINRLSDYDVDHIVPQSFLKDDSIDNKVLTRSDKARGKSDNVPSEEVVKKMKNYWRQLLNAKLITQRKFDNLTKAERGGLSELDKAGFIKRQLVETRQITKHVAQILDSRMNTKYDENDKLIREVKVITLKSKLVSDFRKDFQFYKVREINNYHHAHDAYLNAVVGTALIKKYPKLESEFVYGDYKVYDVRKMIAKSEQEIGKATAKYFFYSNIMNFFKTEITLANGEIRKRPLIETNGETGEIVWDKGRDFATVRKVLSMPQVNIVKKTEVQTGGFSKESILPKRNSDKLIARKKDWDPKKYGGFDSPTVAYSVLVVAKVEKGKSKKLKSVKELLGITIMERSSFEKNPIDFLEAKGYKEVKKDLIIKLPKYSLFELENGRKRMLASAGELQKGNELALPSKYVNFLYLASHYEKLKGSPEDNEQKQLFVEQHKHYLDEIIEQISEFSKRVILADANLDKVLSAYNKHRDKPIREQAENIIHLFTLTNLGAPAAFKYFDTTIDRKRYTSTKEVLDATLIHQSITGLYETRIDLSQLGGDGGEAAAKGGGGGSGGTLNIEDEYRLHETSKEPDVPLGSTWLSDFPQAWAETGGMGLAVRQAPLIIPLKATSTPVSIKQYPMSQEARLGIKPHIQRLLDQGILVPCQSPWNTPLLPVKKPGTNDYRPVQDLREVNKRVEDIHPTVPNPYNLLSGLPPSHQWYTVLDLKDAFFCLRLHPTSQPLFAFEWRDPEMGISGQLTWTRLPQGFKNSPTLFNEALHRDLADFRIQHPDLILLQYVDDLLLAATSEQDCQRGTRALLQTLGNLGYRASAKKAQICQKQVKYLGYLLKEGQRWLTEARKETVMGQPTPKTPRQLREFLGTAGFCRLWIPGFAEMAAPLYPLTKPGTLFNWGPDQQKAYQEIKQALLTAPALGLPDLTKPFELFVDEKQGYAKGVLTQKLGPWRRPVAYLSKKLDPVAAGWPPCLRMVAAIAVLTKDAGKLTMGQPLVILAPHAVEALVKQPPDRWLSNARMTHYQAMLLDTDRVQFGPVVALNPATLLPLPEKEAPHDCLEILAETHGTRPDLTDQPIPDADYTWYTDGSSFLQEGQRRAGAAVTTETEVIWARALPAGTSAQRAELIALTQALKMAEGKKLNVYTDSRYAFATAHVHGEIYRRRGWLTSEGREIKNKNEILALLKALFLPKRLSIIHCPGHQKGNSAEARGNRMADQAAREAAMKAVLETSTLLAGKRTADGSEFEKRTADGSEFESPKKKAKVE

SEQ ID NO: 6970 - protein, 2096 aa, synthetic construct
MPAAKRVKLDGGDKKYSIGLDIGTNSVGWAVITDEYKVPSKKFKVLGNTDRHSIKKNLIGALLFDSGETAEATRLKRTARRRYTRRKNRICYLQEIFSNEMAKVDDSFFHRLEESFLVEEDKKHERHPIFGNIVDEVAYHEKYPTIYHLRKKLVDSTDKADLRLIYLALAHMIKFRGHFLIEGDLNPDNSDVDKLFIQLVQTYNQLFEENPINASGVDAKAILSARLSKSRRLENLIAQLPGEKKNGLFGNLIALSLGLTPNFKSNFDLAEDAKLQLSKDTYDDDLDNLLAQIGDQYADLFLAAKNLSDAILLSDILRVNTEITKAPLSASMIKRYDEHHQDLTLLKALVRQQLPEKYKEIFFDQSKNGYAGYIDGGASQEEFYKFIKPILEKMDGTEELLVKLNREDLLRKQRTFDNGSIPHQIHLGELHAILRRQEDFYPFLKDNREKIEKILTFRIPYYVGPLARGNSRFAWMTRKSEETITPWNFEEVVDKGASAQSFIERMTNFDKNLPNEKVLPKHSLLYEYFTVYNELTKVKYVTEGMRKPAFLSGEQKKAIVDLLFKTNRKVTVKQLKEDYFKKIECFDSVEISGVEDRFNASLGTYHDLLKIIKDKDFLDNEENEDILEDIVLTLTLFEDREMIEERLKTYAHLFDDKVMKQLKRRRYTGWGRLSRKLINGIRDKQSGKTILDFLKSDGFANRNFMQLIHDDSLTFKEDIQKAQVSGQGDSLHEHIANLAGSPAIKKGILQTVKVVDELVKVMGRHKPENIVIEMARENQTTQKGQKNSRERMKRIEEGIKELGSQILKEHPVENTQLQNEKLYLYYLQNGRDMYVDQELDINRLSDYDVDHIVPQSFLKDDSIDNKVLTRSDKARGKSDNVPSEEVVKKMKNYWRQLLNAKLITQRKFDNLTKAERGGLSELDKAGFIKRQLVETRQITKHVAQILDSRMNTKYDENDKLIREVKVITLKSKLVSDFRKDFQFYKVREINNYHHAHDAYLNAVVGTALIKKYPKLESEFVYGDYKVYDVRKMIAKSEQEIGKATAKYFFYSNIMNFFKTEITLANGEIRKRPLIETNGETGEIVWDKGRDFATVRKVLSMPQVNIVKKTEVQTGGFSKESILPKRNSDKLIARKKDWDPKKYGGFDSPTVAYSVLVVAKVEKGKSKKLKSVKELLGITIMERSSFEKNPIDFLEAKGYKEVKKDLIIKLPKYSLFELENGRKRMLASAGELQKGNELALPSKYVNFLYLASHYEKLKGSPEDNEQKQLFVEQHKHYLDEIIEQISEFSKRVILADANLDKVLSAYNKHRDKPIREQAENIIHLFTLTNLGAPAAFKYFDTTIDRKRYTSTKEVLDATLIHQSITGLYETRIDLSQLGGDGGGGSGGGPAPGGTAPLEEEYRLFLEAPIQNVTLLEQWKREIPKVWAEINPPGLASTQAPIHVQLLSTALPVRVRQYPITLEAKRSLRETIRKFRAAGILRPVHSPWNTPLLPVRKSGTSEYRMVQDLREVNKRVETIHPTVPNPYTLLSLLPPDRIWYSVLDLKDAFFCIPLAPESQLIFAFEWADAEEGESGQLTWTRLPQGFKNSPTLFDEALNRDLQGFRLDHPSVSLLQYVDDLLIAADTQAACLSATRDLLMTLAELGYRVSGKKAQLCQEEVTYLGFKIHKGSRSLSNSRTQAILQIPVPKTKRQVREFLGTIGYCRLWIPGFAELAQPLYAATRGGNDPLVWGEKEEEAFQSLKLALTQPPALALPSLDKPFQLFVEETSGAAKGVLTQALGPWKRPVAYLSKRLDPVAAGWPRCLRAIAAAALLTREASKLTFGQDIEITSSHNLESLLRSPPDKWLTNARITQYQVLLLDPPRVRFKQTAALNPATLLPETDDTLPIHHCLDTLDSLTSTRPDLTDQPLAQAEATLFTDGSSYIRDGKRYAGAAVVTLDSVIWAEPLPIGTSAQKAELIALTKALEWSKDKSVNIYTDSRYAFATLHVHGMIYRERGLLTAGGKAIKNAPEILALLTAVWLPKRVAVMHCKGHQKDDAPTSTGNRRADEVAREVAIRPLSTQATISAGKRTADGSEFEKRTADGSEFESPKKKAKVE

SEQ ID NO: 6971 - protein, 2096 aa, synthetic construct
MPAAKRVKLDGGDKKYSIGLDIGTNSVGWAVITDEYKVPSKKFKVLGNTDRHSIKKNLIGALLFDSGETAEATRLKRTARRRYTRRKNRICYLQEIFSNEMAKVDDSFFHRLEESFLVEEDKKHERHPIFGNIVDEVAYHEKYPTIYHLRKKLVDSTDKADLRLIYLALAHMIKFRGHFLIEGDLNPDNSDVDKLFIQLVQTYNQLFEENPINASGVDAKAILSARLSKSRRLENLIAQLPGEKKNGLFGNLIALSLGLTPNFKSNFDLAEDAKLQLSKDTYDDDLDNLLAQIGDQYADLFLAAKNLSDAILLSDILRVNTEITKAPLSASMIKRYDEHHQDLTLLKALVRQQLPEKYKEIFFDQSKNGYAGYIDGGASQEEFYKFIKPILEKMDGTEELLVKLNREDLLRKQRTFDNGSIPHQIHLGELHAILRRQEDFYPFLKDNREKIEKILTFRIPYYVGPLARGNSRFAWMTRKSEETITPWNFEEVVDKGASAQSFIERMTNFDKNLPNEKVLPKHSLLYEYFTVYNELTKVKYVTEGMRKPAFLSGEQKKAIVDLLFKTNRKVTVKQLKEDYFKKIECFDSVEISGVEDRFNASLGTYHDLLKIIKDKDFLDNEENEDILEDIVLTLTLFEDREMIEERLKTYAHLFDDKVMKQLKRRRYTGWGRLSRKLINGIRDKQSGKTILDFLKSDGFANRNFMQLIHDDSLTFKEDIQKAQVSGQGDSLHEHIANLAGSPAIKKGILQTVKVVDELVKVMGRHKPENIVIEMARENQTTQKGQKNSRERMKRIEEGIKELGSQILKEHPVENTQLQNEKLYLYYLQNGRDMYVDQELDINRLSDYDVDHIVPQSFLKDDSIDNKVLTRSDKARGKSDNVPSEEVVKKMKNYWRQLLNAKLITQRKFDNLTKAERGGLSELDKAGFIKRQLVETRQITKHVAQILDSRMNTKYDENDKLIREVKVITLKSKLVSDFRKDFQFYKVREINNYHHAHDAYLNAVVGTALIKKYPKLESEFVYGDYKVYDVRKMIAKSEQEIGKATAKYFFYSNIMNFFKTEITLANGEIRKRPLIETNGETGEIVWDKGRDFATVRKVLSMPQVNIVKKTEVQTGGFSKESILPKRNSDKLIARKKDWDPKKYGGFDSPTVAYSVLVVAKVEKGKSKKLKSVKELLGITIMERSSFEKNPIDFLEAKGYKEVKKDLIIKLPKYSLFELENGRKRMLASAGELQKGNELALPSKYVNFLYLASHYEKLKGSPEDNEQKQLFVEQHKHYLDEIIEQISEFSKRVILADANLDKVLSAYNKHRDKPIREQAENIIHLFTLTNLGAPAAFKYFDTTIDRKRYTSTKEVLDATLIHQSITGLYETRIDLSQLGGDGGGGSGGGPAPGGTAPLEEEYRLFLEAPIQNVTLLEQWKREIPKVWAEINPPGLASTQAPIHVQLLSTALPVRVRQYPITLEAKRSLRETIRKFRAAGILRPVHSPWNTPLLPVRKSGTSEYRMVQDLREVNKRVETIHPTVPNPYTLLSLLPPDRIWYSVLDLKDAFFCIPLAPESQLIFAFEWADAEEGESGQLTWTRLPQGFKNSPTLFNEALNRDLQGFRLDHPSVSLLQYVDDLLIAADTQAACLSATRDLLMTLAELGYRVSGKKAQLCQEEVTYLGFKIHKGSRSLSNSRTQAILQIPVPKTKRQVREFLGTIGYCRLWIPGFAELAQPLYAATRPGNDPLVWGEKEEEAFQSLKLALTQPPALALPSLDKPFQLFVEETSGAAKGVLTQALGPWKRPVAYLSKRLDPVAAGWPRCLRAIAAAALLTREASKLTFGQDIEITSSHNLESLLRSPPDKWLTNARITQYQVLLLDPPRVRFKQTAALNPATLLPETDDTLPIHHCLDTLDSLTSTRPDLTDQPLAQAEATLFTDGSSYIRDGKRYAGAAVVTLDSVIWAEPLPIGTSAQKAELIALTKALEWSKDKSVNIYTDSRYAFATLHVHGMIYRERGWLTAGGKAIKNAPEILALLTAVWLPKRVAVMHCKGHQKDDAPTSTGNRRADEVAREVAIRPLSTQATISAGKRTADGSEFEKRTADGSEFESPKKKAKVE

SEQ ID NO: 6972 - protein, 2096 aa, synthetic construct
MPAAKRVKLDGGDKKYSIGLDIGTNSVGWAVITDEYKVPSKKFKVLGNTDRHSIKKNLIGALLFDSGETAEATRLKRTARRRYTRRKNRICYLQEIFSNEMAKVDDSFFHRLEESFLVEEDKKHERHPIFGNIVDEVAYHEKYPTIYHLRKKLVDSTDKADLRLIYLALAHMIKFRGHFLIEGDLNPDNSDVDKLFIQLVQTYNQLFEENPINASGVDAKAILSARLSKSRRLENLIAQLPGEKKNGLFGNLIALSLGLTPNFKSNFDLAEDAKLQLSKDTYDDDLDNLLAQIGDQYADLFLAAKNLSDAILLSDILRVNTEITKAPLSASMIKRYDEHHQDLTLLKALVRQQLPEKYKEIFFDQSKNGYAGYIDGGASQEEFYKFIKPILEKMDGTEELLVKLNREDLLRKQRTFDNGSIPHQIHLGELHAILRRQEDFYPFLKDNREKIEKILTFRIPYYVGPLARGNSRFAWMTRKSEETITPWNFEEVVDKGASAQSFIERMTNFDKNLPNEKVLPKHSLLYEYFTVYNELTKVKYVTEGMRKPAFLSGEQKKAIVDLLFKTNRKVTVKQLKEDYFKKIECFDSVEISGVEDRFNASLGTYHDLLKIIKDKDFLDNEENEDILEDIVLTLTLFEDREMIEERLKTYAHLFDDKVMKQLKRRRYTGWGRLSRKLINGIRDKQSGKTILDFLKSDGFANRNFMQLIHDDSLTFKEDIQKAQVSGQGDSLHEHIANLAGSPAIKKGILQTVKVVDELVKVMGRHKPENIVIEMARENQTTQKGQKNSRERMKRIEEGIKELGSQILKEHPVENTQLQNEKLYLYYLQNGRDMYVDQELDINRLSDYDVDHIVPQSFLKDDSIDNKVLTRSDKARGKSDNVPSEEVVKKMKNYWRQLLNAKLITQRKFDNLTKAERGGLSELDKAGFIKRQLVETRQITKHVAQILDSRMNTKYDENDKLIREVKVITLKSKLVSDFRKDFQFYKVREINNYHHAHDAYLNAVVGTALIKKYPKLESEFVYGDYKVYDVRKMIAKSEQEIGKATAKYFFYSNIMNFFKTEITLANGEIRKRPLIETNGETGEIVWDKGRDFATVRKVLSMPQVNIVKKTEVQTGGFSKESILPKRNSDKLIARKKDWDPKKYGGFDSPTVAYSVLVVAKVEKGKSKKLKSVKELLGITIMERSSFEKNPIDFLEAKGYKEVKKDLIIKLPKYSLFELENGRKRMLASAGELQKGNELALPSKYVNFLYLASHYEKLKGSPEDNEQKQLFVEQHKHYLDEIIEQISEFSKRVILADANLDKVLSAYNKHRDKPIREQAENIIHLFTLTNLGAPAAFKYFDTTIDRKRYTSTKEVLDATLIHQSITGLYETRIDLSQLGGDGGGGSGGGPAPGGTAPLEEEYRLFLEAPIQNVTLLEQWKREIPKVWAEINPPGLASTQAPIHVQLLSTALPVRVRQYPITLEAKRSLRETIRKFRAAGILRPVHSPWNTPLLPVRKSGTSEYRMVQDLREVNKRVETIHPTVPNPYTLLSLLPPDRIWYSVLDLKDAFFCIPLAPESQLIFAFEWADAEEGESGQLTWTRLPQGFKNSPTLFNEALNRDLQGFRLDHPSVSLLQYVDDLLIAADTQAACLSATRDLLMTLAELGYRVSGKKAQLCQEEVTYLGFKIHKGSRSLSNSRTQAILQIPVPKTKRQVREFLGKIGYCRLFIPGFAELAQPLYAATRPGNDPLVWGEKEEEAFQSLKLALTQPPALALPSLDKPFQLFVEETSGAAKGVLTQALGPWKRPVAYLSKRLDPVAAGWPRCLRAIAAAALLTREASKLTFGQDIEITSSHNLESLLRSPPDKWLTNARITQYQVLLLDPPRVRFKQTAALNPATLLPETDDTLPIHHCLDTLDSLTSTRPDLTDQPLAQAEATLFTDGSSYIRDGKRYAGAAVVTLDSVIWAEPLPIGTSAQKAELIALTKALEWSKDKSVNIYTDSRYAFATLHVHGMIYRERGWLTAGGKAIKNAPEILALLTAVWLPKRVAVMHCKGHQKDDAPTSTGNRRADEVAREVAIRPLSTQATISAGKRTADGSEFEKRTADGSEFESPKKKAKVE

SEQ ID NO: 6973 - protein, 2100 aa, synthetic construct
MPAAKRVKLDGGDKKYSIGLDIGTNSVGWAVITDEYKVPSKKFKVLGNTDRHSIKKNLIGALLFDSGETAEATRLKRTARRRYTRRKNRICYLQEIFSNEMAKVDDSFFHRLEESFLVEEDKKHERHPIFGNIVDEVAYHEKYPTIYHLRKKLVDSTDKADLRLIYLALAHMIKFRGHFLIEGDLNPDNSDVDKLFIQLVQTYNQLFEENPINASGVDAKAILSARLSKSRRLENLIAQLPGEKKNGLFGNLIALSLGLTPNFKSNFDLAEDAKLQLSKDTYDDDLDNLLAQIGDQYADLFLAAKNLSDAILLSDILRVNTEITKAPLSASMIKRYDEHHQDLTLLKALVRQQLPEKYKEIFFDQSKNGYAGYIDGGASQEEFYKFIKPILEKMDGTEELLVKLNREDLLRKQRTFDNGSIPHQIHLGELHAILRRQEDFYPFLKDNREKIEKILTFRIPYYVGPLARGNSRFAWMTRKSEETITPWNFEEVVDKGASAQSFIERMTNFDKNLPNEKVLPKHSLLYEYFTVYNELTKVKYVTEGMRKPAFLSGEQKKAIVDLLFKTNRKVTVKQLKEDYFKKIECFDSVEISGVEDRFNASLGTYHDLLKIIKDKDFLDNEENEDILEDIVLTLTLFEDREMIEERLKTYAHLFDDKVMKQLKRRRYTGWGRLSRKLINGIRDKQSGKTILDFLKSDGFANRNFMQLIHDDSLTFKEDIQKAQVSGQGDSLHEHIANLAGSPAIKKGILQTVKVVDELVKVMGRHKPENIVIEMARENQTTQKGQKNSRERMKRIEEGIKELGSQILKEHPVENTQLQNEKLYLYYLQNGRDMYVDQELDINRLSDYDVDHIVPQSFLKDDSIDNKVLTRSDKARGKSDNVPSEEVVKKMKNYWRQLLNAKLITQRKFDNLTKAERGGLSELDKAGFIKRQLVETRQITKHVAQILDSRMNTKYDENDKLIREVKVITLKSKLVSDFRKDFQFYKVREINNYHHAHDAYLNAVVGTALIKKYPKLESEFVYGDYKVYDVRKMIAKSEQEIGKATAKYFFYSNIMNFFKTEITLANGEIRKRPLIETNGETGEIVWDKGRDFATVRKVLSMPQVNIVKKTEVQTGGFSKESILPKRNSDKLIARKKDWDPKKYGGFDSPTVAYSVLVVAKVEKGKSKKLKSVKELLGITIMERSSFEKNPIDFLEAKGYKEVKKDLIIKLPKYSLFELENGRKRMLASAGELQKGNELALPSKYVNFLYLASHYEKLKGSPEDNEQKQLFVEQHKHYLDEIIEQISEFSKRVILADANLDKVLSAYNKHRDKPIREQAENIIHLFTLTNLGAPAAFKYFDTTIDRKRYTSTKEVLDATLIHQSITGLYETRIDLSQLGGDGGGGSGGGPAPGGTVSLQDEHRLFDIPVTTSLPDVWLQDFPQAWAETGGLGRAKCQAPIIIDLKPTAVPVSIKQYPMSLEAHMGIRQHIIKFLELGVLRPCRSPWNTPLLPVKKPGTQDYRPVQDLREINKRTVDIHPTVPNPYNLLSTLKPDYSWYTVLDLKDAFFCLPLAPQSQELFAFEWKDPERGISGQLTWTRLPQGFKNSPTLFNEALHRDLTDFRTQHPEVTLLQYVDDLLLAAPTKKACTQGTRHLLQELGEKGYRASAKKAQICQTKVTYLGYILSEGKRWLTPGRIETVARIPPPRNPREVREFLGTAGFCRLWIPGFAELAAPLYALTKPSTPFTWQTEHQLAFEALKKALLSAPALGLPDTSKPFTLFLDERQGIAKGVLTQKLGPWKRPVAYLSKKLDPVAAGWPPCLRIMAATAMLVKDSAKLTLGQPLTVITPHTLEAIVRQPPDRWITNARLTHYQALLLDTDRVQFGPPVTLNPATLLPVPENQPSPHDCRQVLAETHGTREDLKDQELPDADHTWYTDGSSYLDSGTRRAGAAVVDGHNTIWAQSLPPGTSAQKAELIALTKALELSKGKKANIYTDSRYAFATAHTHGSIYERRGWLTSEGKEIKNKAEIIALLKALFLPQEVAIIHCPGHQKGQDPVAVGNRQADRVARQAAMAEVLTLATEPDNTSHITAGKRTADGSEFEKRTADGSEFESPKKKAKVE

SEQ ID NO: 6974 - protein, 2092 aa, synthetic construct
MPAAKRVKLDGGDKKYSIGLDIGTNSVGWAVITDEYKVPSKKFKVLGNTDRHSIKKNLIGALLFDSGETAEATRLKRTARRRYTRRKNRICYLQEIFSNEMAKVDDSFFHRLEESFLVEEDKKHERHPIFGNIVDEVAYHEKYPTIYHLRKKLVDSTDKADLRLIYLALAHMIKFRGHFLIEGDLNPDNSDVDKLFIQLVQTYNQLFEENPINASGVDAKAILSARLSKSRRLENLIAQLPGEKKNGLFGNLIALSLGLTPNFKSNFDLAEDAKLQLSKDTYDDDLDNLLAQIGDQYADLFLAAKNLSDAILLSDILRVNTEITKAPLSASMIKRYDEHHQDLTLLKALVRQQLPEKYKEIFFDQSKNGYAGYIDGGASQEEFYKFIKPILEKMDGTEELLVKLNREDLLRKQRTFDNGSIPHQIHLGELHAILRRQEDFYPFLKDNREKIEKILTFRIPYYVGPLARGNSRFAWMTRKSEETITPWNFEEVVDKGASAQSFIERMTNFDKNLPNEKVLPKHSLLYEYFTVYNELTKVKYVTEGMRKPAFLSGEQKKAIVDLLFKTNRKVTVKQLKEDYFKKIECFDSVEISGVEDRFNASLGTYHDLLKIIKDKDFLDNEENEDILEDIVLTLTLFEDREMIEERLKTYAHLFDDKVMKQLKRRRYTGWGRLSRKLINGIRDKQSGKTILDFLKSDGFANRNFMQLIHDDSLTFKEDIQKAQVSGQGDSLHEHIANLAGSPAIKKGILQTVKVVDELVKVMGRHKPENIVIEMARENQTTQKGQKNSRERMKRIEEGIKELGSQILKEHPVENTQLQNEKLYLYYLQNGRDMYVDQELDINRLSDYDVDHIVPQSFLKDDSIDNKVLTRSDKARGKSDNVPSEEVVKKMKNYWRQLLNAKLITQRKFDNLTKAERGGLSELDKAGFIKRQLVETRQITKHVAQILDSRMNTKYDENDKLIREVKVITLKSKLVSDFRKDFQFYKVREINNYHHAHDAYLNAVVGTALIKKYPKLESEFVYGDYKVYDVRKMIAKSEQEIGKATAKYFFYSNIMNFFKTEITLANGEIRKRPLIETNGETGEIVWDKGRDFATVRKVLSMPQVNIVKKTEVQTGGFSKESILPKRNSDKLIARKKDWDPKKYGGFDSPTVAYSVLVVAKVEKGKSKKLKSVKELLGITIMERSSFEKNPIDFLEAKGYKEVKKDLIIKLPKYSLFELENGRKRMLASAGELQKGNELALPSKYVNFLYLASHYEKLKGSPEDNEQKQLFVEQHKHYLDEIIEQISEFSKRVILADANLDKVLSAYNKHRDKPIREQAENIIHLFTLTNLGAPAAFKYFDTTIDRKRYTSTKEVLDATLIHQSITGLYETRIDLSQLGGDGGGGSGGGPAPGGVLNLEEEYRLHEKPVPSSIDPSWLQLFPTVWAERAGMGLANQVPPVVVELRSGASPVAVRQYPMSKEAREGIRPHIQKFLDLGVLVPCRSPWNTPLLPVKKPGTNDYRPVQDLREINKRVQDIHPTVPNPYNLLSSLPPSYTWYSVLDLKDAFFCLRLHPNSQPLFAFEWKDPEKGNTGQLTWTRLPQGFKNSPTLFNEALHRDLAPFRALNPQVVLLQYVDDLLVAAPTYEDCKKGTQKLLQELSKLGYRVSAKKAQLCQREVTYLGYLLKEGKRWLTPARKATVMKIPVPTTPRQVREFLGTAGFCRLWIPGFASLAAPLYPLTKPSIPFIWTEEHQQAFDHIKKALLSAPALALPDLTKPFTLYIDERAGVARGVLTQTLGPWRRPVAYLSKKLDPVASGWPTCLKAVAAVALLLKDADKLTLGQNVTVIASHSLESIVRQPPDRWMTNARMTHYQSLLLNERVSFAPPAVLNPATLLPVESEATPVHRCSEILAEETGTRRDLEDQPLPGVPTWYTDGSSFITEGKRRAGAPIVDGKRTVWASSLPEGTSAQKAELVALTQALRLAEGKNINIYTDSRYAFATAHIHGAIYKQRGWLTSAGKDIKNKEEILALLEAIHLPRRVAIIHCPGHQRGSNPVATGNRRADEAAKQAALSTRVLAGTTKPAGKRTADGSEFEKRTADGSEFESPKKKAKVE

SEQ ID NO: 6975 - protein, 2092 aa, synthetic construct
MPAAKRVKLDGGDKKYSIGLDIGTNSVGWAVITDEYKVPSKKFKVLGNTDRHSIKKNLIGALLFDSGETAEATRLKRTARRRYTRRKNRICYLQEIFSNEMAKVDDSFFHRLEESFLVEEDKKHERHPIFGNIVDEVAYHEKYPTIYHLRKKLVDSTDKADLRLIYLALAHMIKFRGHFLIEGDLNPDNSDVDKLFIQLVQTYNQLFEENPINASGVDAKAILSARLSKSRRLENLIAQLPGEKKNGLFGNLIALSLGLTPNFKSNFDLAEDAKLQLSKDTYDDDLDNLLAQIGDQYADLFLAAKNLSDAILLSDILRVNTEITKAPLSASMIKRYDEHHQDLTLLKALVRQQLPEKYKEIFFDQSKNGYAGYIDGGASQEEFYKFIKPILEKMDGTEELLVKLNREDLLRKQRTFDNGSIPHQIHLGELHAILRRQEDFYPFLKDNREKIEKILTFRIPYYVGPLARGNSRFAWMTRKSEETITPWNFEEVVDKGASAQSFIERMTNFDKNLPNEKVLPKHSLLYEYFTVYNELTKVKYVTEGMRKPAFLSGEQKKAIVDLLFKTNRKVTVKQLKEDYFKKIECFDSVEISGVEDRFNASLGTYHDLLKIIKDKDFLDNEENEDILEDIVLTLTLFEDREMIEERLKTYAHLFDDKVMKQLKRRRYTGWGRLSRKLINGIRDKQSGKTILDFLKSDGFANRNFMQLIHDDSLTFKEDIQKAQVSGQGDSLHEHIANLAGSPAIKKGILQTVKVVDELVKVMGRHKPENIVIEMARENQTTQKGQKNSRERMKRIEEGIKELGSQILKEHPVENTQLQNEKLYLYYLQNGRDMYVDQELDINRLSDYDVDHIVPQSFLKDDSIDNKVLTRSDKARGKSDNVPSEEVVKKMKNYWRQLLNAKLITQRKFDNLTKAERGGLSELDKAGFIKRQLVETRQITKHVAQILDSRMNTKYDENDKLIREVKVITLKSKLVSDFRKDFQFYKVREINNYHHAHDAYLNAVVGTALIKKYPKLESEFVYGDYKVYDVRKMIAKSEQEIGKATAKYFFYSNIMNFFKTEITLANGEIRKRPLIETNGETGEIVWDKGRDFATVRKVLSMPQVNIVKKTEVQTGGFSKESILPKRNSDKLIARKKDWDPKKYGGFDSPTVAYSVLVVAKVEKGKSKKLKSVKELLGITIMERSSFEKNPIDFLEAKGYKEVKKDLIIKLPKYSLFELENGRKRMLASAGELQKGNELALPSKYVNFLYLASHYEKLKGSPEDNEQKQLFVEQHKHYLDEIIEQISEFSKRVILADANLDKVLSAYNKHRDKPIREQAENIIHLFTLTNLGAPAAFKYFDTTIDRKRYTSTKEVLDATLIHQSITGLYETRIDLSQLGGDGGGGSGGGPAPGGVLNLEEEYRLHEKPVPSSIDPSWLQLFPTVWAERAGMGLANQVPPVVVELRSGASPVAVRQYPMSKEAREGIRPHIQKFLDLGVLVPCRSPWNTPLLPVKKPGTNDYRPVQDLREINKRVQDIHPTVPNPYNLLSSLPPSYTWYSVLDLKDAFFCLRLHPNSQPLFAFEWKDPEKGNTGQLTWTRLPQGFKNSPTLFNEALHRDLAPFRALNPQVVLLQYVDDLLVAAPTYEDCKKGTQKLLQELSKLGYRVSAKKAQLCQREVTYLGYLLKEGKRWLTPARKATVMKIPVPTTPRQVREFLGKAGFCRLFIPGFASLAAPLYPLTKPSIPFIWTEEHQQAFDHIKKALLSAPALALPDLTKPFTLYIDERAGVARGVLTQTLGPWRRPVAYLSKKLDPVASGWPTCLKAVAAVALLLKDADKLTLGQNVTVIASHSLESIVRQPPDRWMTNARMTHYQSLLLNERVSFAPPAVLNPATLLPVESEATPVHRCSEILAEETGTRRDLEDQPLPGVPTWYTDGSSFITEGKRRAGAPIVDGKRTVWASSLPEGTSAQKAELVALTQALRLAEGKNINIYTDSRYAFATAHIHGAIYKQRGWLTSAGKDIKNKEEILALLEAIHLPRRVAIIHCPGHQRGSNPVATGNRRADEAAKQAALSTRVLAGTTKPAGKRTADGSEFEKRTADGSEFESPKKKAKVE

SEQ ID NO: 6976 - protein, 2125 aa, synthetic construct
MPAAKRVKLDGGDKKYSIGLDIGTNSVGWAVITDEYKVPSKKFKVLGNTDRHSIKKNLIGALLFDSGETAEATRLKRTARRRYTRRKNRICYLQEIFSNEMAKVDDSFFHRLEESFLVEEDKKHERHPIFGNIVDEVAYHEKYPTIYHLRKKLVDSTDKADLRLIYLALAHMIKFRGHFLIEGDLNPDNSDVDKLFIQLVQTYNQLFEENPINASGVDAKAILSARLSKSRRLENLIAQLPGEKKNGLFGNLIALSLGLTPNFKSNFDLAEDAKLQLSKDTYDDDLDNLLAQIGDQYADLFLAAKNLSDAILLSDILRVNTEITKAPLSASMIKRYDEHHQDLTLLKALVRQQLPEKYKEIFFDQSKNGYAGYIDGGASQEEFYKFIKPILEKMDGTEELLVKLNREDLLRKQRTFDNGSIPHQIHLGELHAILRRQEDFYPFLKDNREKIEKILTFRIPYYVGPLARGNSRFAWMTRKSEETITPWNFEEVVDKGASAQSFIERMTNFDKNLPNEKVLPKHSLLYEYFTVYNELTKVKYVTEGMRKPAFLSGEQKKAIVDLLFKTNRKVTVKQLKEDYFKKIECFDSVEISGVEDRFNASLGTYHDLLKIIKDKDFLDNEENEDILEDIVLTLTLFEDREMIEERLKTYAHLFDDKVMKQLKRRRYTGWGRLSRKLINGIRDKQSGKTILDFLKSDGFANRNFMQLIHDDSLTFKEDIQKAQVSGQGDSLHEHIANLAGSPAIKKGILQTVKVVDELVKVMGRHKPENIVIEMARENQTTQKGQKNSRERMKRIEEGIKELGSQILKEHPVENTQLQNEKLYLYYLQNGRDMYVDQELDINRLSDYDVDHIVPQSFLKDDSIDNKVLTRSDKARGKSDNVPSEEVVKKMKNYWRQLLNAKLITQRKFDNLTKAERGGLSELDKAGFIKRQLVETRQITKHVAQILDSRMNTKYDENDKLIREVKVITLKSKLVSDFRKDFQFYKVREINNYHHAHDAYLNAVVGTALIKKYPKLESEFVYGDYKVYDVRKMIAKSEQEIGKATAKYFFYSNIMNFFKTEITLANGEIRKRPLIETNGETGEIVWDKGRDFATVRKVLSMPQVNIVKKTEVQTGGFSKESILPKRNSDKLIARKKDWDPKKYGGFDSPTVAYSVLVVAKVEKGKSKKLKSVKELLGITIMERSSFEKNPIDFLEAKGYKEVKKDLIIKLPKYSLFELENGRKRMLASAGELQKGNELALPSKYVNFLYLASHYEKLKGSPEDNEQKQLFVEQHKHYLDEIIEQISEFSKRVILADANLDKVLSAYNKHRDKPIREQAENIIHLFTLTNLGAPAAFKYFDTTIDRKRYTSTKEVLDATLIHQSITGLYETRIDLSQLGGDGGGGSGGGPAPGGLLGRDLLTKLKAQIQFSTEGPQVTWEDRPAMCLVLNLEEEYRLHEKPVPPSIDPSWLQLFPMVWAEKAGMGLANQVPPVVVELKSDASPVAVRQYPMSKEAREGIRPHIQRFLDLGILVPCQSPWNTPLLPVKKPGTNDYRPVQDLREVNKRVQDIHPTVPNPYNLLSSLPPSHTWYSVLDLKDAFFCLKLHPNSQPLFAFEWRDPEKGNTGQLTWTRLPQGFKNSPTLFNEALHRDLASFRALNPQVVMLQYVDDLLVAAPTYRDCKEGTRRLLQELSKLGYRVSAKKAQLCREEVTYLGYLLKGGKRWLTPARKATVMKIPTPTTPRQVREFLGTAGFCRLWIPGFASLAAPLYPLTRPKVPFTWTEAHQEAFGRIKEALLSAPALALPDLTKPFALYVDEKEGVARGVLTQTLGPWRRPVAYLSKKLDPVASGWPTCLKAIAAVALLLKDADKLTLGQNVLVIAPHNLESIVRQPPDRWMTNARMTHYQSLLLNERVSFAPPAILNPATLLPVESDDTPIHICSEILAEETGTRPDLRDQPLPGVPAWYTDGSSFIMDGRRQAGAAIVDNKRTVWASNLPEGTSAQKAELIALTQALRLAEGKSINIYTDSRYAFATAHVHGAIYKQRGWLTSAGKDIKNKEEILALLEAIHLPKRVAIIHCPGHQRGTDPVATGNRKADEAAKQAAQSTRILTETTKNAGKRTADGSEFEKRTADGSEFESPKKKAKVE

SEQ ID NO: 6977 - protein, 2125 aa, synthetic construct
MPAAKRVKLDGGDKKYSIGLDIGTNSVGWAVITDEYKVPSKKFKVLGNTDRHSIKKNLIGALLFDSGETAEATRLKRTARRRYTRRKNRICYLQEIFSNEMAKVDDSFFHRLEESFLVEEDKKHERHPIFGNIVDEVAYHEKYPTIYHLRKKLVDSTDKADLRLIYLALAHMIKFRGHFLIEGDLNPDNSDVDKLFIQLVQTYNQLFEENPINASGVDAKAILSARLSKSRRLENLIAQLPGEKKNGLFGNLIALSLGLTPNFKSNFDLAEDAKLQLSKDTYDDDLDNLLAQIGDQYADLFLAAKNLSDAILLSDILRVNTEITKAPLSASMIKRYDEHHQDLTLLKALVRQQLPEKYKEIFFDQSKNGYAGYIDGGASQEEFYKFIKPILEKMDGTEELLVKLNREDLLRKQRTFDNGSIPHQIHLGELHAILRRQEDFYPFLKDNREKIEKILTFRIPYYVGPLARGNSRFAWMTRKSEETITPWNFEEVVDKGASAQSFIERMTNFDKNLPNEKVLPKHSLLYEYFTVYNELTKVKYVTEGMRKPAFLSGEQKKAIVDLLFKTNRKVTVKQLKEDYFKKIECFDSVEISGVEDRFNASLGTYHDLLKIIKDKDFLDNEENEDILEDIVLTLTLFEDREMIEERLKTYAHLFDDKVMKQLKRRRYTGWGRLSRKLINGIRDKQSGKTILDFLKSDGFANRNFMQLIHDDSLTFKEDIQKAQVSGQGDSLHEHIANLAGSPAIKKGILQTVKVVDELVKVMGRHKPENIVIEMARENQTTQKGQKNSRERMKRIEEGIKELGSQILKEHPVENTQLQNEKLYLYYLQNGRDMYVDQELDINRLSDYDVDHIVPQSFLKDDSIDNKVLTRSDKARGKSDNVPSEEVVKKMKNYWRQLLNAKLITQRKFDNLTKAERGGLSELDKAGFIKRQLVETRQITKHVAQILDSRMNTKYDENDKLIREVKVITLKSKLVSDFRKDFQFYKVREINNYHHAHDAYLNAVVGTALIKKYPKLESEFVYGDYKVYDVRKMIAKSEQEIGKATAKYFFYSNIMNFFKTEITLANGEIRKRPLIETNGETGEIVWDKGRDFATVRKVLSMPQVNIVKKTEVQTGGFSKESILPKRNSDKLIARKKDWDPKKYGGFDSPTVAYSVLVVAKVEKGKSKKLKSVKELLGITIMERSSFEKNPIDFLEAKGYKEVKKDLIIKLPKYSLFELENGRKRMLASAGELQKGNELALPSKYVNFLYLASHYEKLKGSPEDNEQKQLFVEQHKHYLDEIIEQISEFSKRVILADANLDKVLSAYNKHRDKPIREQAENIIHLFTLTNLGAPAAFKYFDTTIDRKRYTSTKEVLDATLIHQSITGLYETRIDLSQLGGDGGGGSGGGPAPGGLLGRDLLTKLKAQIQFSTEGPQVTWEDRPAMCLVLNLEEEYRLHEKPVPPSIDPSWLQLFPMVWAEKAGMGLANQVPPVVVELKSDASPVAVRQYPMSKEAREGIRPHIQRFLDLGILVPCQSPWNTPLLPVKKPGTNDYRPVQDLREVNKRVQDIHPTVPNPYNLLSSLPPSHTWYSVLDLKDAFFCLKLHPNSQPLFAFEWRDPEKGNTGQLTWTRLPQGFKNSPTLFNEALHRDLASFRALNPQVVMLQYVDDLLVAAPTYRDCKEGTRRLLQELSKLGYRVSAKKAQLCREEVTYLGYLLKGGKRWLTPARKATVMKIPTPTTPRQVREFLGKAGFCRLFIPGFASLAAPLYPLTRPKVPFTWTEAHQEAFGRIKEALLSAPALALPDLTKPFALYVDEKEGVARGVLTQTLGPWRRPVAYLSKKLDPVASGWPTCLKAIAAVALLLKDADKLTLGQNVLVIAPHNLESIVRQPPDRWMTNARMTHYQSLLLNERVSFAPPAILNPATLLPVESDDTPIHICSEILAEETGTRPDLRDQPLPGVPAWYTDGSSFIMDGRRQAGAAIVDNKRTVWASNLPEGTSAQKAELIALTQALRLAEGKSINIYTDSRYAFATAHVHGAIYKQRGWLTSAGKDIKNKEEILALLEAIHLPKRVAIIHCPGHQRGTDPVATGNRKADEAAKQAAQSTRILTETTKNAGKRTADGSEFEKRTADGSEFESPKKKAKVE

SEQ ID NO: 6978 - protein, 2094 aa, synthetic construct
MPAAKRVKLDGGDKKYSIGLDIGTNSVGWAVITDEYKVPSKKFKVLGNTDRHSIKKNLIGALLFDSGETAEATRLKRTARRRYTRRKNRICYLQEIFSNEMAKVDDSFFHRLEESFLVEEDKKHERHPIFGNIVDEVAYHEKYPTIYHLRKKLVDSTDKADLRLIYLALAHMIKFRGHFLIEGDLNPDNSDVDKLFIQLVQTYNQLFEENPINASGVDAKAILSARLSKSRRLENLIAQLPGEKKNGLFGNLIALSLGLTPNFKSNFDLAEDAKLQLSKDTYDDDLDNLLAQIGDQYADLFLAAKNLSDAILLSDILRVNTEITKAPLSASMIKRYDEHHQDLTLLKALVRQQLPEKYKEIFFDQSKNGYAGYIDGGASQEEFYKFIKPILEKMDGTEELLVKLNREDLLRKQRTFDNGSIPHQIHLGELHAILRRQEDFYPFLKDNREKIEKILTFRIPYYVGPLARGNSRFAWMTRKSEETITPWNFEEVVDKGASAQSFIERMTNFDKNLPNEKVLPKHSLLYEYFTVYNELTKVKYVTEGMRKPAFLSGEQKKAIVDLLFKTNRKVTVKQLKEDYFKKIECFDSVEISGVEDRFNASLGTYHDLLKIIKDKDFLDNEENEDILEDIVLTLTLFEDREMIEERLKTYAHLFDDKVMKQLKRRRYTGWGRLSRKLINGIRDKQSGKTILDFLKSDGFANRNFMQLIHDDSLTFKEDIQKAQVSGQGDSLHEHIANLAGSPAIKKGILQTVKVVDELVKVMGRHKPENIVIEMARENQTTQKGQKNSRERMKRIEEGIKELGSQILKEHPVENTQLQNEKLYLYYLQNGRDMYVDQELDINRLSDYDVDHIVPQSFLKDDSIDNKVLTRSDKARGKSDNVPSEEVVKKMKNYWRQLLNAKLITQRKFDNLTKAERGGLSELDKAGFIKRQLVETRQITKHVAQILDSRMNTKYDENDKLIREVKVITLKSKLVSDFRKDFQFYKVREINNYHHAHDAYLNAVVGTALIKKYPKLESEFVYGDYKVYDVRKMIAKSEQEIGKATAKYFFYSNIMNFFKTEITLANGEIRKRPLIETNGETGEIVWDKGRDFATVRKVLSMPQVNIVKKTEVQTGGFSKESILPKRNSDKLIARKKDWDPKKYGGFDSPTVAYSVLVVAKVEKGKSKKLKSVKELLGITIMERSSFEKNPIDFLEAKGYKEVKKDLIIKLPKYSLFELENGRKRMLASAGELQKGNELALPSKYVNFLYLASHYEKLKGSPEDNEQKQLFVEQHKHYLDEIIEQISEFSKRVILADANLDKVLSAYNKHRDKPIREQAENIIHLFTLTNLGAPAAFKYFDTTIDRKRYTSTKEVLDATLIHQSITGLYETRIDLSQLGGDGGGGSGGGPAPGGTLNLEDEYRLYETSAEPEVSPGSTWLSDFPQAWAETGGMGLAVRQAPLIIPLKATSTPVSIKQYPMSQEAKLGIKPHIQRLLDQGILVPCQSPWNTPLLPVKKPGTNDYRPVQDLREVNKRVEDIHPTVPNPYNLLSGLPPSHRWYTVLDLKDAFFCLRLHPTSQPLFAFEWRDPGMGISGQLTWTRLPQGFKNSPTLFNEALHRDLADFRIQHPDLILLQYVDDILLAATSELDCQQGTRALLLTLGNLGYRASAKKAQLCQKQVKYLGYLLKEGQRWLTEARKETVMGQPTPKTPRQLREFLGTAGFCRLWIPGFAEMAAPLYPLTKPGTLFNWGPDQQKAYQEIKQALLTAPALGLPDLTKPFELFVDEKQGYAKGVLTQKLGPWRRPVAYLSKKLDPVAAGWPPCLRMVAAIAVLRKDAGKLTMGQPLVILAPHAVEALVKQPPDRWLSNARMTHYQAMLLDTDRVQFGPVVALNPATLLPLPEEGAPHDCLEILAETHGTRPDLTDQPIPDADHTWYTDGSSFLQEGQRKAGAAVTTETEVIWARALPAGTSAQRAELIALTQALKMAEGKRLNVYTDSRYAFATAHIHGEIYRRRGWLTSEGREIKNKSEILALLKALFLPKRLSIIHCLGHQKGDSAEARGNRLADQAAREAAIKTPPDTSTLLAGKRTADGSEFEKRTADGSEFESPKKKAKVE

SEQ ID NO: 6979 - protein, 2094 aa, synthetic construct
MPAAKRVKLDGGDKKYSIGLDIGTNSVGWAVITDEYKVPSKKFKVLGNTDRHSIKKNLIGALLFDSGETAEATRLKRTARRRYTRRKNRICYLQEIFSNEMAKVDDSFFHRLEESFLVEEDKKHERHPIFGNIVDEVAYHEKYPTIYHLRKKLVDSTDKADLRLIYLALAHMIKFRGHFLIEGDLNPDNSDVDKLFIQLVQTYNQLFEENPINASGVDAKAILSARLSKSRRLENLIAQLPGEKKNGLFGNLIALSLGLTPNFKSNFDLAEDAKLQLSKDTYDDDLDNLLAQIGDQYADLFLAAKNLSDAILLSDILRVNTEITKAPLSASMIKRYDEHHQDLTLLKALVRQQLPEKYKEIFFDQSKNGYAGYIDGGASQEEFYKFIKPILEKMDGTEELLVKLNREDLLRKQRTFDNGSIPHQIHLGELHAILRRQEDFYPFLKDNREKIEKILTFRIPYYVGPLARGNSRFAWMTRKSEETITPWNFEEVVDKGASAQSFIERMTNFDKNLPNEKVLPKHSLLYEYFTVYNELTKVKYVTEGMRKPAFLSGEQKKAIVDLLFKTNRKVTVKQLKEDYFKKIECFDSVEISGVEDRFNASLGTYHDLLKIIKDKDFLDNEENEDILEDIVLTLTLFEDREMIEERLKTYAHLFDDKVMKQLKRRRYTGWGRLSRKLINGIRDKQSGKTILDFLKSDGFANRNFMQLIHDDSLTFKEDIQKAQVSGQGDSLHEHIANLAGSPAIKKGILQTVKVVDELVKVMGRHKPENIVIEMARENQTTQKGQKNSRERMKRIEEGIKELGSQILKEHPVENTQLQNEKLYLYYLQNGRDMYVDQELDINRLSDYDVDHIVPQSFLKDDSIDNKVLTRSDKARGKSDNVPSEEVVKKMKNYWRQLLNAKLITQRKFDNLTKAERGGLSELDKAGFIKRQLVETRQITKHVAQILDSRMNTKYDENDKLIREVKVITLKSKLVSDFRKDFQFYKVREINNYHHAHDAYLNAVVGTALIKKYPKLESEFVYGDYKVYDVRKMIAKSEQEIGKATAKYFFYSNIMNFFKTEITLANGEIRKRPLIETNGETGEIVWDKGRDFATVRKVLSMPQVNIVKKTEVQTGGFSKESILPKRNSDKLIARKKDWDPKKYGGFDSPTVAYSVLVVAKVEKGKSKKLKSVKELLGITIMERSSFEKNPIDFLEAKGYKEVKKDLIIKLPKYSLFELENGRKRMLASAGELQKGNELALPSKYVNFLYLASHYEKLKGSPEDNEQKQLFVEQHKHYLDEIIEQISEFSKRVILADANLDKVLSAYNKHRDKPIREQAENIIHLFTLTNLGAPAAFKYFDTTIDRKRYTSTKEVLDATLIHQSITGLYETRIDLSQLGGDGGGGSGGGPAPGGTLNLEDEYRLYETSAEPEVSPGSTWLSDFPQAWAETGGMGLAVRQAPLIIPLKATSTPVSIKQYPMSQEAKLGIKPHIQRLLDQGILVPCQSPWNTPLLPVKKPGTNDYRPVQDLREVNKRVEDIHPTVPNPYNLLSGLPPSHRWYTVLDLKDAFFCLRLHPTSQPLFAFEWRDPGMGISGQLTWTRLPQGFKNSPTLFNEALHRDLADFRIQHPDLILLQYVDDILLAATSELDCQQGTRALLLTLGNLGYRASAKKAQLCQKQVKYLGYLLKEGQRWLTEARKETVMGQPTPKTPRQLREFLGKAGFCRLFIPGFAEMAAPLYPLTKPGTLFNWGPDQQKAYQEIKQALLTAPALGLPDLTKPFELFVDEKQGYAKGVLTQKLGPWRRPVAYLSKKLDPVAAGWPPCLRMVAAIAVLRKDAGKLTMGQPLVILAPHAVEALVKQPPDRWLSNARMTHYQAMLLDTDRVQFGPVVALNPATLLPLPEEGAPHDCLEILAETHGTRPDLTDQPIPDADHTWYTDGSSFLQEGQRKAGAAVTTETEVIWARALPAGTSAQRAELIALTQALKMAEGKRLNVYTDSRYAFATAHIHGEIYRRRGWLTSEGREIKNKSEILALLKALFLPKRLSIIHCLGHQKGDSAEARGNRLADQAAREAAIKTPPDTSTLLAGKRTADGSEFEKRTADGSEFESPKKKAKVE

SEQ ID NO: 6980 - protein, 2094 aa, synthetic construct
MPAAKRVKLDGGDKKYSIGLDIGTNSVGWAVITDEYKVPSKKFKVLGNTDRHSIKKNLIGALLFDSGETAEATRLKRTARRRYTRRKNRICYLQEIFSNEMAKVDDSFFHRLEESFLVEEDKKHERHPIFGNIVDEVAYHEKYPTIYHLRKKLVDSTDKADLRLIYLALAHMIKFRGHFLIEGDLNPDNSDVDKLFIQLVQTYNQLFEENPINASGVDAKAILSARLSKSRRLENLIAQLPGEKKNGLFGNLIALSLGLTPNFKSNFDLAEDAKLQLSKDTYDDDLDNLLAQIGDQYADLFLAAKNLSDAILLSDILRVNTEITKAPLSASMIKRYDEHHQDLTLLKALVRQQLPEKYKEIFFDQSKNGYAGYIDGGASQEEFYKFIKPILEKMDGTEELLVKLNREDLLRKQRTFDNGSIPHQIHLGELHAILRRQEDFYPFLKDNREKIEKILTFRIPYYVGPLARGNSRFAWMTRKSEETITPWNFEEVVDKGASAQSFIERMTNFDKNLPNEKVLPKHSLLYEYFTVYNELTKVKYVTEGMRKPAFLSGEQKKAIVDLLFKTNRKVTVKQLKEDYFKKIECFDSVEISGVEDRFNASLGTYHDLLKIIKDKDFLDNEENEDILEDIVLTLTLFEDREMIEERLKTYAHLFDDKVMKQLKRRRYTGWGRLSRKLINGIRDKQSGKTILDFLKSDGFANRNFMQLIHDDSLTFKEDIQKAQVSGQGDSLHEHIANLAGSPAIKKGILQTVKVVDELVKVMGRHKPENIVIEMARENQTTQKGQKNSRERMKRIEEGIKELGSQILKEHPVENTQLQNEKLYLYYLQNGRDMYVDQELDINRLSDYDVDHIVPQSFLKDDSIDNKVLTRSDKARGKSDNVPSEEVVKKMKNYWRQLLNAKLITQRKFDNLTKAERGGLSELDKAGFIKRQLVETRQITKHVAQILDSRMNTKYDENDKLIREVKVITLKSKLVSDFRKDFQFYKVREINNYHHAHDAYLNAVVGTALIKKYPKLESEFVYGDYKVYDVRKMIAKSEQEIGKATAKYFFYSNIMNFFKTEITLANGEIRKRPLIETNGETGEIVWDKGRDFATVRKVLSMPQVNIVKKTEVQTGGFSKESILPKRNSDKLIARKKDWDPKKYGGFDSPTVAYSVLVVAKVEKGKSKKLKSVKELLGITIMERSSFEKNPIDFLEAKGYKEVKKDLIIKLPKYSLFELENGRKRMLASAGELQKGNELALPSKYVNFLYLASHYEKLKGSPEDNEQKQLFVEQHKHYLDEIIEQISEFSKRVILADANLDKVLSAYNKHRDKPIREQAENIIHLFTLTNLGAPAAFKYFDTTIDRKRYTSTKEVLDATLIHQSITGLYETRIDLSQLGGDGGGGSGGGPAPGGTLNIEDEYRLHETSKGPDVPLGSTWLSDFPQAWAETGGMGLAVRQAPLIIPLKATSTPVSIKQYPMSQEARLGIKPHIQRLLDQGILVPCQSPWNTPLLPVKKPGTNDYRPVQDLREVNKRVEDIHPTVPNPYNLLSGLPPSHQWYTVLDLKDAFFCLRLHPTSQSLFAFEWRDPEMGISGQLTWTRLPQGFKNSPTLFNEALHRDLADFRIQHPDLILLQYVDDLLLAATSELDCQQGTRALLQTLGDLGYRASAKKAQICQKQVKYLGYLLKEGQRWLTEARKETVMGQPTPKTPRQLREFLGKAGFCRLFIPGFAEMAAPLYPLTKPGTLFEWGPDQQKAYQEIKQALLTAPALGLPDLTKPFELFVDEKQGYAKGVLTQKLGPWRRPVAYLSKKLDPVAAGWPPCLRMVAAIAVLTKDAGKLTMGQPLVILAPHAVEALVKQPPDRWLSNARMTHYQALLLDTDRVQFGPIVALNPATLLPLPEEGLQHDCLDILAEAHGTRPDLTDQPLPDADHTWYTDGSSFLQEGQRKAGAAVTTETEVVWAKALPAGTSAQRAELIALTQALKMAEGKKLNVYTDSRYAFATAHIHGEIYRRRGWLTSEGKEIKNKDEILALLKALFLPKRLSIIHCPGHQKGNRAEARGNRMADQAAREVATRETPETSTLLAGKRTADGSEFEKRTADGSEFESPKKKAKVE

SEQ ID NO: 6981 - protein, 2114 aa, synthetic construct
MPAAKRVKLDGGDKKYSIGLDIGTNSVGWAVITDEYKVPSKKFKVLGNTDRHSIKKNLIGALLFDSGETAEATRLKRTARRRYTRRKNRICYLQEIFSNEMAKVDDSFFHRLEESFLVEEDKKHERHPIFGNIVDEVAYHEKYPTIYHLRKKLVDSTDKADLRLIYLALAHMIKFRGHFLIEGDLNPDNSDVDKLFIQLVQTYNQLFEENPINASGVDAKAILSARLSKSRRLENLIAQLPGEKKNGLFGNLIALSLGLTPNFKSNFDLAEDAKLQLSKDTYDDDLDNLLAQIGDQYADLFLAAKNLSDAILLSDILRVNTEITKAPLSASMIKRYDEHHQDLTLLKALVRQQLPEKYKEIFFDQSKNGYAGYIDGGASQEEFYKFIKPILEKMDGTEELLVKLNREDLLRKQRTFDNGSIPHQIHLGELHAILRRQEDFYPFLKDNREKIEKILTFRIPYYVGPLARGNSRFAWMTRKSEETITPWNFEEVVDKGASAQSFIERMTNFDKNLPNEKVLPKHSLLYEYFTVYNELTKVKYVTEGMRKPAFLSGEQKKAIVDLLFKTNRKVTVKQLKEDYFKKIECFDSVEISGVEDRFNASLGTYHDLLKIIKDKDFLDNEENEDILEDIVLTLTLFEDREMIEERLKTYAHLFDDKVMKQLKRRRYTGWGRLSRKLINGIRDKQSGKTILDFLKSDGFANRNFMQLIHDDSLTFKEDIQKAQVSGQGDSLHEHIANLAGSPAIKKGILQTVKVVDELVKVMGRHKPENIVIEMARENQTTQKGQKNSRERMKRIEEGIKELGSQILKEHPVENTQLQNEKLYLYYLQNGRDMYVDQELDINRLSDYDVDHIVPQSFLKDDSIDNKVLTRSDKARGKSDNVPSEEVVKKMKNYWRQLLNAKLITQRKFDNLTKAERGGLSELDKAGFIKRQLVETRQITKHVAQILDSRMNTKYDENDKLIREVKVITLKSKLVSDFRKDFQFYKVREINNYHHAHDAYLNAVVGTALIKKYPKLESEFVYGDYKVYDVRKMIAKSEQEIGKATAKYFFYSNIMNFFKTEITLANGEIRKRPLIETNGETGEIVWDKGRDFATVRKVLSMPQVNIVKKTEVQTGGFSKESILPKRNSDKLIARKKDWDPKKYGGFDSPTVAYSVLVVAKVEKGKSKKLKSVKELLGITIMERSSFEKNPIDFLEAKGYKEVKKDLIIKLPKYSLFELENGRKRMLASAGELQKGNELALPSKYVNFLYLASHYEKLKGSPEDNEQKQLFVEQHKHYLDEIIEQISEFSKRVILADANLDKVLSAYNKHRDKPIREQAENIIHLFTLTNLGAPAAFKYFDTTIDRKRYTSTKEVLDATLIHQSITGLYETRIDLSQLGGDGGGGSGGGPAPGGVQEISDSRPMLHIYLNGRRFLGLLDTGADKTCIAGRDWPANWPIHQTESSLQGLGMACGVARSSQPLRWQHEDKSGIIHPFVIPTLPFTLWGRDIMKDIKVRLMTDSPDDSQDLMIGAIESNLFADQISWKSDQPVWLNQWPLKQEKLQALQQLVTEQLQLGHLEESNSPWNTPVFVIKKKSGKWRLLQDLRAVNATMHDMGALQPGLPSPPAVPKGWEIIIIDLQDCFFNIKLHPEDCKRFAFSVPSPNFKRPYQRFQWKVLPQGMKNSPTLCQKFVDKAILTVRDKYQDSYIVHYMDDILLAHPSRSIVDEILTSMIQALNKHGLVVSTEKIQKYDNLKYLGTHIQGDSVSYQKLQIRTDKLRTLNDFQKLLGNINWIRPFLKLTTGELKPLFEILNPDSNPISTRKLTPEACKALQLMNERLSTARVKRLDLSQPWSLCILKTEYTPTACLWQDGVVEWIHLPHISPKVITPYDIFCTQLIIKGRHRSKELFSKDPDYIVVPYTKVQFDLLLQEKEDWPISLLGFLGEVHFHLPKDPLLTFTLQTAIIFPHMTSTTPLEKGIVIFTDGSANGRSVTYIQGREPIIKENTQNTAQQAEIVAVITAFEEVSQPFNLYTDSKYVTGLFPEIETATLSPRTKIYTELKHLQRLIHKRQEKFYIGHIRGHTGLPGPLAQGNAYADSLTRILTAAGKRTADGSEFEKRTADGSEFESPKKKAKVE

SEQ ID NO: 6982 - protein, 2088 aa, synthetic construct
MPAAKRVKLDGGDKKYSIGLDIGTNSVGWAVITDEYKVPSKKFKVLGNTDRHSIKKNLIGALLFDSGETAEATRLKRTARRRYTRRKNRICYLQEIFSNEMAKVDDSFFHRLEESFLVEEDKKHERHPIFGNIVDEVAYHEKYPTIYHLRKKLVDSTDKADLRLIYLALAHMIKFRGHFLIEGDLNPDNSDVDKLFIQLVQTYNQLFEENPINASGVDAKAILSARLSKSRRLENLIAQLPGEKKNGLFGNLIALSLGLTPNFKSNFDLAEDAKLQLSKDTYDDDLDNLLAQIGDQYADLFLAAKNLSDAILLSDILRVNTEITKAPLSASMIKRYDEHHQDLTLLKALVRQQLPEKYKEIFFDQSKNGYAGYIDGGASQEEFYKFIKPILEKMDGTEELLVKLNREDLLRKQRTFDNGSIPHQIHLGELHAILRRQEDFYPFLKDNREKIEKILTFRIPYYVGPLARGNSRFAWMTRKSEETITPWNFEEVVDKGASAQSFIERMTNFDKNLPNEKVLPKHSLLYEYFTVYNELTKVKYVTEGMRKPAFLSGEQKKAIVDLLFKTNRKVTVKQLKEDYFKKIECFDSVEISGVEDRFNASLGTYHDLLKIIKDKDFLDNEENEDILEDIVLTLTLFEDREMIEERLKTYAHLFDDKVMKQLKRRRYTGWGRLSRKLINGIRDKQSGKTILDFLKSDGFANRNFMQLIHDDSLTFKEDIQKAQVSGQGDSLHEHIANLAGSPAIKKGILQTVKVVDELVKVMGRHKPENIVIEMARENQTTQKGQKNSRERMKRIEEGIKELGSQILKEHPVENTQLQNEKLYLYYLQNGRDMYVDQELDINRLSDYDVDHIVPQSFLKDDSIDNKVLTRSDKARGKSDNVPSEEVVKKMKNYWRQLLNAKLITQRKFDNLTKAERGGLSELDKAGFIKRQLVETRQITKHVAQILDSRMNTKYDENDKLIREVKVITLKSKLVSDFRKDFQFYKVREINNYHHAHDAYLNAVVGTALIKKYPKLESEFVYGDYKVYDVRKMIAKSEQEIGKATAKYFFYSNIMNFFKTEITLANGEIRKRPLIETNGETGEIVWDKGRDFATVRKVLSMPQVNIVKKTEVQTGGFSKESILPKRNSDKLIARKKDWDPKKYGGFDSPTVAYSVLVVAKVEKGKSKKLKSVKELLGITIMERSSFEKNPIDFLEAKGYKEVKKDLIIKLPKYSLFELENGRKRMLASAGELQKGNELALPSKYVNFLYLASHYEKLKGSPEDNEQKQLFVEQHKHYLDEIIEQISEFSKRVILADANLDKVLSAYNKHRDKPIREQAENIIHLFTLTNLGAPAAFKYFDTTIDRKRYTSTKEVLDATLIHQSITGLYETRIDLSQLGGDGGGGSGGGPAPGGTLQLDDEYRLYSPLVKPDQNIQFWLEQFPQAWAETAGMGLAKQVPPQVIQLKASATPVSVRQYPLSKEAQEGIRPHVQRLIQQGILVPVQSPWNTPLLPVRKPGTNDYRPVQDLREVNKRVQDIHPTVPNPYNLLCALPPQRSWYTVLDLKDAFFCLRLHPTSQPLFAFEWRDPGTGRTGQLTWTRLPQGFKNSPTIFDEALHRDLANFRIQHPQVTLLQYVDDLLLAGATKQDCLEGTKALLLELSDLGYRASAKKAQICRREVTYLGYSLRDGQRWLTEARKKTVVQIPAPTTAKQVREFLGTAGFCRLWIPGFATLAAPLYPLTKEKGEFSWAPEHQKAFDAIKKALLSAPALALPDVTKPFTLYVDERKGVARGVLTQTLGPWRRPVAYLSKKLDPVASGWPVCLKAIAAVAILVKDADKLTLGQNITVIAPHALENIVRQPPDRWMTNARMTHYQSLLLTERVTFAPPAALNPATLLPEETDEPVTHDCHQLLIEETGVRKDLTDIPLTGEVLTWFTDGSSYVVEGKRMAGAAVVDGTRTIWASSLPEGTSAQKAELMALTQALRLAEGKSINIYTDSRYAFATAHVHGAIYKQRGLLTSAGREIKNKEEILSLLEALHLPKRLAIIHCPGHQKAKDPISRGNQMADRVAKQAAQGVNLLAGKRTADGSEFEKRTADGSEFESPKKKAKVE

SEQ ID NO: 6983 - protein, 2085 aa, synthetic construct
MPAAKRVKLDGGDKKYSIGLDIGTNSVGWAVITDEYKVPSKKFKVLGNTDRHSIKKNLIGALLFDSGETAEATRLKRTARRRYTRRKNRICYLQEIFSNEMAKVDDSFFHRLEESFLVEEDKKHERHPIFGNIVDEVAYHEKYPTIYHLRKKLVDSTDKADLRLIYLALAHMIKFRGHFLIEGDLNPDNSDVDKLFIQLVQTYNQLFEENPINASGVDAKAILSARLSKSRRLENLIAQLPGEKKNGLFGNLIALSLGLTPNFKSNFDLAEDAKLQLSKDTYDDDLDNLLAQIGDQYADLFLAAKNLSDAILLSDILRVNTEITKAPLSASMIKRYDEHHQDLTLLKALVRQQLPEKYKEIFFDQSKNGYAGYIDGGASQEEFYKFIKPILEKMDGTEELLVKLNREDLLRKQRTFDNGSIPHQIHLGELHAILRRQEDFYPFLKDNREKIEKILTFRIPYYVGPLARGNSRFAWMTRKSEETITPWNFEEVVDKGASAQSFIERMTNFDKNLPNEKVLPKHSLLYEYFTVYNELTKVKYVTEGMRKPAFLSGEQKKAIVDLLFKTNRKVTVKQLKEDYFKKIECFDSVEISGVEDRFNASLGTYHDLLKIIKDKDFLDNEENEDILEDIVLTLTLFEDREMIEERLKTYAHLFDDKVMKQLKRRRYTGWGRLSRKLINGIRDKQSGKTILDFLKSDGFANRNFMQLIHDDSLTFKEDIQKAQVSGQGDSLHEHIANLAGSPAIKKGILQTVKVVDELVKVMGRHKPENIVIEMARENQTTQKGQKNSRERMKRIEEGIKELGSQILKEHPVENTQLQNEKLYLYYLQNGRDMYVDQELDINRLSDYDVDHIVPQSFLKDDSIDNKVLTRSDKARGKSDNVPSEEVVKKMKNYWRQLLNAKLITQRKFDNLTKAERGGLSELDKAGFIKRQLVETRQITKHVAQILDSRMNTKYDENDKLIREVKVITLKSKLVSDFRKDFQFYKVREINNYHHAHDAYLNAVVGTALIKKYPKLESEFVYGDYKVYDVRKMIAKSEQEIGKATAKYFFYSNIMNFFKTEITLANGEIRKRPLIETNGETGEIVWDKGRDFATVRKVLSMPQVNIVKKTEVQTGGFSKESILPKRNSDKLIARKKDWDPKKYGGFDSPTVAYSVLVVAKVEKGKSKKLKSVKELLGITIMERSSFEKNPIDFLEAKGYKEVKKDLIIKLPKYSLFELENGRKRMLASAGELQKGNELALPSKYVNFLYLASHYEKLKGSPEDNEQKQLFVEQHKHYLDEIIEQISEFSKRVILADANLDKVLSAYNKHRDKPIREQAENIIHLFTLTNLGAPAAFKYFDTTIDRKRYTSTKEVLDATLIHQSITGLYETRIDLSQLGGDGGGGSGGGPAPGGVPWLMKKPLQLTVLVPLHEYQERLLQQTALPKEQKELLQKLFLKYDALWQHWENQVGHRRIKPHNIATGTLAPRPQKQYPINPKAKPSIQIVIDDLLKQGVLIQQNSTMNTPVYPVPKPDGKWRMVLDYREVNKTIPLIAAQNQHSAGILSSIYRGKYKTTLDLTNGFWAHPITPESYWLTAFTWQGKQYCWTRLPQGFLNSPALFTADVVDLLKEIPNVQAYVDDIYISHDDPQEHLEQLEKIFSILLNAGYVVSLKKSEIAQREVEFLGFNITKEGRGLTDTFKQKLLNITPPKDLKQLQSILGLLNFARNFIPNYSELVKPLYTIVANANGKFISWTEDNSNQLQHIISVLNQADNLEERNPETRLIIKVNSSPSAGYIRYYNEGSKRPIMYVNYIFSKAEAKFTQTEKLLTTMHKGLIKAMDLAMGQEILVYSPIVSMTKIQRTPLPERKALPVRWITWMTYLEDPRIQFHYDKSLPELQQIPNVTEDVIAKTKHPSEFAMVFYTDGSAIKHPDVNKSHSAGMGIAQVQFIPEYKIVHQWSIPLGDHTAQLAEIAAVEFACKKALKISGPVLIVTDSFYVAESANKELPYWKSNGFLNNKKKPLRHVSKWKSIAECLQLKPDIIIMHEKGHQQPMTTLHTEGNNLADKLATQGSYVVHAGKRTADGSEFEKRTADGSEFESPKKKAKVE

SEQ ID NO: 6984 - protein, 2085 aa, synthetic construct
MPAAKRVKLDGGDKKYSIGLDIGTNSVGWAVITDEYKVPSKKFKVLGNTDRHSIKKNLIGALLFDSGETAEATRLKRTARRRYTRRKNRICYLQEIFSNEMAKVDDSFFHRLEESFLVEEDKKHERHPIFGNIVDEVAYHEKYPTIYHLRKKLVDSTDKADLRLIYLALAHMIKFRGHFLIEGDLNPDNSDVDKLFIQLVQTYNQLFEENPINASGVDAKAILSARLSKSRRLENLIAQLPGEKKNGLFGNLIALSLGLTPNFKSNFDLAEDAKLQLSKDTYDDDLDNLLAQIGDQYADLFLAAKNLSDAILLSDILRVNTEITKAPLSASMIKRYDEHHQDLTLLKALVRQQLPEKYKEIFFDQSKNGYAGYIDGGASQEEFYKFIKPILEKMDGTEELLVKLNREDLLRKQRTFDNGSIPHQIHLGELHAILRRQEDFYPFLKDNREKIEKILTFRIPYYVGPLARGNSRFAWMTRKSEETITPWNFEEVVDKGASAQSFIERMTNFDKNLPNEKVLPKHSLLYEYFTVYNELTKVKYVTEGMRKPAFLSGEQKKAIVDLLFKTNRKVTVKQLKEDYFKKIECFDSVEISGVEDRFNASLGTYHDLLKIIKDKDFLDNEENEDILEDIVLTLTLFEDREMIEERLKTYAHLFDDKVMKQLKRRRYTGWGRLSRKLINGIRDKQSGKTILDFLKSDGFANRNFMQLIHDDSLTFKEDIQKAQVSGQGDSLHEHIANLAGSPAIKKGILQTVKVVDELVKVMGRHKPENIVIEMARENQTTQKGQKNSRERMKRIEEGIKELGSQILKEHPVENTQLQNEKLYLYYLQNGRDMYVDQELDINRLSDYDVDHIVPQSFLKDDSIDNKVLTRSDKARGKSDNVPSEEVVKKMKNYWRQLLNAKLITQRKFDNLTKAERGGLSELDKAGFIKRQLVETRQITKHVAQILDSRMNTKYDENDKLIREVKVITLKSKLVSDFRKDFQFYKVREINNYHHAHDAYLNAVVGTALIKKYPKLESEFVYGDYKVYDVRKMIAKSEQEIGKATAKYFFYSNIMNFFKTEITLANGEIRKRPLIETNGETGEIVWDKGRDFATVRKVLSMPQVNIVKKTEVQTGGFSKESILPKRNSDKLIARKKDWDPKKYGGFDSPTVAYSVLVVAKVEKGKSKKLKSVKELLGITIMERSSFEKNPIDFLEAKGYKEVKKDLIIKLPKYSLFELENGRKRMLASAGELQKGNELALPSKYVNFLYLASHYEKLKGSPEDNEQKQLFVEQHKHYLDEIIEQISEFSKRVILADANLDKVLSAYNKHRDKPIREQAENIIHLFTLTNLGAPAAFKYFDTTIDRKRYTSTKEVLDATLIHQSITGLYETRIDLSQLGGDGGGGSGGGPAPGGIPWLMKKPLQLTTLVPLQEYEERLLKQTMLTGSYKEKLQSLFLKYDALWQHWENQVGHRRIKPHHIATGTVNPRPQKQYPINPKAKASIQTVINDLLKQGVLIQQNSIMNTPVYPVPKPDGKWRMVLDYREVNKTIPLIAAQNQHSAGILSSIFRGKYKTTLDLSNGFWAHSITPESYWLTAFTWLGQQYCWTRLPQGFLNSPALFNADVVDLLKEVPNVQVYVDDIYISHDDPREHLEQLEKVFSLLLNAGYVVSLKKSEIAQHEVEFLGFNITKEGRGLTETFKQKLLNITPPRDLKQLQSILGLLNFARNFIPNFSELVKPLYNIIATAPGKYITWTTDNSQQLQNIISMLNSAENLEERNPEVRLIMKVNTSPSAGYIRFYNEFAKRPIMYLNYVYTKAEVKFTNTEKLLTTIHKGLIKALDLGMGQEILVYSPIVSMTKIQKTPLPERKALPIRWITWMSYLEDPRIQFHYDKTLPELQQVPTVTDDIIAKIKHPSEFSMVFYTDGSAIKHPNVNKSHNAGMGIAQVQFKPEFTVINTWSIPLGDHTAQLAEVAAVEFACKKALKIDGPVLIVTDSFYVAESVNKELPYWQSNGFFNNKKKPLKHVSKWKSIADCIQLKPDIIIIHEKGHQPTASTFHTEGNNLADKLATQGSYVVNAGKRTADGSEFEKRTADGSEFESPKKKAKVE

SEQ ID NO: 6985 - protein, 2100 aa, synthetic construct
MPAAKRVKLDGGDKKYSIGLDIGTNSVGWAVITDEYKVPSKKFKVLGNTDRHSIKKNLIGALLFDSGETAEATRLKRTARRRYTRRKNRICYLQEIFSNEMAKVDDSFFHRLEESFLVEEDKKHERHPIFGNIVDEVAYHEKYPTIYHLRKKLVDSTDKADLRLIYLALAHMIKFRGHFLIEGDLNPDNSDVDKLFIQLVQTYNQLFEENPINASGVDAKAILSARLSKSRRLENLIAQLPGEKKNGLFGNLIALSLGLTPNFKSNFDLAEDAKLQLSKDTYDDDLDNLLAQIGDQYADLFLAAKNLSDAILLSDILRVNTEITKAPLSASMIKRYDEHHQDLTLLKALVRQQLPEKYKEIFFDQSKNGYAGYIDGGASQEEFYKFIKPILEKMDGTEELLVKLNREDLLRKQRTFDNGSIPHQIHLGELHAILRRQEDFYPFLKDNREKIEKILTFRIPYYVGPLARGNSRFAWMTRKSEETITPWNFEEVVDKGASAQSFIERMTNFDKNLPNEKVLPKHSLLYEYFTVYNELTKVKYVTEGMRKPAFLSGEQKKAIVDLLFKTNRKVTVKQLKEDYFKKIECFDSVEISGVEDRFNASLGTYHDLLKIIKDKDFLDNEENEDILEDIVLTLTLFEDREMIEERLKTYAHLFDDKVMKQLKRRRYTGWGRLSRKLINGIRDKQSGKTILDFLKSDGFANRNFMQLIHDDSLTFKEDIQKAQVSGQGDSLHEHIANLAGSPAIKKGILQTVKVVDELVKVMGRHKPENIVIEMARENQTTQKGQKNSRERMKRIEEGIKELGSQILKEHPVENTQLQNEKLYLYYLQNGRDMYVDQELDINRLSDYDVDHIVPQSFLKDDSIDNKVLTRSDKARGKSDNVPSEEVVKKMKNYWRQLLNAKLITQRKFDNLTKAERGGLSELDKAGFIKRQLVETRQITKHVAQILDSRMNTKYDENDKLIREVKVITLKSKLVSDFRKDFQFYKVREINNYHHAHDAYLNAVVGTALIKKYPKLESEFVYGDYKVYDVRKMIAKSEQEIGKATAKYFFYSNIMNFFKTEITLANGEIRKRPLIETNGETGEIVWDKGRDFATVRKVLSMPQVNIVKKTEVQTGGFSKESILPKRNSDKLIARKKDWDPKKYGGFDSPTVAYSVLVVAKVEKGKSKKLKSVKELLGITIMERSSFEKNPIDFLEAKGYKEVKKDLIIKLPKYSLFELENGRKRMLASAGELQKGNELALPSKYVNFLYLASHYEKLKGSPEDNEQKQLFVEQHKHYLDEIIEQISEFSKRVILADANLDKVLSAYNKHRDKPIREQAENIIHLFTLTNLGAPAAFKYFDTTIDRKRYTSTKEVLDATLIHQSITGLYETRIDLSQLGGDGGGGSPAPGGGGGTVSLQDEHRLFDIPVTTSLPDVWLQDFPQAWAETGGLGRAKCQAPIIIDLKPTAVPVSIKQYPMSLEAHMGIRQHIIKFLELGVLRPCRSPWNTPLLPVKKPGTQDYRPVQDLREINKRTVDIHPTVPNPYNLLSTLKPDYSWYTVLDLKDAFFCLPLAPQSQELFAFEWKDPERGISGQLTWTRLPQGFKNSPTLFNEALHRDLTDFRTQHPEVTLLQYVDDLLLAAPTKKACTQGTRHLLQELGEKGYRASAKKAQICQTKVTYLGYILSEGKRWLTPGRIETVARIPPPRNPREVREFLGTAGFCRLWIPGFAELAAPLYALTKPSTPFTWQTEHQLAFEALKKALLSAPALGLPDTSKPFTLFLDERQGIAKGVLTQKLGPWKRPVAYLSKKLDPVAAGWPPCLRIMAATAMLVKDSAKLTLGQPLTVITPHTLEAIVRQPPDRWITNARLTHYQALLLDTDRVQFGPPVTLNPATLLPVPENQPSPHDCRQVLAETHGTREDLKDQELPDADHTWYTDGSSYLDSGTRRAGAAVVDGHNTIWAQSLPPGTSAQKAELIALTKALELSKGKKANIYTDSRYAFATAHTHGSIYERRGWLTSEGKEIKNKAEIIALLKALFLPQEVAIIHCPGHQKGQDPVAVGNRQADRVARQAAMAEVLTLATEPDNTSHITAGKRTADGSEFEKRTADGSEFESPKKKAKVE

SEQ ID NO: 6986 - protein, 2092 aa, synthetic construct
MPAAKRVKLDGGDKKYSIGLDIGTNSVGWAVITDEYKVPSKKFKVLGNTDRHSIKKNLIGALLFDSGETAEATRLKRTARRRYTRRKNRICYLQEIFSNEMAKVDDSFFHRLEESFLVEEDKKHERHPIFGNIVDEVAYHEKYPTIYHLRKKLVDSTDKADLRLIYLALAHMIKFRGHFLIEGDLNPDNSDVDKLFIQLVQTYNQLFEENPINASGVDAKAILSARLSKSRRLENLIAQLPGEKKNGLFGNLIALSLGLTPNFKSNFDLAEDAKLQLSKDTYDDDLDNLLAQIGDQYADLFLAAKNLSDAILLSDILRVNTEITKAPLSASMIKRYDEHHQDLTLLKALVRQQLPEKYKEIFFDQSKNGYAGYIDGGASQEEFYKFIKPILEKMDGTEELLVKLNREDLLRKQRTFDNGSIPHQIHLGELHAILRRQEDFYPFLKDNREKIEKILTFRIPYYVGPLARGNSRFAWMTRKSEETITPWNFEEVVDKGASAQSFIERMTNFDKNLPNEKVLPKHSLLYEYFTVYNELTKVKYVTEGMRKPAFLSGEQKKAIVDLLFKTNRKVTVKQLKEDYFKKIECFDSVEISGVEDRFNASLGTYHDLLKIIKDKDFLDNEENEDILEDIVLTLTLFEDREMIEERLKTYAHLFDDKVMKQLKRRRYTGWGRLSRKLINGIRDKQSGKTILDFLKSDGFANRNFMQLIHDDSLTFKEDIQKAQVSGQGDSLHEHIANLAGSPAIKKGILQTVKVVDELVKVMGRHKPENIVIEMARENQTTQKGQKNSRERMKRIEEGIKELGSQILKEHPVENTQLQNEKLYLYYLQNGRDMYVDQELDINRLSDYDVDHIVPQSFLKDDSIDNKVLTRSDKARGKSDNVPSEEVVKKMKNYWRQLLNAKLITQRKFDNLTKAERGGLSELDKAGFIKRQLVETRQITKHVAQILDSRMNTKYDENDKLIREVKVITLKSKLVSDFRKDFQFYKVREINNYHHAHDAYLNAVVGTALIKKYPKLESEFVYGDYKVYDVRKMIAKSEQEIGKATAKYFFYSNIMNFFKTEITLANGEIRKRPLIETNGETGEIVWDKGRDFATVRKVLSMPQVNIVKKTEVQTGGFSKESILPKRNSDKLIARKKDWDPKKYGGFDSPTVAYSVLVVAKVEKGKSKKLKSVKELLGITIMERSSFEKNPIDFLEAKGYKEVKKDLIIKLPKYSLFELENGRKRMLASAGELQKGNELALPSKYVNFLYLASHYEKLKGSPEDNEQKQLFVEQHKHYLDEIIEQISEFSKRVILADANLDKVLSAYNKHRDKPIREQAENIIHLFTLTNLGAPAAFKYFDTTIDRKRYTSTKEVLDATLIHQSITGLYETRIDLSQLGGDGGGGSPAPGGGGGVLNLEEEYRLHEKPVPSSIDPSWLQLFPTVWAERAGMGLANQVPPVVVELRSGASPVAVRQYPMSKEAREGIRPHIQKFLDLGVLVPCRSPWNTPLLPVKKPGTNDYRPVQDLREINKRVQDIHPTVPNPYNLLSSLPPSYTWYSVLDLKDAFFCLRLHPNSQPLFAFEWKDPEKGNTGQLTWTRLPQGFKNSPTLFDEALHRDLAPFRALNPQVVLLQYVDDLLVAAPTYEDCKKGTQKLLQELSKLGYRVSAKKAQLCQREVTYLGYLLKEGKRWLTPARKATVMKIPVPTTPRQVREFLGTAGFCRLWIPGFASLAAPLYPLTKESIPFIWTEEHQQAFDHIKKALLSAPALALPDLTKPFTLYIDERAGVARGVLTQTLGPWRRPVAYLSKKLDPVASGWPTCLKAVAAVALLLKDADKLTLGQNVTVIASHSLESIVRQPPDRWMTNARMTHYQSLLLNERVSFAPPAVLNPATLLPVESEATPVHRCSEILAEETGTRRDLEDQPLPGVPTWYTDGSSFITEGKRRAGAPIVDGKRTVWASSLPEGTSAQKAELVALTQALRLAEGKNINIYTDSRYAFATAHIHGAIYKQRGLLTSAGKDIKNKEEILALLEAIHLPRRVAIIHCPGHQRGSNPVATGNRRADEAAKQAALSTRVLAGTTKPAGKRTADGSEFEKRTADGSEFESPKKKAKVE

SEQ ID NO: 6987 - protein, 2092 aa, synthetic construct
MPAAKRVKLDGGDKKYSIGLDIGTNSVGWAVITDEYKVPSKKFKVLGNTDRHSIKKNLIGALLFDSGETAEATRLKRTARRRYTRRKNRICYLQEIFSNEMAKVDDSFFHRLEESFLVEEDKKHERHPIFGNIVDEVAYHEKYPTIYHLRKKLVDSTDKADLRLIYLALAHMIKFRGHFLIEGDLNPDNSDVDKLFIQLVQTYNQLFEENPINASGVDAKAILSARLSKSRRLENLIAQLPGEKKNGLFGNLIALSLGLTPNFKSNFDLAEDAKLQLSKDTYDDDLDNLLAQIGDQYADLFLAAKNLSDAILLSDILRVNTEITKAPLSASMIKRYDEHHQDLTLLKALVRQQLPEKYKEIFFDQSKNGYAGYIDGGASQEEFYKFIKPILEKMDGTEELLVKLNREDLLRKQRTFDNGSIPHQIHLGELHAILRRQEDFYPFLKDNREKIEKILTFRIPYYVGPLARGNSRFAWMTRKSEETITPWNFEEVVDKGASAQSFIERMTNFDKNLPNEKVLPKHSLLYEYFTVYNELTKVKYVTEGMRKPAFLSGEQKKAIVDLLFKTNRKVTVKQLKEDYFKKIECFDSVEISGVEDRFNASLGTYHDLLKIIKDKDFLDNEENEDILEDIVLTLTLFEDREMIEERLKTYAHLFDDKVMKQLKRRRYTGWGRLSRKLINGIRDKQSGKTILDFLKSDGFANRNFMQLIHDDSLTFKEDIQKAQVSGQGDSLHEHIANLAGSPAIKKGILQTVKVVDELVKVMGRHKPENIVIEMARENQTTQKGQKNSRERMKRIEEGIKELGSQILKEHPVENTQLQNEKLYLYYLQNGRDMYVDQELDINRLSDYDVDHIVPQSFLKDDSIDNKVLTRSDKARGKSDNVPSEEVVKKMKNYWRQLLNAKLITQRKFDNLTKAERGGLSELDKAGFIKRQLVETRQITKHVAQILDSRMNTKYDENDKLIREVKVITLKSKLVSDFRKDFQFYKVREINNYHHAHDAYLNAVVGTALIKKYPKLESEFVYGDYKVYDVRKMIAKSEQEIGKATAKYFFYSNIMNFFKTEITLANGEIRKRPLIETNGETGEIVWDKGRDFATVRKVLSMPQVNIVKKTEVQTGGFSKESILPKRNSDKLIARKKDWDPKKYGGFDSPTVAYSVLVVAKVEKGKSKKLKSVKELLGITIMERSSFEKNPIDFLEAKGYKEVKKDLIIKLPKYSLFELENGRKRMLASAGELQKGNELALPSKYVNFLYLASHYEKLKGSPEDNEQKQLFVEQHKHYLDEIIEQISEFSKRVILADANLDKVLSAYNKHRDKPIREQAENIIHLFTLTNLGAPAAFKYFDTTIDRKRYTSTKEVLDATLIHQSITGLYETRIDLSQLGGDGGGGSPAPGGGGGVLNLEEEYRLHEKPVPSSIDPSWLQLFPTVWAERAGMGLANQVPPVVVELRSGASPVAVRQYPMSKEAREGIRPHIQKFLDLGVLVPCRSPWNTPLLPVKKPGTNDYRPVQDLREINKRVQDIHPTVPNPYNLLSSLPPSYTWYSVLDLKDAFFCLRLHPNSQPLFAFEWKDPEKGNTGQLTWTRLPQGFKNSPTLFNEALHRDLAPFRALNPQVVLLQYVDDLLVAAPTYEDCKKGTQKLLQELSKLGYRVSAKKAQLCQREVTYLGYLLKEGKRWLTPARKATVMKIPVPTTPRQVREFLGTAGFCRLWIPGFASLAAPLYPLTKPSIPFIWTEEHQQAFDHIKKALLSAPALALPDLTKPFTLYIDERAGVARGVLTQTLGPWRRPVAYLSKKLDPVASGWPTCLKAVAAVALLLKDADKLTLGQNVTVIASHSLESIVRQPPDRWMTNARMTHYQSLLLNERVSFAPPAVLNPATLLPVESEATPVHRCSEILAEETGTRRDLEDQPLPGVPTWYTDGSSFITEGKRRAGAPIVDGKRTVWASSLPEGTSAQKAELVALTQALRLAEGKNINIYTDSRYAFATAHIHGAIYKQRGWLTSAGKDIKNKEEILALLEAIHLPRRVAIIHCPGHQRGSNPVATGNRRADEAAKQAALSTRVLAGTTKPAGKRTADGSEFEKRTADGSEFESPKKKAKVE

SEQ ID NO: 6988 - protein, 2125 aa, synthetic construct
MPAAKRVKLDGGDKKYSIGLDIGTNSVGWAVITDEYKVPSKKFKVLGNTDRHSIKKNLIGALLFDSGETAEATRLKRTARRRYTRRKNRICYLQEIFSNEMAKVDDSFFHRLEESFLVEEDKKHERHPIFGNIVDEVAYHEKYPTIYHLRKKLVDSTDKADLRLIYLALAHMIKFRGHFLIEGDLNPDNSDVDKLFIQLVQTYNQLFEENPINASGVDAKAILSARLSKSRRLENLIAQLPGEKKNGLFGNLIALSLGLTPNFKSNFDLAEDAKLQLSKDTYDDDLDNLLAQIGDQYADLFLAAKNLSDAILLSDILRVNTEITKAPLSASMIKRYDEHHQDLTLLKALVRQQLPEKYKEIFFDQSKNGYAGYIDGGASQEEFYKFIKPILEKMDGTEELLVKLNREDLLRKQRTFDNGSIPHQIHLGELHAILRRQEDFYPFLKDNREKIEKILTFRIPYYVGPLARGNSRFAWMTRKSEETITPWNFEEVVDKGASAQSFIERMTNFDKNLPNEKVLPKHSLLYEYFTVYNELTKVKYVTEGMRKPAFLSGEQKKAIVDLLFKTNRKVTVKQLKEDYFKKIECFDSVEISGVEDRFNASLGTYHDLLKIIKDKDFLDNEENEDILEDIVLTLTLFEDREMIEERLKTYAHLFDDKVMKQLKRRRYTGWGRLSRKLINGIRDKQSGKTILDFLKSDGFANRNFMQLIHDDSLTFKEDIQKAQVSGQGDSLHEHIANLAGSPAIKKGILQTVKVVDELVKVMGRHKPENIVIEMARENQTTQKGQKNSRERMKRIEEGIKELGSQILKEHPVENTQLQNEKLYLYYLQNGRDMYVDQELDINRLSDYDVDHIVPQSFLKDDSIDNKVLTRSDKARGKSDNVPSEEVVKKMKNYWRQLLNAKLITQRKFDNLTKAERGGLSELDKAGFIKRQLVETRQITKHVAQILDSRMNTKYDENDKLIREVKVITLKSKLVSDFRKDFQFYKVREINNYHHAHDAYLNAVVGTALIKKYPKLESEFVYGDYKVYDVRKMIAKSEQEIGKATAKYFFYSNIMNFFKTEITLANGEIRKRPLIETNGETGEIVWDKGRDFATVRKVLSMPQVNIVKKTEVQTGGFSKESILPKRNSDKLIARKKDWDPKKYGGFDSPTVAYSVLVVAKVEKGKSKKLKSVKELLGITIMERSSFEKNPIDFLEAKGYKEVKKDLIIKLPKYSLFELENGRKRMLASAGELQKGNELALPSKYVNFLYLASHYEKLKGSPEDNEQKQLFVEQHKHYLDEIIEQISEFSKRVILADANLDKVLSAYNKHRDKPIREQAENIIHLFTLTNLGAPAAFKYFDTTIDRKRYTSTKEVLDATLIHQSITGLYETRIDLSQLGGDGGGGSPAPGGGGGLLGRDLLTKLKAQIQFSTEGPQVTWEDRPAMCLVLNLEEEYRLHEKPVPPSIDPSWLQLFPMVWAEKAGMGLANQVPPVVVELKSDASPVAVRQYPMSKEAREGIRPHIQRFLDLGILVPCQSPWNTPLLPVKKPGTNDYRPVQDLREVNKRVQDIHPTVPNPYNLLSSLPPSHTWYSVLDLKDAFFCLKLHPNSQPLFAFEWRDPEKGNTGQLTWTRLPQGFKNSPTLFNEALHRDLASFRALNPQVVMLQYVDDLLVAAPTYRDCKEGTRRLLQELSKLGYRVSAKKAQLCREEVTYLGYLLKGGKRWLTPARKATVMKIPTPTTPRQVREFLGTAGFCRLWIPGFASLAAPLYPLTRPKVPFTWTEAHQEAFGRIKEALLSAPALALPDLTKPFALYVDEKEGVARGVLTQTLGPWRRPVAYLSKKLDPVASGWPTCLKAIAAVALLLKDADKLTLGQNVLVIAPHNLESIVRQPPDRWMTNARMTHYQSLLLNERVSFAPPAILNPATLLPVESDDTPIHICSEILAEETGTRPDLRDQPLPGVPAWYTDGSSFIMDGRRQAGAAIVDNKRTVWASNLPEGTSAQKAELIALTQALRLAEGKSINIYTDSRYAFATAHVHGAIYKQRGWLTSAGKDIKNKEEILALLEAIHLPKRVAIIHCPGHQRGTDPVATGNRKADEAAKQAAQSTRILTETTKNAGKRTADGSEFEKRTADGSEFESPKKKAKVE

SEQ ID NO: 6989 - protein, 2216 aa, synthetic construct
MPAAKRVKLDGGDKKYSIGLDIGTNSVGWAVITDEYKVPSKKFKVLGNTDRHSIKKNLIGALLFDSGETAEATRLKRTARRRYTRRKNRICYLQEIFSNEMAKVDDSFFHRLEESFLVEEDKKHERHPIFGNIVDEVAYHEKYPTIYHLRKKLVDSTDKADLRLIYLALAHMIKFRGHFLIEGDLNPDNSDVDKLFIQLVQTYNQLFEENPINASGVDAKAILSARLSKSRRLENLIAQLPGEKKNGLFGNLIALSLGLTPNFKSNFDLAEDAKLQLSKDTYDDDLDNLLAQIGDQYADLFLAAKNLSDAILLSDILRVNTEITKAPLSASMIKRYDEHHQDLTLLKALVRQQLPEKYKEIFFDQSKNGYAGYIDGGASQEEFYKFIKPILEKMDGTEELLVKLNREDLLRKQRTFDNGSIPHQIHLGELHAILRRQEDFYPFLKDNREKIEKILTFRIPYYVGPLARGNSRFAWMTRKSEETITPWNFEEVVDKGASAQSFIERMTNFDKNLPNEKVLPKHSLLYEYFTVYNELTKVKYVTEGMRKPAFLSGEQKKAIVDLLFKTNRKVTVKQLKEDYFKKIECFDSVEISGVEDRFNASLGTYHDLLKIIKDKDFLDNEENEDILEDIVLTLTLFEDREMIEERLKTYAHLFDDKVMKQLKRRRYTGWGRLSRKLINGIRDKQSGKTILDFLKSDGFANRNFMQLIHDDSLTFKEDIQKAQVSGQGDSLHEHIANLAGSPAIKKGILQTVKVVDELVKVMGRHKPENIVIEMARENQTTQKGQKNSRERMKRIEEGIKELGSQILKEHPVENTQLQNEKLYLYYLQNGRDMYVDQELDINRLSDYDVDHIVPQSFLKDDSIDNKVLTRSDKARGKSDNVPSEEVVKKMKNYWRQLLNAKLITQRKFDNLTKAERGGLSELDKAGFIKRQLVETRQITKHVAQILDSRMNTKYDENDKLIREVKVITLKSKLVSDFRKDFQFYKVREINNYHHAHDAYLNAVVGTALIKKYPKLESEFVYGDYKVYDVRKMIAKSEQEIGKATAKYFFYSNIMNFFKTEITLANGEIRKRPLIETNGETGEIVWDKGRDFATVRKVLSMPQVNIVKKTEVQTGGFSKESILPKRNSDKLIARKKDWDPKKYGGFDSPTVAYSVLVVAKVEKGKSKKLKSVKELLGITIMERSSFEKNPIDFLEAKGYKEVKKDLIIKLPKYSLFELENGRKRMLASAGELQKGNELALPSKYVNFLYLASHYEKLKGSPEDNEQKQLFVEQHKHYLDEIIEQISEFSKRVILADANLDKVLSAYNKHRDKPIREQAENIIHLFTLTNLGAPAAFKYFDTTIDRKRYTSTKEVLDATLIHQSITGLYETRIDLSQLGGDGGGGSPAPGGGGGTLGDQGSRGSDPLPEPRVTLTVEGIPTEFLVNTGAEHSVLTKPMGKMGSKRTVVAGATGSKVYPWTTKRLLKIGQKQVTHSFLVIPECPAPLLGRDLLTKLKAQIQFSTEGPQVTWEDRPAMCLVLNLEEEYRLHEKPVPPSIDPSWLQLFPMVWAEKAGMGLANQVPPVVVELKSDASPVAVRQYPMSKEAREGIRPHIQRFLDLGILVPCQSPWNTPLLPVKKPGTNDYRPVQDLREVNKRVQDIHPTVPNPYNLLSSLPPSHTWYSVLDLKDAFFCLKLHPNSQPLFAFEWRDPEKGNTGQLTWTRLPQGFKNSPTLFNEALHRDLASFRALNPQVVMLQYVDDLLVAAPTYRDCKEGTRRLLQELSKLGYRVSAKKAQLCREEVTYLGYLLKGGKRWLTPARKATVMKIPTPTTPRQVREFLGTAGFCRLWIPGFASLAAPLYPLTRPKVPFTWTEAHQEAFGRIKEALLSAPALALPDLTKPFALYVDEKEGVARGVLTQTLGPWRRPVAYLSKKLDPVASGWPTCLKAIAAVALLLKDADKLTLGQNVLVIAPHNLESIVRQPPDRWMTNARMTHYQSLLLNERVSFAPPAILNPATLLPVESDDTPIHICSEILAEETGTRPDLRDQPLPGVPAWYTDGSSFIMDGRRQAGAAIVDNKRTVWASNLPEGTSAQKAELIALTQALRLAEGKSINIYTDSRYAFATAHVHGAIYKQRGWLTSAGKDIKNKEEILALLEAIHLPKRVAIIHCPGHQRGTDPVATGNRKADEAAKQAAQSTRILTETTKNAGKRTADGSEFEKRTADGSEFESPKKKAKVE

SEQ ID NO: 6990 - protein, 2088 aa, synthetic construct
MPAAKRVKLDGGDKKYSIGLDIGTNSVGWAVITDEYKVPSKKFKVLGNTDRHSIKKNLIGALLFDSGETAEATRLKRTARRRYTRRKNRICYLQEIFSNEMAKVDDSFFHRLEESFLVEEDKKHERHPIFGNIVDEVAYHEKYPTIYHLRKKLVDSTDKADLRLIYLALAHMIKFRGHFLIEGDLNPDNSDVDKLFIQLVQTYNQLFEENPINASGVDAKAILSARLSKSRRLENLIAQLPGEKKNGLFGNLIALSLGLTPNFKSNFDLAEDAKLQLSKDTYDDDLDNLLAQIGDQYADLFLAAKNLSDAILLSDILRVNTEITKAPLSASMIKRYDEHHQDLTLLKALVRQQLPEKYKEIFFDQSKNGYAGYIDGGASQEEFYKFIKPILEKMDGTEELLVKLNREDLLRKQRTFDNGSIPHQIHLGELHAILRRQEDFYPFLKDNREKIEKILTFRIPYYVGPLARGNSRFAWMTRKSEETITPWNFEEVVDKGASAQSFIERMTNFDKNLPNEKVLPKHSLLYEYFTVYNELTKVKYVTEGMRKPAFLSGEQKKAIVDLLFKTNRKVTVKQLKEDYFKKIECFDSVEISGVEDRFNASLGTYHDLLKIIKDKDFLDNEENEDILEDIVLTLTLFEDREMIEERLKTYAHLFDDKVMKQLKRRRYTGWGRLSRKLINGIRDKQSGKTILDFLKSDGFANRNFMQLIHDDSLTFKEDIQKAQVSGQGDSLHEHIANLAGSPAIKKGILQTVKVVDELVKVMGRHKPENIVIEMARENQTTQKGQKNSRERMKRIEEGIKELGSQILKEHPVENTQLQNEKLYLYYLQNGRDMYVDQELDINRLSDYDVDHIVPQSFLKDDSIDNKVLTRSDKARGKSDNVPSEEVVKKMKNYWRQLLNAKLITQRKFDNLTKAERGGLSELDKAGFIKRQLVETRQITKHVAQILDSRMNTKYDENDKLIREVKVITLKSKLVSDFRKDFQFYKVREINNYHHAHDAYLNAVVGTALIKKYPKLESEFVYGDYKVYDVRKMIAKSEQEIGKATAKYFFYSNIMNFFKTEITLANGEIRKRPLIETNGETGEIVWDKGRDFATVRKVLSMPQVNIVKKTEVQTGGFSKESILPKRNSDKLIARKKDWDPKKYGGFDSPTVAYSVLVVAKVEKGKSKKLKSVKELLGITIMERSSFEKNPIDFLEAKGYKEVKKDLIIKLPKYSLFELENGRKRMLASAGELQKGNELALPSKYVNFLYLASHYEKLKGSPEDNEQKQLFVEQHKHYLDEIIEQISEFSKRVILADANLDKVLSAYNKHRDKPIREQAENIIHLFTLTNLGAPAAFKYFDTTIDRKRYTSTKEVLDATLIHQSITGLYETRIDLSQLGGDGGGGSPAPGGGGGTLQLDDEYRLYSPLVKPDQNIQFWLEQFPQAWAETAGMGLAKQVPPQVIQLKASATPVSVRQYPLSKEAQEGIRPHVQRLIQQGILVPVQSPWNTPLLPVRKPGTNDYRPVQDLREVNKRVQDIHPTVPNPYNLLCALPPQRSWYTVLDLKDAFFCLRLHPTSQPLFAFEWRDPGTGRTGQLTWTRLPQGFKNSPTIFDEALHRDLANFRIQHPQVTLLQYVDDLLLAGATKQDCLEGTKALLLELSDLGYRASAKKAQICRREVTYLGYSLRDGQRWLTEARKKTVVQIPAPTTAKQVREFLGTAGFCRLWIPGFATLAAPLYPLTKEKGEFSWAPEHQKAFDAIKKALLSAPALALPDVTKPFTLYVDERKGVARGVLTQTLGPWRRPVAYLSKKLDPVASGWPVCLKAIAAVAILVKDADKLTLGQNITVIAPHALENIVRQPPDRWMTNARMTHYQSLLLTERVTFAPPAALNPATLLPEETDEPVTHDCHQLLIEETGVRKDLTDIPLTGEVLTWFTDGSSYVVEGKRMAGAAVVDGTRTIWASSLPEGTSAQKAELMALTQALRLAEGKSINIYTDSRYAFATAHVHGAIYKQRGLLTSAGREIKNKEEILSLLEALHLPKRLAIIHCPGHQKAKDPISRGNQMADRVAKQAAQGVNLLAGKRTADGSEFEKRTADGSEFESPKKKAKVE

SEQ ID NO: 6991 - protein, 2174 aa, synthetic construct
MPAAKRVKLDGGDKKYSIGLDIGTNSVGWAVITDEYKVPSKKFKVLGNTDRHSIKKNLIGALLFDSGETAEATRLKRTARRRYTRRKNRICYLQEIFSNEMAKVDDSFFHRLEESFLVEEDKKHERHPIFGNIVDEVAYHEKYPTIYHLRKKLVDSTDKADLRLIYLALAHMIKFRGHFLIEGDLNPDNSDVDKLFIQLVQTYNQLFEENPINASGVDAKAILSARLSKSRRLENLIAQLPGEKKNGLFGNLIALSLGLTPNFKSNFDLAEDAKLQLSKDTYDDDLDNLLAQIGDQYADLFLAAKNLSDAILLSDILRVNTEITKAPLSASMIKRYDEHHQDLTLLKALVRQQLPEKYKEIFFDQSKNGYAGYIDGGASQEEFYKFIKPILEKMDGTEELLVKLNREDLLRKQRTFDNGSIPHQIHLGELHAILRRQEDFYPFLKDNREKIEKILTFRIPYYVGPLARGNSRFAWMTRKSEETITPWNFEEVVDKGASAQSFIERMTNFDKNLPNEKVLPKHSLLYEYFTVYNELTKVKYVTEGMRKPAFLSGEQKKAIVDLLFKTNRKVTVKQLKEDYFKKIECFDSVEISGVEDRFNASLGTYHDLLKIIKDKDFLDNEENEDILEDIVLTLTLFEDREMIEERLKTYAHLFDDKVMKQLKRRRYTGWGRLSRKLINGIRDKQSGKTILDFLKSDGFANRNFMQLIHDDSLTFKEDIQKAQVSGQGDSLHEHIANLAGSPAIKKGILQTVKVVDELVKVMGRHKPENIVIEMARENQTTQKGQKNSRERMKRIEEGIKELGSQILKEHPVENTQLQNEKLYLYYLQNGRDMYVDQELDINRLSDYDVDHIVPQSFLKDDSIDNKVLTRSDKARGKSDNVPSEEVVKKMKNYWRQLLNAKLITQRKFDNLTKAERGGLSELDKAGFIKRQLVETRQITKHVAQILDSRMNTKYDENDKLIREVKVITLKSKLVSDFRKDFQFYKVREINNYHHAHDAYLNAVVGTALIKKYPKLESEFVYGDYKVYDVRKMIAKSEQEIGKATAKYFFYSNIMNFFKTEITLANGEIRKRPLIETNGETGEIVWDKGRDFATVRKVLSMPQVNIVKKTEVQTGGFSKESILPKRNSDKLIARKKDWDPKKYGGFDSPTVAYSVLVVAKVEKGKSKKLKSVKELLGITIMERSSFEKNPIDFLEAKGYKEVKKDLIIKLPKYSLFELENGRKRMLASAGELQKGNELALPSKYVNFLYLASHYEKLKGSPEDNEQKQLFVEQHKHYLDEIIEQISEFSKRVILADANLDKVLSAYNKHRDKPIREQAENIIHLFTLTNLGAPAAFKYFDTTIDRKRYTSTKEVLDATLIHQSITGLYETRIDLSQLGGDGGGGSPAPGGGGGMDPLQLLQPLEAEIKGTKLKAHWNSGATITCVPEAFLEDERPIQTMLIKTIHGEKQQDVYYLTFKVQGRKVEAEVLASPYDYILLNPSDVPWLMKKPLQLTVLVPLHEYQERLLQQTALPKEQKELLQKLFLKYDALWQHWENQVGHRRIKPHNIATGTLAPRPQKQYPINPKAKPSIQIVIDDLLKQGVLIQQNSTMNTPVYPVPKPDGKWRMVLDYREVNKTIPLIAAQNQHSAGILSSIYRGKYKTTLDLTNGFWAHPITPESYWLTAFTWQGKQYCWTRLPQGFLNSPALFNADVVDLLKEIPNVQAYVDDIYISHDDPQEHLEQLEKIFSILLNAGYVVSLKKSEIAQREVEFLGFNITKEGRGLTDTFKQKLLNITPPKDLKQLQSILGLLNFARNFIPNYSELVKPLYTIVAPANGKFISWTEDNSNQLQHIISVLNQADNLEERNPETRLIIKVNSSPSAGYIRYYNEGSKRPIMYVNYIFSKAEAKFTQTEKLLTTMHKGLIKAMDLAMGQEILVYSPIVSMTKIQRTPLPERKALPVRWITWMTYLEDPRIQFHYDKSLPELQQIPNVTEDVIAKTKHPSEFAMVFYTDGSAIKHPDVNKSHSAGMGIAQVQFIPEYKIVHQWSIPLGDHTAQLAEIAAVEFACKKALKISGPVLIVTDSFYVAESANKELPYWKSNGFLNNKKKPLRHVSKWKSIAECLQLKPDIIIMHEKGHQQPMTTLHTEGNNLADKLATQGSYVVHAGKRTADGSEFEKRTADGSEFESPKKKAKVE

SEQ ID NO: 6992 - protein, 2092 aa, synthetic construct
MPAAKRVKLDGGDKKYSIGLDIGTNSVGWAVITDEYKVPSKKFKVLGNTDRHSIKKNLIGALLFDSGETAEATRLKRTARRRYTRRKNRICYLQEIFSNEMAKVDDSFFHRLEESFLVEEDKKHERHPIFGNIVDEVAYHEKYPTIYHLRKKLVDSTDKADLRLIYLALAHMIKFRGHFLIEGDLNPDNSDVDKLFIQLVQTYNQLFEENPINASGVDAKAILSARLSKSRRLENLIAQLPGEKKNGLFGNLIALSLGLTPNFKSNFDLAEDAKLQLSKDTYDDDLDNLLAQIGDQYADLFLAAKNLSDAILLSDILRVNTEITKAPLSASMIKRYDEHHQDLTLLKALVRQQLPEKYKEIFFDQSKNGYAGYIDGGASQEEFYKFIKPILEKMDGTEELLVKLNREDLLRKQRTFDNGSIPHQIHLGELHAILRRQEDFYPFLKDNREKIEKILTFRIPYYVGPLARGNSRFAWMTRKSEETITPWNFEEVVDKGASAQSFIERMTNFDKNLPNEKVLPKHSLLYEYFTVYNELTKVKYVTEGMRKPAFLSGEQKKAIVDLLFKTNRKVTVKQLKEDYFKKIECFDSVEISGVEDRFNASLGTYHDLLKIIKDKDFLDNEENEDILEDIVLTLTLFEDREMIEERLKTYAHLFDDKVMKQLKRRRYTGWGRLSRKLINGIRDKQSGKTILDFLKSDGFANRNFMQLIHDDSLTFKEDIQKAQVSGQGDSLHEHIANLAGSPAIKKGILQTVKVVDELVKVMGRHKPENIVIEMARENQTTQKGQKNSRERMKRIEEGIKELGSQILKEHPVENTQLQNEKLYLYYLQNGRDMYVDQELDINRLSDYDVDHIVPQSFLKDDSIDNKVLTRSDKARGKSDNVPSEEVVKKMKNYWRQLLNAKLITQRKFDNLTKAERGGLSELDKAGFIKRQLVETRQITKHVAQILDSRMNTKYDENDKLIREVKVITLKSKLVSDFRKDFQFYKVREINNYHHAHDAYLNAVVGTALIKKYPKLESEFVYGDYKVYDVRKMIAKSEQEIGKATAKYFFYSNIMNFFKTEITLANGEIRKRPLIETNGETGEIVWDKGRDFATVRKVLSMPQVNIVKKTEVQTGGFSKESILPKRNSDKLIARKKDWDPKKYGGFDSPTVAYSVLVVAKVEKGKSKKLKSVKELLGITIMERSSFEKNPIDFLEAKGYKEVKKDLIIKLPKYSLFELENGRKRMLASAGELQKGNELALPSKYVNFLYLASHYEKLKGSPEDNEQKQLFVEQHKHYLDEIIEQISEFSKRVILADANLDKVLSAYNKHRDKPIREQAENIIHLFTLTNLGAPAAFKYFDTTIDRKRYTSTKEVLDATLIHQSITGLYETRIDLSQLGGDGGGGSPAPGGGGGVLNLEEEYRLHEKPVPSSIDPSWLQLFPTVWAERAGMGLANQVPPVVVELRSGASPVAVRQYPMSKEAREGIRPHIQRFLDLGVLVPCQSPWNTPLLPVKKPGTNDYRPVQDLREINKRVQDIHPTVPNPYNLLSSLPPSHTWYSVLDLKDAFFCLKLHPNSQPLFAFEWRDPEKGNTGQLTWTRLPQGFKNSPTLFDEALHRDLAPFRALNPQVVLLQYVDDLLVAAPTYRDCKEGTQKLLQELSKLGYRVSAKKAQLCQKEVTYLGYLLKEGKRWLTPARKATVMKIPPPTTPRQVREFLGTAGFCRLWIPGFASLAAPLYPLTKESIPFIWTEEHQKAFDRIKEALLSAPALALPDLTKPFTLYVDERAGVARGVLTQTLGPWRRPVAYLSKKLDPVASGWPTCLKAVAAVALLLKDADKLTLGQNVTVIASHSLESIVRQPPDRWMTNARMTHYQSLLLNERVSFAPPAVLNPATLLPVESEATPVHRCSEILAEETGTRRDLKDQPLPGVPAWYTDGSSFIAEGKRRAGAAIVDGKRTVWASSLPEGTSAQKAELVALTQALRLAEGKDINIYTDSRYAFATAHIHGAIYKQRGLLTSAGKDIKNKEEILALLEAIHLPKRVAIIHCPGHQKGNDPVATGNRRADEAAKQAALSTRVLAETTKPAGKRTADGSEFEKRTADGSEFESPKKKAKVE

SEQ ID NO: 6993 - protein, 2100 aa, synthetic construct
MPAAKRVKLDGGDKKYSIGLDIGTNSVGWAVITDEYKVPSKKFKVLGNTDRHSIKKNLIGALLFDSGETAEATRLKRTARRRYTRRKNRICYLQEIFSNEMAKVDDSFFHRLEESFLVEEDKKHERHPIFGNIVDEVAYHEKYPTIYHLRKKLVDSTDKADLRLIYLALAHMIKFRGHFLIEGDLNPDNSDVDKLFIQLVQTYNQLFEENPINASGVDAKAILSARLSKSRRLENLIAQLPGEKKNGLFGNLIALSLGLTPNFKSNFDLAEDAKLQLSKDTYDDDLDNLLAQIGDQYADLFLAAKNLSDAILLSDILRVNTEITKAPLSASMIKRYDEHHQDLTLLKALVRQQLPEKYKEIFFDQSKNGYAGYIDGGASQEEFYKFIKPILEKMDGTEELLVKLNREDLLRKQRTFDNGSIPHQIHLGELHAILRRQEDFYPFLKDNREKIEKILTFRIPYYVGPLARGNSRFAWMTRKSEETITPWNFEEVVDKGASAQSFIERMTNFDKNLPNEKVLPKHSLLYEYFTVYNELTKVKYVTEGMRKPAFLSGEQKKAIVDLLFKTNRKVTVKQLKEDYFKKIECFDSVEISGVEDRFNASLGTYHDLLKIIKDKDFLDNEENEDILEDIVLTLTLFEDREMIEERLKTYAHLFDDKVMKQLKRRRYTGWGRLSRKLINGIRDKQSGKTILDFLKSDGFANRNFMQLIHDDSLTFKEDIQKAQVSGQGDSLHEHIANLAGSPAIKKGILQTVKVVDELVKVMGRHKPENIVIEMARENQTTQKGQKNSRERMKRIEEGIKELGSQILKEHPVENTQLQNEKLYLYYLQNGRDMYVDQELDINRLSDYDVDHIVPQSFLKDDSIDNKVLTRSDKARGKSDNVPSEEVVKKMKNYWRQLLNAKLITQRKFDNLTKAERGGLSELDKAGFIKRQLVETRQITKHVAQILDSRMNTKYDENDKLIREVKVITLKSKLVSDFRKDFQFYKVREINNYHHAHDAYLNAVVGTALIKKYPKLESEFVYGDYKVYDVRKMIAKSEQEIGKATAKYFFYSNIMNFFKTEITLANGEIRKRPLIETNGETGEIVWDKGRDFATVRKVLSMPQVNIVKKTEVQTGGFSKESILPKRNSDKLIARKKDWDPKKYGGFDSPTVAYSVLVVAKVEKGKSKKLKSVKELLGITIMERSSFEKNPIDFLEAKGYKEVKKDLIIKLPKYSLFELENGRKRMLASAGELQKGNELALPSKYVNFLYLASHYEKLKGSPEDNEQKQLFVEQHKHYLDEIIEQISEFSKRVILADANLDKVLSAYNKHRDKPIREQAENIIHLFTLTNLGAPAAFKYFDTTIDRKRYTSTKEVLDATLIHQSITGLYETRIDLSQLGGDGGGGGGGSPAPGGTVSLQDEHRLFDIPVTTSLPDVWLQDFPQAWAETGGLGRAKCQAPIIIDLKPTAVPVSIKQYPMSLEAHMGIRQHIIKFLELGVLRPCRSPWNTPLLPVKKPGTQDYRPVQDLREINKRTVDIHPTVPNPYNLLSTLKPDYSWYTVLDLKDAFFCLPLAPQSQELFAFEWKDPERGISGQLTWTRLPQGFKNSPTLFNEALHRDLTDFRTQHPEVTLLQYVDDLLLAAPTKKACTQGTRHLLQELGEKGYRASAKKAQICQTKVTYLGYILSEGKRWLTPGRIETVARIPPPRNPREVREFLGTAGFCRLWIPGFAELAAPLYALTKPSTPFTWQTEHQLAFEALKKALLSAPALGLPDTSKPFTLFLDERQGIAKGVLTQKLGPWKRPVAYLSKKLDPVAAGWPPCLRIMAATAMLVKDSAKLTLGQPLTVITPHTLEAIVRQPPDRWITNARLTHYQALLLDTDRVQFGPPVTLNPATLLPVPENQPSPHDCRQVLAETHGTREDLKDQELPDADHTWYTDGSSYLDSGTRRAGAAVVDGHNTIWAQSLPPGTSAQKAELIALTKALELSKGKKANIYTDSRYAFATAHTHGSIYERRGWLTSEGKEIKNKAEIIALLKALFLPQEVAIIHCPGHQKGQDPVAVGNRQADRVARQAAMAEVLTLATEPDNTSHITAGKRTADGSEFEKRTADGSEFESPKKKAKVE

SEQ ID NO: 6994 - protein, 2171 aa, synthetic construct
MPAAKRVKLDGGDKKYSIGLDIGTNSVGWAVITDEYKVPSKKFKVLGNTDRHSIKKNLIGALLFDSGETAEATRLKRTARRRYTRRKNRICYLQEIFSNEMAKVDDSFFHRLEESFLVEEDKKHERHPIFGNIVDEVAYHEKYPTIYHLRKKLVDSTDKADLRLIYLALAHMIKFRGHFLIEGDLNPDNSDVDKLFIQLVQTYNQLFEENPINASGVDAKAILSARLSKSRRLENLIAQLPGEKKNGLFGNLIALSLGLTPNFKSNFDLAEDAKLQLSKDTYDDDLDNLLAQIGDQYADLFLAAKNLSDAILLSDILRVNTEITKAPLSASMIKRYDEHHQDLTLLKALVRQQLPEKYKEIFFDQSKNGYAGYIDGGASQEEFYKFIKPILEKMDGTEELLVKLNREDLLRKQRTFDNGSIPHQIHLGELHAILRRQEDFYPFLKDNREKIEKILTFRIPYYVGPLARGNSRFAWMTRKSEETITPWNFEEVVDKGASAQSFIERMTNFDKNLPNEKVLPKHSLLYEYFTVYNELTKVKYVTEGMRKPAFLSGEQKKAIVDLLFKTNRKVTVKQLKEDYFKKIECFDSVEISGVEDRFNASLGTYHDLLKIIKDKDFLDNEENEDILEDIVLTLTLFEDREMIEERLKTYAHLFDDKVMKQLKRRRYTGWGRLSRKLINGIRDKQSGKTILDFLKSDGFANRNFMQLIHDDSLTFKEDIQKAQVSGQGDSLHEHIANLAGSPAIKKGILQTVKVVDELVKVMGRHKPENIVIEMARENQTTQKGQKNSRERMKRIEEGIKELGSQILKEHPVENTQLQNEKLYLYYLQNGRDMYVDQELDINRLSDYDVDHIVPQSFLKDDSIDNKVLTRSDKARGKSDNVPSEEVVKKMKNYWRQLLNAKLITQRKFDNLTKAERGGLSELDKAGFIKRQLVETRQITKHVAQILDSRMNTKYDENDKLIREVKVITLKSKLVSDFRKDFQFYKVREINNYHHAHDAYLNAVVGTALIKKYPKLESEFVYGDYKVYDVRKMIAKSEQEIGKATAKYFFYSNIMNFFKTEITLANGEIRKRPLIETNGETGEIVWDKGRDFATVRKVLSMPQVNIVKKTEVQTGGFSKESILPKRNSDKLIARKKDWDPKKYGGFDSPTVAYSVLVVAKVEKGKSKKLKSVKELLGITIMERSSFEKNPIDFLEAKGYKEVKKDLIIKLPKYSLFELENGRKRMLASAGELQKGNELALPSKYVNFLYLASHYEKLKGSPEDNEQKQLFVEQHKHYLDEIIEQISEFSKRVILADANLDKVLSAYNKHRDKPIREQAENIIHLFTLTNLGAPAAFKYFDTTIDRKRYTSTKEVLDATLIHQSITGLYETRIDLSQLGGDGGGGGGGSPAPGGMDLLKPLTVERKGVKIKGYWNSQADITCVPKDLLQGEEPVRQQNVTTIHGTQEGDVYYVNLKIDGRRINTEVIGTTLDYAIITPGDVPWILKKPLELTIKLDLEEQQGTLLNNSILSKKGKEELKQLFEKYSALWQSWENQVGHRRIRPHKIATGTVKPTPQKQYHINPKAKPDIQIVINDLLKQGVLIQKESTMNTPVYPVPKPNGRWRMVLDYRAVNKVTPLIAVQNQHSYGILGSLFKGRYKTTIDLSNGFWAHPIVPEDYWITAFTWQGKQYCWTVLPQGFLNSPGLFTGDVVDLLQGIPNVEVYVDDVYISHDSEKEHLEYLDILFNRLKEAGYIISLKKSNIANSIVDFLGFQITNEGRGLTDTFKEKLENITAPTTLKQLQSILGLLNFARNFIPDFTELIAPLYALIPKSTKNYVPWQIEHSTTLETLITKLNGAEYLQGRKGDKTLIMKVNASYTTGYIRYYNEGEKKPISYVSIVFSKTELKFTELEKLLTTVHKGLLKALDLSMGQNIHVYSPIVSMQNIQKTPQTAKKALASRWLSWLSYLEDPRIRFFYDPQMPALKDLPAVDTGKDNKKHPSNFQHIFYTDGSAITSPTKEGHLNAGMGIVYFINKDGNLQKQQEWSISLGNHTAQFAEIAAFEFALKKCLPLGGNILVVTDSNYVAKAYNEELDVWASNGFVNNRKKPLKHISKWKSVADLKRLRPDVVVTHEPGHQKLDSSPHAYGNNLADQLATQASFKVHAGKRTADGSEFEKRTADGSEFESPKKKAKVE

SEQ ID NO: 6995 - protein, 2093 aa, synthetic construct
MPAAKRVKLDGGDKKYSIGLDIGTNSVGWAVITDEYKVPSKKFKVLGNTDRHSIKKNLIGALLFDSGETAEATRLKRTARRRYTRRKNRICYLQEIFSNEMAKVDDSFFHRLEESFLVEEDKKHERHPIFGNIVDEVAYHEKYPTIYHLRKKLVDSTDKADLRLIYLALAHMIKFRGHFLIEGDLNPDNSDVDKLFIQLVQTYNQLFEENPINASGVDAKAILSARLSKSRRLENLIAQLPGEKKNGLFGNLIALSLGLTPNFKSNFDLAEDAKLQLSKDTYDDDLDNLLAQIGDQYADLFLAAKNLSDAILLSDILRVNTEITKAPLSASMIKRYDEHHQDLTLLKALVRQQLPEKYKEIFFDQSKNGYAGYIDGGASQEEFYKFIKPILEKMDGTEELLVKLNREDLLRKQRTFDNGSIPHQIHLGELHAILRRQEDFYPFLKDNREKIEKILTFRIPYYVGPLARGNSRFAWMTRKSEETITPWNFEEVVDKGASAQSFIERMTNFDKNLPNEKVLPKHSLLYEYFTVYNELTKVKYVTEGMRKPAFLSGEQKKAIVDLLFKTNRKVTVKQLKEDYFKKIECFDSVEISGVEDRFNASLGTYHDLLKIIKDKDFLDNEENEDILEDIVLTLTLFEDREMIEERLKTYAHLFDDKVMKQLKRRRYTGWGRLSRKLINGIRDKQSGKTILDFLKSDGFANRNFMQLIHDDSLTFKEDIQKAQVSGQGDSLHEHIANLAGSPAIKKGILQTVKVVDELVKVMGRHKPENIVIEMARENQTTQKGQKNSRERMKRIEEGIKELGSQILKEHPVENTQLQNEKLYLYYLQNGRDMYVDQELDINRLSDYDVDHIVPQSFLKDDSIDNKVLTRSDKARGKSDNVPSEEVVKKMKNYWRQLLNAKLITQRKFDNLTKAERGGLSELDKAGFIKRQLVETRQITKHVAQILDSRMNTKYDENDKLIREVKVITLKSKLVSDFRKDFQFYKVREINNYHHAHDAYLNAVVGTALIKKYPKLESEFVYGDYKVYDVRKMIAKSEQEIGKATAKYFFYSNIMNFFKTEITLANGEIRKRPLIETNGETGEIVWDKGRDFATVRKVLSMPQVNIVKKTEVQTGGFSKESILPKRNSDKLIARKKDWDPKKYGGFDSPTVAYSVLVVAKVEKGKSKKLKSVKELLGITIMERSSFEKNPIDFLEAKGYKEVKKDLIIKLPKYSLFELENGRKRMLASAGELQKGNELALPSKYVNFLYLASHYEKLKGSPEDNEQKQLFVEQHKHYLDEIIEQISEFSKRVILADANLDKVLSAYNKHRDKPIREQAENIIHLFTLTNLGAPAAFKYFDTTIDRKRYTSTKEVLDATLIHQSITGLYETRIDLSQLGGDGGGGGGGSPAPGGTLQLEEEYRLFEPESTQKQEMDIWLKNFPQAWAETGGMGTAHCQAPVLIQLKATATPISIRQYPMPHEAYQGIKPHIRRMLDQGILKPCQSPWNTPLLPVKKPGTEDYRPVQDLREVNKRVEDIHPTVPNPYNLLSTLPPSHPWYTVLDLKDAFFCLRLHSESQLLFAFEWRDPEIGLSGQLTWTRLPQGFKNSPTLFDEALHSDLADFRVRYPALVLLQYVDDLLLAAATRTECLEGTKALLETLGNKGYRASAKKAQICLQEVTYLGYSLKDGQRWLTKARKEAILSIPVPKNSRQVREFLGTAGYCRLWIPGFAELAAPLYPLTRPGTLFQWGTEQQLAFEDIKKALLSSPALGLPDITKPFELFIDENSGFAKGVLVQKLGPWKRPVAYLSKKLDTVASGWPPCLRMVAAIAILVKDAGKLTLGQPLTILTSHPVEALVRQPPNKWLSNARMTHYQAMLLDAERVHFGPTVSLNPATLLPLPSGGNHHDCLQILAETHGTRPDLTDQPLPDADLTWYTDGSSFIRNGEREAGAAVTTESEVIWAAPLPPGTSAQRAELIALTQALKMAEGKKLTVYTDSRYAFATTHVHGEIYRRRGLLTSEGKEIKNKNEILALLEALFLPKRLSIIHCPGHQKGDSPQAKGNRLADDTAKKAATETHSSLTVLPAGKRTADGSEFEKRTADGSEFESPKKKAKVE

SEQ ID NO: 6996 - protein, 2085 aa, synthetic construct
MPAAKRVKLDGGDKKYSIGLDIGTNSVGWAVITDEYKVPSKKFKVLGNTDRHSIKKNLIGALLFDSGETAEATRLKRTARRRYTRRKNRICYLQEIFSNEMAKVDDSFFHRLEESFLVEEDKKHERHPIFGNIVDEVAYHEKYPTIYHLRKKLVDSTDKADLRLIYLALAHMIKFRGHFLIEGDLNPDNSDVDKLFIQLVQTYNQLFEENPINASGVDAKAILSARLSKSRRLENLIAQLPGEKKNGLFGNLIALSLGLTPNFKSNFDLAEDAKLQLSKDTYDDDLDNLLAQIGDQYADLFLAAKNLSDAILLSDILRVNTEITKAPLSASMIKRYDEHHQDLTLLKALVRQQLPEKYKEIFFDQSKNGYAGYIDGGASQEEFYKFIKPILEKMDGTEELLVKLNREDLLRKQRTFDNGSIPHQIHLGELHAILRRQEDFYPFLKDNREKIEKILTFRIPYYVGPLARGNSRFAWMTRKSEETITPWNFEEVVDKGASAQSFIERMTNFDKNLPNEKVLPKHSLLYEYFTVYNELTKVKYVTEGMRKPAFLSGEQKKAIVDLLFKTNRKVTVKQLKEDYFKKIECFDSVEISGVEDRFNASLGTYHDLLKIIKDKDFLDNEENEDILEDIVLTLTLFEDREMIEERLKTYAHLFDDKVMKQLKRRRYTGWGRLSRKLINGIRDKQSGKTILDFLKSDGFANRNFMQLIHDDSLTFKEDIQKAQVSGQGDSLHEHIANLAGSPAIKKGILQTVKVVDELVKVMGRHKPENIVIEMARENQTTQKGQKNSRERMKRIEEGIKELGSQILKEHPVENTQLQNEKLYLYYLQNGRDMYVDQELDINRLSDYDVDHIVPQSFLKDDSIDNKVLTRSDKARGKSDNVPSEEVVKKMKNYWRQLLNAKLITQRKFDNLTKAERGGLSELDKAGFIKRQLVETRQITKHVAQILDSRMNTKYDENDKLIREVKVITLKSKLVSDFRKDFQFYKVREINNYHHAHDAYLNAVVGTALIKKYPKLESEFVYGDYKVYDVRKMIAKSEQEIGKATAKYFFYSNIMNFFKTEITLANGEIRKRPLIETNGETGEIVWDKGRDFATVRKVLSMPQVNIVKKTEVQTGGFSKESILPKRNSDKLIARKKDWDPKKYGGFDSPTVAYSVLVVAKVEKGKSKKLKSVKELLGITIMERSSFEKNPIDFLEAKGYKEVKKDLIIKLPKYSLFELENGRKRMLASAGELQKGNELALPSKYVNFLYLASHYEKLKGSPEDNEQKQLFVEQHKHYLDEIIEQISEFSKRVILADANLDKVLSAYNKHRDKPIREQAENIIHLFTLTNLGAPAAFKYFDTTIDRKRYTSTKEVLDATLIHQSITGLYETRIDLSQLGGDGGGGGGGSPAPGGVPWLTQQPLQLTILVPLQEYQEKILSKTALPEDQKQQLKTLFVKYDNLWQHWENQVGHRKIRPHNIATGDYPPRPQKQYPINPKAKPSIQIVIDDLLKQGVLTPQNSTMNTPVYPVPKPDGRWRMVLDYREVNKTIPLTAAQNQHSAGILATIVRQKYKTTLDLANGFWAHPITPESYWLTAFTWQGKQYCWTRLPQGFLNSPALFNADVVDLLKEIPNVQVYVDDIYLSHDDPKEHVQQLEKVFQILLQAGYVVSLKKSEIGQKTVEFLGFNITKEGRGLTDTFKTKLLNITPPKDLKQLQSILGLLNFARNFIPNFAELVQPLYNLIAPAKGKYIEWSEENTKQLNMVIEALNTASNLEERLPEQRLVIKVNTSPSAGYVRYYNETGKKPIMYLNYVFSKAELKFSMLEKLLTTMHKALIKAMDLAMGQEILVYSPIVSMTKIQKTPLPERKALPIRWITWMTYLEDPRIQFHYDKTLPELKHIPDVYTSSQSPVKHPSQYEGVFYTDGSAIKSPDPTKSNNAGMGIVHATYKPEYQVLNQWSIPLGNHTAQMAEIAAVEFACKKALKIPGPVLVITDSFYVAESANKELPYWKSNGFVNNKKKPLKHISKWKSIAECLSMKPDITIQHEKGISLQIPVFILKGNALADKLATQGSYVVNAGKRTADGSEFEKRTADGSEFESPKKKAKVE

SEQ ID NO: 6997 - protein, 2085 aa, synthetic construct
MPAAKRVKLDGGDKKYSIGLDIGTNSVGWAVITDEYKVPSKKFKVLGNTDRHSIKKNLIGALLFDSGETAEATRLKRTARRRYTRRKNRICYLQEIFSNEMAKVDDSFFHRLEESFLVEEDKKHERHPIFGNIVDEVAYHEKYPTIYHLRKKLVDSTDKADLRLIYLALAHMIKFRGHFLIEGDLNPDNSDVDKLFIQLVQTYNQLFEENPINASGVDAKAILSARLSKSRRLENLIAQLPGEKKNGLFGNLIALSLGLTPNFKSNFDLAEDAKLQLSKDTYDDDLDNLLAQIGDQYADLFLAAKNLSDAILLSDILRVNTEITKAPLSASMIKRYDEHHQDLTLLKALVRQQLPEKYKEIFFDQSKNGYAGYIDGGASQEEFYKFIKPILEKMDGTEELLVKLNREDLLRKQRTFDNGSIPHQIHLGELHAILRRQEDFYPFLKDNREKIEKILTFRIPYYVGPLARGNSRFAWMTRKSEETITPWNFEEVVDKGASAQSFIERMTNFDKNLPNEKVLPKHSLLYEYFTVYNELTKVKYVTEGMRKPAFLSGEQKKAIVDLLFKTNRKVTVKQLKEDYFKKIECFDSVEISGVEDRFNASLGTYHDLLKIIKDKDFLDNEENEDILEDIVLTLTLFEDREMIEERLKTYAHLFDDKVMKQLKRRRYTGWGRLSRKLINGIRDKQSGKTILDFLKSDGFANRNFMQLIHDDSLTFKEDIQKAQVSGQGDSLHEHIANLAGSPAIKKGILQTVKVVDELVKVMGRHKPENIVIEMARENQTTQKGQKNSRERMKRIEEGIKELGSQILKEHPVENTQLQNEKLYLYYLQNGRDMYVDQELDINRLSDYDVDHIVPQSFLKDDSIDNKVLTRSDKARGKSDNVPSEEVVKKMKNYWRQLLNAKLITQRKFDNLTKAERGGLSELDKAGFIKRQLVETRQITKHVAQILDSRMNTKYDENDKLIREVKVITLKSKLVSDFRKDFQFYKVREINNYHHAHDAYLNAVVGTALIKKYPKLESEFVYGDYKVYDVRKMIAKSEQEIGKATAKYFFYSNIMNFFKTEITLANGEIRKRPLIETNGETGEIVWDKGRDFATVRKVLSMPQVNIVKKTEVQTGGFSKESILPKRNSDKLIARKKDWDPKKYGGFDSPTVAYSVLVVAKVEKGKSKKLKSVKELLGITIMERSSFEKNPIDFLEAKGYKEVKKDLIIKLPKYSLFELENGRKRMLASAGELQKGNELALPSKYVNFLYLASHYEKLKGSPEDNEQKQLFVEQHKHYLDEIIEQISEFSKRVILADANLDKVLSAYNKHRDKPIREQAENIIHLFTLTNLGAPAAFKYFDTTIDRKRYTSTKEVLDATLIHQSITGLYETRIDLSQLGGDGGGGGGGSPAPGGVPWLTQQPLQLTILVPLQEYQEKILSKTALPEDQKQQLKTLFVKYDNLWQHWENQVGHRKIRPHNIATGDYPPRPQKQYPINPKAKPSIQIVIDDLLKQGVLTPQNSTMNTPVYPVPKPDGRWRMVLDYREVNKTIPLTAAQNQHSAGILATIVRQKYKTTLDLANGFWAHPITPESYWLTAFTWQGKQYCWTRLPQGFLNSPALFNADVVDLLKEIPNVQVYVDDIYLSHDDPKEHVQQLEKVFQILLQAGYVVSLKKSEIGQKTVEFLGFNITKEGRGLTDTFKTKLLNITPPKDLKQLQSILGKLNFARNFIPNFAELVQPLYNLIAPAKGKYIEWSEENTKQLNMVIEALNTASNLEERLPEQRLVIKVNTSPSAGYVRYYNETGKKPIMYLNYVFSKAELKFSMLEKLLTTMHKALIKAMDLAMGQEILVYSPIVSMTKIQKTPLPERKALPIRWITWMTYLEDPRIQFHYDKTLPELKHIPDVYTSSQSPVKHPSQYEGVFYTDGSAIKSPDPTKSNNAGMGIVHATYKPEYQVLNQWSIPLGNHTAQMAEIAAVEFACKKALKIPGPVLVITDSFYVAESANKELPYWKSNGFVNNKKKPLKHISKWKSIAECLSMKPDITIQHEKGISLQIPVFILKGNALADKLATQGSYVVNAGKRTADGSEFEKRTADGSEFESPKKKAKVE

SEQ ID NO: 6998 - protein, 2094 aa, synthetic construct; identical to SEQ ID NO: 4520

SEQ ID NO: 6999 - protein, 2094 aa, synthetic construct
MPAAKRVKLDGGDKKYSIGLDIGTNSVGWAVITDEYKVPSKKFKVLGNTDRHSIKKNLIGALLFDSGETAEATRLKRTARRRYTRRKNRICYLQEIFSNEMAKVDDSFFHRLEESFLVEEDKKHERHPIFGNIVDEVAYHEKYPTIYHLRKKLVDSTDKADLRLIYLALAHMIKFRGHFLIEGDLNPDNSDVDKLFIQLVQTYNQLFEENPINASGVDAKAILSARLSKSRRLENLIAQLPGEKKNGLFGNLIALSLGLTPNFKSNFDLAEDAKLQLSKDTYDDDLDNLLAQIGDQYADLFLAAKNLSDAILLSDILRVNTEITKAPLSASMIKRYDEHHQDLTLLKALVRQQLPEKYKEIFFDQSKNGYAGYIDGGASQEEFYKFIKPILEKMDGTEELLVKLNREDLLRKQRTFDNGSIPHQIHLGELHAILRRQEDFYPFLKDNREKIEKILTFRIPYYVGPLARGNSRFAWMTRKSEETITPWNFEEVVDKGASAQSFIERMTNFDKNLPNEKVLPKHSLLYEYFTVYNELTKVKYVTEGMRKPAFLSGEQKKAIVDLLFKTNRKVTVKQLKEDYFKKIECFDSVEISGVEDRFNASLGTYHDLLKIIKDKDFLDNEENEDILEDIVLTLTLFEDREMIEERLKTYAHLFDDKVMKQLKRRRYTGWGRLSRKLINGIRDKQSGKTILDFLKSDGFANRNFMQLIHDDSLTFKEDIQKAQVSGQGDSLHEHIANLAGSPAIKKGILQTVKVVDELVKVMGRHKPENIVIEMARENQTTQKGQKNSRERMKRIEEGIKELGSQILKEHPVENTQLQNEKLYLYYLQNGRDMYVDQELDINRLSDYDVDHIVPQSFLKDDSIDNKVLTRSDKARGKSDNVPSEEVVKKMKNYWRQLLNAKLITQRKFDNLTKAERGGLSELDKAGFIKRQLVETRQITKHVAQILDSRMNTKYDENDKLIREVKVITLKSKLVSDFRKDFQFYKVREINNYHHAHDAYLNAVVGTALIKKYPKLESEFVYGDYKVYDVRKMIAKSEQEIGKATAKYFFYSNIMNFFKTEITLANGEIRKRPLIETNGETGEIVWDKGRDFATVRKVLSMPQVNIVKKTEVQTGGFSKESILPKRNSDKLIARKKDWDPKKYGGFDSPTVAYSVLVVAKVEKGKSKKLKSVKELLGITIMERSSFEKNPIDFLEAKGYKEVKKDLIIKLPKYSLFELENGRKRMLASAGELQKGNELALPSKYVNFLYLASHYEKLKGSPEDNEQKQLFVEQHKHYLDEIIEQISEFSKRVILADANLDKVLSAYNKHRDKPIREQAENIIHLFTLTNLGAPAAFKYFDTTIDRKRYTSTKEVLDATLIHQSITGLYETRIDLSQLGGDGGGGGGGSPAPGGTLGIEDEYRLHETSTEPDVSLGSTWLSDFPQAWAETGGMGLAVRQAPLIIPLKATSTPVSIQQYPMSHEARLGIKPHIQRLLDQGILVPCQSPWNTPLLPVKKPGTNDYRPVQDLREVNKRVEDIHPTVPNPYNLLSGLPPSHQWYTVLDLKDAFFCLRLHPTSQPLFAFEWRDPGMGISGQLTWTRLPQGFKNSPTLFNEALHRDLADFRIQHPDLILLQYVDDILLAATSELDCQQGTRALLQTLGDLGYRASAKKAQICQKQVKYLGYLLREGQRWLTEARKETVMGQPVPKTPRQLREFLGTAGFCRLWIPGFAEMAAPLYPLTKPGTLFSWGPDQQKAYQEIKQALLTAPALGLPDLTKPFELFVDEKQGYAKGVLTQKLGPWRRPVAYLSKKLDPVAAGWPPCLRMVAAIAVLTKDAGKLTMGQPLVILAPHAVEALVKQPPDRWLSNARMTHYQAMLLDTDRVQFGPVVALNPATLLPLPEEGAPHDCLEILAETHGTRPDLTDQPIPDADHTWYTDGSSFLQEGQRKAGAAVTTETEVIWAGALPAGTSAQRAELIALTQALKMAEGKRLNVYTDSRYAFATAHIHGEIYRRRGWLTSEGREIKNKSEILALLKALFLPKRLSIIHCLGHQKGDSAEARGNRLADQAAREAAIKTPPDTSTLLAGKRTADGSEFEKRTADGSEFESPKKKAKVE

SEQ ID NO: 7000 - protein, 2094 aa, synthetic construct
MPAAKRVKLDGGDKKYSIGLDIGTNSVGWAVITDEYKVPSKKFKVLGNTDRHSIKKNLIGALLFDSGETAEATRLKRTARRRYTRRKNRICYLQEIFSNEMAKVDDSFFHRLEESFLVEEDKKHERHPIFGNIVDEVAYHEKYPTIYHLRKKLVDSTDKADLRLIYLALAHMIKFRGHFLIEGDLNPDNSDVDKLFIQLVQTYNQLFEENPINASGVDAKAILSARLSKSRRLENLIAQLPGEKKNGLFGNLIALSLGLTPNFKSNFDLAEDAKLQLSKDTYDDDLDNLLAQIGDQYADLFLAAKNLSDAILLSDILRVNTEITKAPLSASMIKRYDEHHQDLTLLKALVRQQLPEKYKEIFFDQSKNGYAGYIDGGASQEEFYKFIKPILEKMDGTEELLVKLNREDLLRKQRTFDNGSIPHQIHLGELHAILRRQEDFYPFLKDNREKIEKILTFRIPYYVGPLARGNSRFAWMTRKSEETITPWNFEEVVDKGASAQSFIERMTNFDKNLPNEKVLPKHSLLYEYFTVYNELTKVKYVTEGMRKPAFLSGEQKKAIVDLLFKTNRKVTVKQLKEDYFKKIECFDSVEISGVEDRFNASLGTYHDLLKIIKDKDFLDNEENEDILEDIVLTLTLFEDREMIEERLKTYAHLFDDKVMKQLKRRRYTGWGRLSRKLINGIRDKQSGKTILDFLKSDGFANRNFMQLIHDDSLTFKEDIQKAQVSGQGDSLHEHIANLAGSPAIKKGILQTVKVVDELVKVMGRHKPENIVIEMARENQTTQKGQKNSRERMKRIEEGIKELGSQILKEHPVENTQLQNEKLYLYYLQNGRDMYVDQELDINRLSDYDVDHIVPQSFLKDDSIDNKVLTRSDKARGKSDNVPSEEVVKKMKNYWRQLLNAKLITQRKFDNLTKAERGGLSELDKAGFIKRQLVETRQITKHVAQILDSRMNTKYDENDKLIREVKVITLKSKLVSDFRKDFQFYKVREINNYHHAHDAYLNAVVGTALIKKYPKLESEFVYGDYKVYDVRKMIAKSEQEIGKATAKYFFYSNIMNFFKTEITLANGEIRKRPLIETNGETGEIVWDKGRDFATVRKVLSMPQVNIVKKTEVQTGGFSKESILPKRNSDKLIARKKDWDPKKYGGFDSPTVAYSVLVVAKVEKGKSKKLKSVKELLGITIMERSSFEKNPIDFLEAKGYKEVKKDLIIKLPKYSLFELENGRKRMLASAGELQKGNELALPSKYVNFLYLASHYEKLKGSPEDNEQKQLFVEQHKHYLDEIIEQISEFSKRVILADANLDKVLSAYNKHRDKPIREQAENIIHLFTLTNLGAPAAFKYFDTTIDRKRYTSTKEVLDATLIHQSITGLYETRIDLSQLGGDGGGGGGGSPAPGGTLNIEDEYRLHETSKEPDVSLGSTWLSDFPQAWAETGGMGLAVRQAPLIIPLKATSTPVSIKQYPMSQEARLGIKPHIQRLLDQGILVPCQSPWNTPLLPVKKPGTNDYRPVQDLREVNKRVEDIHPTVPNPYNLLSGLPPSHQWYTVLDLKDAFFCLRLHPTSQPLFAFEWRDPEMGISGQLTWTRLPQGFKNSPTLFDEALHRDLAGFRIQHPDLILLQYVDDLLLAATSELDCQQGTRALLQTLGDLGYRASAKKAQICQKQVKYLGYLLKEGQRWLTEARKETVMGQPIPKTPRQLREFLGTAGFCRLWIPGFAEMAAPLYPLTKTGTLFNWGPDQQKAFQEIKQALLTAPALGLPDLTKPFELFVDEKQGYAKGVLTQKLGPWRRPVAYLSKKLDPVAAGWPPCLRMVAAIAVLTKDAGKLTMGQPLVILAPHAVEALVKQPPDRWLSNARMTHYQALLLDTDRVQFGPVVALNPATLLPLPEEGLQHDCLDILAEAHGTRSDLMDQPLPDADHTWYTDGSSFLQEGQRKAGAAVTTETEVIWARALPAGTSAQRAELIALTQALKMAEGKKLNVYTDSRYAFATAHIHGEIYRRRGLLTSEGKEIKNKDEILALLKALFLPKRLSIIHCPGHQKGNSAEARGNRMADQAAREVATRETPETSTLLAGKRTADGSEFEKRTADGSEFESPKKKAKVE

SEQ ID NO: 7001 - protein, 2094 aa, synthetic construct
MPAAKRVKLDGGDKKYSIGLDIGTNSVGWAVITDEYKVPSKKFKVLGNTDRHSIKKNLIGALLFDSGETAEATRLKRTARRRYTRRKNRICYLQEIFSNEMAKVDDSFFHRLEESFLVEEDKKHERHPIFGNIVDEVAYHEKYPTIYHLRKKLVDSTDKADLRLIYLALAHMIKFRGHFLIEGDLNPDNSDVDKLFIQLVQTYNQLFEENPINASGVDAKAILSARLSKSRRLENLIAQLPGEKKNGLFGNLIALSLGLTPNFKSNFDLAEDAKLQLSKDTYDDDLDNLLAQIGDQYADLFLAAKNLSDAILLSDILRVNTEITKAPLSASMIKRYDEHHQDLTLLKALVRQQLPEKYKEIFFDQSKNGYAGYIDGGASQEEFYKFIKPILEKMDGTEELLVKLNREDLLRKQRTFDNGSIPHQIHLGELHAILRRQEDFYPFLKDNREKIEKILTFRIPYYVGPLARGNSRFAWMTRKSEETITPWNFEEVVDKGASAQSFIERMTNFDKNLPNEKVLPKHSLLYEYFTVYNELTKVKYVTEGMRKPAFLSGEQKKAIVDLLFKTNRKVTVKQLKEDYFKKIECFDSVEISGVEDRFNASLGTYHDLLKIIKDKDFLDNEENEDILEDIVLTLTLFEDREMIEERLKTYAHLFDDKVMKQLKRRRYTGWGRLSRKLINGIRDKQSGKTILDFLKSDGFANRNFMQLIHDDSLTFKEDIQKAQVSGQGDSLHEHIANLAGSPAIKKGILQTVKVVDELVKVMGRHKPENIVIEMARENQTTQKGQKNSRERMKRIEEGIKELGSQILKEHPVENTQLQNEKLYLYYLQNGRDMYVDQELDINRLSDYDVDHIVPQSFLKDDSIDNKVLTRSDKARGKSDNVPSEEVVKKMKNYWRQLLNAKLITQRKFDNLTKAERGGLSELDKAGFIKRQLVETRQITKHVAQILDSRMNTKYDENDKLIREVKVITLKSKLVSDFRKDFQFYKVREINNYHHAHDAYLNAVVGTALIKKYPKLESEFVYGDYKVYDVRKMIAKSEQEIGKATAKYFFYSNIMNFFKTEITLANGEIRKRPLIETNGETGEIVWDKGRDFATVRKVLSMPQVNIVKKTEVQTGGFSKESILPKRNSDKLIARKKDWDPKKYGGFDSPTVAYSVLVVAKVEKGKSKKLKSVKELLGITIMERSSFEKNPIDFLEAKGYKEVKKDLIIKLPKYSLFELENGRKRMLASAGELQKGNELALPSKYVNFLYLASHYEKLKGSPEDNEQKQLFVEQHKHYLDEIIEQISEFSKRVILADANLDKVLSAYNKHRDKPIREQAENIIHLFTLTNLGAPAAFKYFDTTIDRKRYTSTKEVLDATLIHQSITGLYETRIDLSQLGGDGGGGGGGSPAPGGTLNIEDEYRLHETSKEPDVSLGSTWLSDFPQAWAETGGMGLAVRQAPLIIPLKATSTPVSIKQYPMSQEARLGIKPHIQRLLDQGILVPCQSPWNTPLLPVKKPGTNDYRPVQDLREVNKRVEDIHPTVPNPYNLLSGLPPSHQWYTVLDLKDAFFCLRLHPTSQPLFAFEWRDPEMGISGQLTWTRLPQGFKNSPTLFNEALHRDLAGFRIQHPDLILLQYVDDLLLAATSELDCQQGTRALLQTLGDLGYRASAKKAQICQKQVKYLGYLLKEGQRWLTEARKETVMGQPIPKTPRQLREFLGTAGFCRLWIPGFAEMAAPLYPLTKPGTLFNWGPDQQKAFQEIKQALLTAPALGLPDLTKPFELFVDEKQGYAKGVLTQKLGPWRRPVAYLSKKLDPVAAGWPPCLRMVAAIAVLTKDAGKLTMGQPLVILAPHAVEALVKQPPDRWLSNARMTHYQALLLDTDRVQFGPVVALNPATLLPLPEEGLQHDCLDILAEAHGTRSDLMDQPLPDADHTWYTDGSSFLQEGQRKAGAAVTTETEVIWARALPAGTSAQRAELIALTQALKMAEGKKLNVYTDSRYAFATAHIHGEIYRRRGWLTSEGKEIKNKDEILALLKALFLPKRLSIIHCPGHQKGNSAEARGNRMADQAAREVATRETPETSTLLAGKRTADGSEFEKRTADGSEFESPKKKAKVE

SEQ ID NO: 7002 - protein, 2114 aa, synthetic construct
MPAAKRVKLDGGDKKYSIGLDIGTNSVGWAVITDEYKVPSKKFKVLGNTDRHSIKKNLIGALLFDSGETAEATRLKRTARRRYTRRKNRICYLQEIFSNEMAKVDDSFFHRLEESFLVEEDKKHERHPIFGNIVDEVAYHEKYPTIYHLRKKLVDSTDKADLRLIYLALAHMIKFRGHFLIEGDLNPDNSDVDKLFIQLVQTYNQLFEENPINASGVDAKAILSARLSKSRRLENLIAQLPGEKKNGLFGNLIALSLGLTPNFKSNFDLAEDAKLQLSKDTYDDDLDNLLAQIGDQYADLFLAAKNLSDAILLSDILRVNTEITKAPLSASMIKRYDEHHQDLTLLKALVRQQLPEKYKEIFFDQSKNGYAGYIDGGASQEEFYKFIKPILEKMDGTEELLVKLNREDLLRKQRTFDNGSIPHQIHLGELHAILRRQEDFYPFLKDNREKIEKILTFRIPYYVGPLARGNSRFAWMTRKSEETITPWNFEEVVDKGASAQSFIERMTNFDKNLPNEKVLPKHSLLYEYFTVYNELTKVKYVTEGMRKPAFLSGEQKKAIVDLLFKTNRKVTVKQLKEDYFKKIECFDSVEISGVEDRFNASLGTYHDLLKIIKDKDFLDNEENEDILEDIVLTLTLFEDREMIEERLKTYAHLFDDKVMKQLKRRRYTGWGRLSRKLINGIRDKQSGKTILDFLKSDGFANRNFMQLIHDDSLTFKEDIQKAQVSGQGDSLHEHIANLAGSPAIKKGILQTVKVVDELVKVMGRHKPENIVIEMARENQTTQKGQKNSRERMKRIEEGIKELGSQILKEHPVENTQLQNEKLYLYYLQNGRDMYVDQELDINRLSDYDVDHIVPQSFLKDDSIDNKVLTRSDKARGKSDNVPSEEVVKKMKNYWRQLLNAKLITQRKFDNLTKAERGGLSELDKAGFIKRQLVETRQITKHVAQILDSRMNTKYDENDKLIREVKVITLKSKLVSDFRKDFQFYKVREINNYHHAHDAYLNAVVGTALIKKYPKLESEFVYGDYKVYDVRKMIAKSEQEIGKATAKYFFYSNIMNFFKTEITLANGEIRKRPLIETNGETGEIVWDKGRDFATVRKVLSMPQVNIVKKTEVQTGGFSKESILPKRNSDKLIARKKDWDPKKYGGFDSPTVAYSVLVVAKVEKGKSKKLKSVKELLGITIMERSSFEKNPIDFLEAKGYKEVKKDLIIKLPKYSLFELENGRKRMLASAGELQKGNELALPSKYVNFLYLASHYEKLKGSPEDNEQKQLFVEQHKHYLDEIIEQISEFSKRVILADANLDKVLSAYNKHRDKPIREQAENIIHLFTLTNLGAPAAFKYFDTTIDRKRYTSTKEVLDATLIHQSITGLYETRIDLSQLGGDGGGGGGGSPAPGGVQEISDSRPMLHIYLNGRRFLGLLDTGADKTCIAGRDWPANWPIHQTESSLQGLGMACGVARSSQPLRWQHEDKSGIIHPFVIPTLPFTLWGRDIMKDIKVRLMTDSPDDSQDLMIGAIESNLFADQISWKSDQPVWLNQWPLKQEKLQALQQLVTEQLQLGHLEESNSPWNTPVFVIKKKSGKWRLLQDLRAVNATMHDMGALQPGLPSPVAVPKGWEIIIIDLQDCFFNIKLHPEDCKRFAFSVPSPNFKRPYQRFQWKVLPQGMKNSPTLCQKFVDKAILTVRDKYQDSYIVHYMDDILLAHPSRSIVDEILTSMIQALNKHGLVVSTEKIQKYDNLKYLGTHIQGDSVSYQKLQIRTDKLRTLNDFQKLLGNINWIRPFLKLTTGELKPLFEILNGDSNPISTRKLTPEACKALQLMNERLSTARVKRLDLSQPWSLCILKTEYTPTACLWQDGVVEWIHLPHISPKVITPYDIFCTQLIIKGRHRSKELFSKDPDYIVVPYTKVQFDLLLQEKEDWPISLLGFLGEVHFHLPKDPLLTFTLQTAIIFPHMTSTTPLEKGIVIFTDGSANGRSVTYIQGREPIIKENTQNTAQQAEIVAVITAFEEVSQPFNLYTDSKYVTGLFPEIETATLSPRTKIYTELKHLQRLIHKRQEKFYIGHIRGHTGLPGPLAQGNAYADSLTRILTAAGKRTADGSEFEKRTADGSEFESPKKKAKVE

SEQ ID NO: 7003 - protein, 2088 aa, synthetic construct
MPAAKRVKLDGGDKKYSIGLDIGTNSVGWAVITDEYKVPSKKFKVLGNTDRHSIKKNLIGALLFDSGETAEATRLKRTARRRYTRRKNRICYLQEIFSNEMAKVDDSFFHRLEESFLVEEDKKHERHPIFGNIVDEVAYHEKYPTIYHLRKKLVDSTDKADLRLIYLALAHMIKFRGHFLIEGDLNPDNSDVDKLFIQLVQTYNQLFEENPINASGVDAKAILSARLSKSRRLENLIAQLPGEKKNGLFGNLIALSLGLTPNFKSNFDLAEDAKLQLSKDTYDDDLDNLLAQIGDQYADLFLAAKNLSDAILLSDILRVNTEITKAPLSASMIKRYDEHHQDLTLLKALVRQQLPEKYKEIFFDQSKNGYAGYIDGGASQEEFYKFIKPILEKMDGTEELLVKLNREDLLRKQRTFDNGSIPHQIHLGELHAILRRQEDFYPFLKDNREKIEKILTFRIPYYVGPLARGNSRFAWMTRKSEETITPWNFEEVVDKGASAQSFIERMTNFDKNLPNEKVLPKHSLLYEYFTVYNELTKVKYVTEGMRKPAFLSGEQKKAIVDLLFKTNRKVTVKQLKEDYFKKIECFDSVEISGVEDRFNASLGTYHDLLKIIKDKDFLDNEENEDILEDIVLTLTLFEDREMIEERLKTYAHLFDDKVMKQLKRRRYTGWGRLSRKLINGIRDKQSGKTILDFLKSDGFANRNFMQLIHDDSLTFKEDIQKAQVSGQGDSLHEHIANLAGSPAIKKGILQTVKVVDELVKVMGRHKPENIVIEMARENQTTQKGQKNSRERMKRIEEGIKELGSQILKEHPVENTQLQNEKLYLYYLQNGRDMYVDQELDINRLSDYDVDHIVPQSFLKDDSIDNKVLTRSDKARGKSDNVPSEEVVKKMKNYWRQLLNAKLITQRKFDNLTKAERGGLSELDKAGFIKRQLVETRQITKHVAQILDSRMNTKYDENDKLIREVKVITLKSKLVSDFRKDFQFYKVREINNYHHAHDAYLNAVVGTALIKKYPKLESEFVYGDYKVYDVRKMIAKSEQEIGKATAKYFFYSNIMNFFKTEITLANGEIRKRPLIETNGETGEIVWDKGRDFATVRKVLSMPQVNIVKKTEVQTGGFSKESILPKRNSDKLIARKKDWDPKKYGGFDSPTVAYSVLVVAKVEKGKSKKLKSVKELLGITIMERSSFEKNPIDFLEAKGYKEVKKDLIIKLPKYSLFELENGRKRMLASAGELQKGNELALPSKYVNFLYLASHYEKLKGSPEDNEQKQLFVEQHKHYLDEIIEQISEFSKRVILADANLDKVLSAYNKHRDKPIREQAENIIHLFTLTNLGAPAAFKYFDTTIDRKRYTSTKEVLDATLIHQSITGLYETRIDLSQLGGDGGGGGGGSPAPGGTLQLDDEYRLYSPLVKPDQNIQFWLEQFPQAWAETAGMGLAKQVPPQVIQLKASATPVSVRQYPLSKEAQEGIRPHVQRLIQQGILVPVQSPWNTPLLPVRKPGTNDYRPVQDLREVNKRVQDIHPTVPNPYNLLCALPPQRSWYTVLDLKDAFFCLRLHPTSQPLFAFEWRDPGTGRTGQLTWTRLPQGFKNSPTIFDEALHRDLANFRIQHPQVTLLQYVDDLLLAGATKQDCLEGTKALLLELSDLGYRASAKKAQICRREVTYLGYSLRDGQRWLTEARKKTVVQIPAPTTAKQVREFLGTAGFCRLWIPGFATLAAPLYPLTKEKGEFSWAPEHQKAFDAIKKALLSAPALALPDVTKPFTLYVDERKGVARGVLTQTLGPWRRPVAYLSKKLDPVASGWPVCLKAIAAVAILVKDADKLTLGQNITVIAPHALENIVRQPPDRWMTNARMTHYQSLLLTERVTFAPPAALNPATLLPEETDEPVTHDCHQLLIEETGVRKDLTDIPLTGEVLTWFTDGSSYVVEGKRMAGAAVVDGTRTIWASSLPEGTSAQKAELMALTQALRLAEGKSINIYTDSRYAFATAHVHGAIYKQRGLLTSAGREIKNKEEILSLLEALHLPKRLAIIHCPGHQKAKDPISRGNQMADRVAKQAAQGVNLLAGKRTADGSEFEKRTADGSEFESPKKKAKVE

SEQ ID NO: 7004 - protein, 2174 aa, synthetic construct
MPAAKRVKLDGGDKKYSIGLDIGTNSVGWAVITDEYKVPSKKFKVLGNTDRHSIKKNLIGALLFDSGETAEATRLKRTARRRYTRRKNRICYLQEIFSNEMAKVDDSFFHRLEESFLVEEDKKHERHPIFGNIVDEVAYHEKYPTIYHLRKKLVDSTDKADLRLIYLALAHMIKFRGHFLIEGDLNPDNSDVDKLFIQLVQTYNQLFEENPINASGVDAKAILSARLSKSRRLENLIAQLPGEKKNGLFGNLIALSLGLTPNFKSNFDLAEDAKLQLSKDTYDDDLDNLLAQIGDQYADLFLAAKNLSDAILLSDILRVNTEITKAPLSASMIKRYDEHHQDLTLLKALVRQQLPEKYKEIFFDQSKNGYAGYIDGGASQEEFYKFIKPILEKMDGTEELLVKLNREDLLRKQRTFDNGSIPHQIHLGELHAILRRQEDFYPFLKDNREKIEKILTFRIPYYVGPLARGNSRFAWMTRKSEETITPWNFEEVVDKGASAQSFIERMTNFDKNLPNEKVLPKHSLLYEYFTVYNELTKVKYVTEGMRKPAFLSGEQKKAIVDLLFKTNRKVTVKQLKEDYFKKIECFDSVEISGVEDRFNASLGTYHDLLKIIKDKDFLDNEENEDILEDIVLTLTLFEDREMIEERLKTYAHLFDDKVMKQLKRRRYTGWGRLSRKLINGIRDKQSGKTILDFLKSDGFANRNFMQLIHDDSLTFKEDIQKAQVSGQGDSLHEHIANLAGSPAIKKGILQTVKVVDELVKVMGRHKPENIVIEMARENQTTQKGQKNSRERMKRIEEGIKELGSQILKEHPVENTQLQNEKLYLYYLQNGRDMYVDQELDINRLSDYDVDHIVPQSFLKDDSIDNKVLTRSDKARGKSDNVPSEEVVKKMKNYWRQLLNAKLITQRKFDNLTKAERGGLSELDKAGFIKRQLVETRQITKHVAQILDSRMNTKYDENDKLIREVKVITLKSKLVSDFRKDFQFYKVREINNYHHAHDAYLNAVVGTALIKKYPKLESEFVYGDYKVYDVRKMIAKSEQEIGKATAKYFFYSNIMNFFKTEITLANGEIRKRPLIETNGETGEIVWDKGRDFATVRKVLSMPQVNIVKKTEVQTGGFSKESILPKRNSDKLIARKKDWDPKKYGGFDSPTVAYSVLVVAKVEKGKSKKLKSVKELLGITIMERSSFEKNPIDFLEAKGYKEVKKDLIIKLPKYSLFELENGRKRMLASAGELQKGNELALPSKYVNFLYLASHYEKLKGSPEDNEQKQLFVEQHKHYLDEIIEQISEFSKRVILADANLDKVLSAYNKHRDKPIREQAENIIHLFTLTNLGAPAAFKYFDTTIDRKRYTSTKEVLDATLIHQSITGLYETRIDLSQLGGDGGGGGGGSPAPGGMDPLQLLQPLEAEIKGTKLKAHWNSGATITCVPEAFLEDERPIQTMLIKTIHGEKQQDVYYLTFKVQGRKVEAEVLASPYDYILLNPSDVPWLMKKPLQLTVLVPLHEYQERLLQQTALPKEQKELLQKLFLKYDALWQHWENQVGHRRIKPHNIATGTLAPRPQKQYPINPKAKPSIQIVIDDLLKQGVLIQQNSTMNTPVYPVPKPDGKWRMVLDYREVNKTIPLIAAQNQHSAGILSSIYRGKYKTTLDLTNGFWAHPITPESYWLTAFTWQGKQYCWTRLPQGFLNSPALFNADVVDLLKEIPNVQAYVDDIYISHDDPQEHLEQLEKIFSILLNAGYVVSLKKSEIAQREVEFLGFNITKEGRGLTDTFKQKLLNITPPKDLKQLQSILGLLNFARNFIPNYSELVKPLYTIVAPANGKFISWTEDNSNQLQHIISVLNQADNLEERNPETRLIIKVNSSPSAGYIRYYNEGSKRPIMYVNYIFSKAEAKFTQTEKLLTTMHKGLIKAMDLAMGQEILVYSPIVSMTKIQRTPLPERKALPVRWITWMTYLEDPRIQFHYDKSLPELQQIPNVTEDVIAKTKHPSEFAMVFYTDGSAIKHPDVNKSHSAGMGIAQVQFIPEYKIVHQWSIPLGDHTAQLAEIAAVEFACKKALKISGPVLIVTDSFYVAESANKELPYWKSNGFLNNKKKPLRHVSKWKSIAECLQLKPDIIIMHEKGHQQPMTTLHTEGNNLADKLATQGSYVVHAGKRTADGSEFEKRTADGSEFESPKKKAKVE

SEQ ID NO: 7005 - protein, 2085 aa, synthetic construct
MPAAKRVKLDGGDKKYSIGLDIGTNSVGWAVITDEYKVPSKKFKVLGNTDRHSIKKNLIGALLFDSGETAEATRLKRTARRRYTRRKNRICYLQEIFSNEMAKVDDSFFHRLEESFLVEEDKKHERHPIFGNIVDEVAYHEKYPTIYHLRKKLVDSTDKADLRLIYLALAHMIKFRGHFLIEGDLNPDNSDVDKLFIQLVQTYNQLFEENPINASGVDAKAILSARLSKSRRLENLIAQLPGEKKNGLFGNLIALSLGLTPNFKSNFDLAEDAKLQLSKDTYDDDLDNLLAQIGDQYADLFLAAKNLSDAILLSDILRVNTEITKAPLSASMIKRYDEHHQDLTLLKALVRQQLPEKYKEIFFDQSKNGYAGYIDGGASQEEFYKFIKPILEKMDGTEELLVKLNREDLLRKQRTFDNGSIPHQIHLGELHAILRRQEDFYPFLKDNREKIEKILTFRIPYYVGPLARGNSRFAWMTRKSEETITPWNFEEVVDKGASAQSFIERMTNFDKNLPNEKVLPKHSLLYEYFTVYNELTKVKYVTEGMRKPAFLSGEQKKAIVDLLFKTNRKVTVKQLKEDYFKKIECFDSVEISGVEDRFNASLGTYHDLLKIIKDKDFLDNEENEDILEDIVLTLTLFEDREMIEERLKTYAHLFDDKVMKQLKRRRYTGWGRLSRKLINGIRDKQSGKTILDFLKSDGFANRNFMQLIHDDSLTFKEDIQKAQVSGQGDSLHEHIANLAGSPAIKKGILQTVKVVDELVKVMGRHKPENIVIEMARENQTTQKGQKNSRERMKRIEEGIKELGSQILKEHPVENTQLQNEKLYLYYLQNGRDMYVDQELDINRLSDYDVDHIVPQSFLKDDSIDNKVLTRSDKARGKSDNVPSEEVVKKMKNYWRQLLNAKLITQRKFDNLTKAERGGLSELDKAGFIKRQLVETRQITKHVAQILDSRMNTKYDENDKLIREVKVITLKSKLVSDFRKDFQFYKVREINNYHHAHDAYLNAVVGTALIKKYPKLESEFVYGDYKVYDVRKMIAKSEQEIGKATAKYFFYSNIMNFFKTEITLANGEIRKRPLIETNGETGEIVWDKGRDFATVRKVLSMPQVNIVKKTEVQTGGFSKESILPKRNSDKLIARKKDWDPKKYGGFDSPTVAYSVLVVAKVEKGKSKKLKSVKELLGITIMERSSFEKNPIDFLEAKGYKEVKKDLIIKLPKYSLFELENGRKRMLASAGELQKGNELALPSKYVNFLYLASHYEKLKGSPEDNEQKQLFVEQHKHYLDEIIEQISEFSKRVILADANLDKVLSAYNKHRDKPIREQAENIIHLFTLTNLGAPAAFKYFDTTIDRKRYTSTKEVLDATLIHQSITGLYETRIDLSQLGGDGGGGGGGSPAPGGIPWLMKKPLQLTTLVPLQEYEERLLKQTMLTGSYKEKLQSLFLKYDALWQHWENQVGHRRIKPHHIATGTVNPRPQKQYPINPKAKASIQTVINDLLKQGVLIQQNSIMNTPVYPVPKPDGKWRMVLDYREVNKTIPLIAAQNQHSAGILSSIFRGKYKTTLDLSNGFWAHSITPESYWLTAFTWLGQQYCWTRLPQGFLNSPALFNADVVDLLKEVPNVQVYVDDIYISHDDPREHLEQLEKVFSLLLNAGYVVSLKKSEIAQHEVEFLGFNITKEGRGLTETFKQKLLNITPPRDLKQLQSILGLLNFARNFIPNFSELVKPLYNIIATAPGKYITWTTDNSQQLQNIISMLNSAENLEERNPEVRLIMKVNTSPSAGYIRFYNEFAKRPIMYLNYVYTKAEVKFTNTEKLLTTIHKGLIKALDLGMGQEILVYSPIVSMTKIQKTPLPERKALPIRWITWMSYLEDPRIQFHYDKTLPELQQVPTVTDDIIAKIKHPSEFSMVFYTDGSAIKHPNVNKSHNAGMGIAQVQFKPEFTVINTWSIPLGDHTAQLAEVAAVEFACKKALKIDGPVLIVTDSFYVAESVNKELPYWQSNGFFNNKKKPLKHVSKWKSIADCIQLKPDIIIIHEKGHQPTASTFHTEGNNLADKLATQGSYVVNAGKRTADGSEFEKRTADGSEFESPKKKAKVE

SEQ ID NO: 7006 - protein, 2085 aa, synthetic construct
MPAAKRVKLDGGDKKYSIGLDIGTNSVGWAVITDEYKVPSKKFKVLGNTDRHSIKKNLIGALLFDSGETAEATRLKRTARRRYTRRKNRICYLQEIFSNEMAKVDDSFFHRLEESFLVEEDKKHERHPIFGNIVDEVAYHEKYPTIYHLRKKLVDSTDKADLRLIYLALAHMIKFRGHFLIEGDLNPDNSDVDKLFIQLVQTYNQLFEENPINASGVDAKAILSARLSKSRRLENLIAQLPGEKKNGLFGNLIALSLGLTPNFKSNFDLAEDAKLQLSKDTYDDDLDNLLAQIGDQYADLFLAAKNLSDAILLSDILRVNTEITKAPLSASMIKRYDEHHQDLTLLKALVRQQLPEKYKEIFFDQSKNGYAGYIDGGASQEEFYKFIKPILEKMDGTEELLVKLNREDLLRKQRTFDNGSIPHQIHLGELHAILRRQEDFYPFLKDNREKIEKILTFRIPYYVGPLARGNSRFAWMTRKSEETITPWNFEEVVDKGASAQSFIERMTNFDKNLPNEKVLPKHSLLYEYFTVYNELTKVKYVTEGMRKPAFLSGEQKKAIVDLLFKTNRKVTVKQLKEDYFKKIECFDSVEISGVEDRFNASLGTYHDLLKIIKDKDFLDNEENEDILEDIVLTLTLFEDREMIEERLKTYAHLFDDKVMKQLKRRRYTGWGRLSRKLINGIRDKQSGKTILDFLKSDGFANRNFMQLIHDDSLTFKEDIQKAQVSGQGDSLHEHIANLAGSPAIKKGILQTVKVVDELVKVMGRHKPENIVIEMARENQTTQKGQKNSRERMKRIEEGIKELGSQILKEHPVENTQLQNEKLYLYYLQNGRDMYVDQELDINRLSDYDVDHIVPQSFLKDDSIDNKVLTRSDKARGKSDNVPSEEVVKKMKNYWRQLLNAKLITQRKFDNLTKAERGGLSELDKAGFIKRQLVETRQITKHVAQILDSRMNTKYDENDKLIREVKVITLKSKLVSDFRKDFQFYKVREINNYHHAHDAYLNAVVGTALIKKYPKLESEFVYGDYKVYDVRKMIAKSEQEIGKATAKYFFYSNIMNFFKTEITLANGEIRKRPLIETNGETGEIVWDKGRDFATVRKVLSMPQVNIVKKTEVQTGGFSKESILPKRNSDKLIARKKDWDPKKYGGFDSPTVAYSVLVVAKVEKGKSKKLKSVKELLGITIMERSSFEKNPIDFLEAKGYKEVKKDLIIKLPKYSLFELENGRKRMLASAGELQKGNELALPSKYVNFLYLASHYEKLKGSPEDNEQKQLFVEQHKHYLDEIIEQISEFSKRVILADANLDKVLSAYNKHRDKPIREQAENIIHLFTLTNLGAPAAFKYFDTTIDRKRYTSTKEVLDATLIHQSITGLYETRIDLSQLGGDGGGGGGGSPAPGGIPWLMKKPLQLTTLVPLQEYEERLLKQTMLTGSYKEKLQSLFLKYDALWQHWENQVGHRRIKPHHIATGTVNPRPQKQYPINPKAKASIQTVINDLLKQGVLIQQNSIMNTPVYPVPKPDGKWRMVLDYREVNKTIPLIAAQNQHSAGILSSIFRGKYKTTLDLSNGFWAHSITPESYWLTAFTWLGQQYCWTRLPQGFLNSPALFNADVVDLLKEVPNVQVYVDDIYISHDDPREHLEQLEKVFSLLLNAGYVVSLKKSEIAQHEVEFLGFNITKEGRGLTETFKQKLLNITPPRDLKQLQSILGKLNFARNFIPNFSELVKPLYNIIATAPGKYITWTTDNSQQLQNIISMLNSAENLEERNPEVRLIMKVNTSPSAGYIRFYNEFAKRPIMYLNYVYTKAEVKFTNTEKLLTTIHKGLIKALDLGMGQEILVYSPIVSMTKIQKTPLPERKALPIRWITWMSYLEDPRIQFHYDKTLPELQQVPTVTDDIIAKIKHPSEFSMVFYTDGSAIKHPNVNKSHNAGMGIAQVQFKPEFTVINTWSIPLGDHTAQLAEVAAVEFACKKALKIDGPVLIVTDSFYVAESVNKELPYWQSNGFFNNKKKPLKHVSKWKSIADCIQLKPDIIIIHEKGHQPTASTFHTEGNNLADKLATQGSYVVNAGKRTADGSEFEKRTADGSEFESPKKKAKVE

SEQ ID NO: 7007 - protein, 2174 aa, synthetic construct
MPAAKRVKLDGGDKKYSIGLDIGTNSVGWAVITDEYKVPSKKFKVLGNTDRHSIKKNLIGALLFDSGETAEATRLKRTARRRYTRRKNRICYLQEIFSNEMAKVDDSFFHRLEESFLVEEDKKHERHPIFGNIVDEVAYHEKYPTIYHLRKKLVDSTDKADLRLIYLALAHMIKFRGHFLIEGDLNPDNSDVDKLFIQLVQTYNQLFEENPINASGVDAKAILSARLSKSRRLENLIAQLPGEKKNGLFGNLIALSLGLTPNFKSNFDLAEDAKLQLSKDTYDDDLDNLLAQIGDQYADLFLAAKNLSDAILLSDILRVNTEITKAPLSASMIKRYDEHHQDLTLLKALVRQQLPEKYKEIFFDQSKNGYAGYIDGGASQEEFYKFIKPILEKMDGTEELLVKLNREDLLRKQRTFDNGSIPHQIHLGELHAILRRQEDFYPFLKDNREKIEKILTFRIPYYVGPLARGNSRFAWMTRKSEETITPWNFEEVVDKGASAQSFIERMTNFDKNLPNEKVLPKHSLLYEYFTVYNELTKVKYVTEGMRKPAFLSGEQKKAIVDLLFKTNRKVTVKQLKEDYFKKIECFDSVEISGVEDRFNASLGTYHDLLKIIKDKDFLDNEENEDILEDIVLTLTLFEDREMIEERLKTYAHLFDDKVMKQLKRRRYTGWGRLSRKLINGIRDKQSGKTILDFLKSDGFANRNFMQLIHDDSLTFKEDIQKAQVSGQGDSLHEHIANLAGSPAIKKGILQTVKVVDELVKVMGRHKPENIVIEMARENQTTQKGQKNSRERMKRIEEGIKELGSQILKEHPVENTQLQNEKLYLYYLQNGRDMYVDQELDINRLSDYDVDHIVPQSFLKDDSIDNKVLTRSDKARGKSDNVPSEEVVKKMKNYWRQLLNAKLITQRKFDNLTKAERGGLSELDKAGFIKRQLVETRQITKHVAQILDSRMNTKYDENDKLIREVKVITLKSKLVSDFRKDFQFYKVREINNYHHAHDAYLNAVVGTALIKKYPKLESEFVYGDYKVYDVRKMIAKSEQEIGKATAKYFFYSNIMNFFKTEITLANGEIRKRPLIETNGETGEIVWDKGRDFATVRKVLSMPQVNIVKKTEVQTGGFSKESILPKRNSDKLIARKKDWDPKKYGGFDSPTVAYSVLVVAKVEKGKSKKLKSVKELLGITIMERSSFEKNPIDFLEAKGYKEVKKDLIIKLPKYSLFELENGRKRMLASAGELQKGNELALPSKYVNFLYLASHYEKLKGSPEDNEQKQLFVEQHKHYLDEIIEQISEFSKRVILADANLDKVLSAYNKHRDKPIREQAENIIHLFTLTNLGAPAAFKYFDTTIDRKRYTSTKEVLDATLIHQSITGLYETRIDLSQLGGDGGGGGGGSPAPGGMDPLQLLQPLEAEIKGTKLKAHWNSGATITCVPQAFLEEEVPIKNIWIKTIHGEKEQPVYYLTFKIQGRKVEAEVISSPYDYILVSPSDIPWLMKKPLQLTTLVPLQEYEERLLKQTMLTGSYKEKLQSLFLKYDALWQHWENQVGHRRIKPHHIATGTVNPRPQKQYPINPKAKASIQTVINDLLKQGVLIQQNSIMNTPVYPVPKPDGKWRMVLDYREVNKTIPLIAAQNQHSAGILSSIFRGKYKTTLDLSNGFWAHSITPESYWLTAFTWLGQQYCWTRLPQGFLNSPALFNADVVDLLKEVPNVQVYVDDIYISHDDPREHLEQLEKVFSLLLNAGYVVSLKKSEIAQHEVEFLGFNITKEGRGLTETFKQKLLNITPPRDLKQLQSILGKLNFARNFIPNFSELVKPLYNIIATAPGKYITWTTDNSQQLQNIISMLNSAENLEERNPEVRLIMKVNTSPSAGYIRFYNEFAKRPIMYLNYVYTKAEVKFTNTEKLLTTIHKGLIKALDLGMGQEILVYSPIVSMTKIQKTPLPERKALPIRWITWMSYLEDPRIQFHYDKTLPELQQVPTVTDDIIAKIKHPSEFSMVFYTDGSAIKHPNVNKSHNAGMGIAQVQFKPEFTVINTWSIPLGDHTAQLAEVAAVEFACKKALKIDGPVLIVTDSFYVAESVNKELPYWQSNGFFNNKKKPLKHVSKWKSIADCIQLKPDIIIIHEKGHQPTASTFHTEGNNLADKLATQGSYVVNAGKRTADGSEFEKRTADGSEFESPKKKAKVE

SEQ ID NO: 7008 - protein, 2092 aa, synthetic construct
MPAAKRVKLDGGDKKYSIGLDIGTNSVGWAVITDEYKVPSKKFKVLGNTDRHSIKKNLIGALLFDSGETAEATRLKRTARRRYTRRKNRICYLQEIFSNEMAKVDDSFFHRLEESFLVEEDKKHERHPIFGNIVDEVAYHEKYPTIYHLRKKLVDSTDKADLRLIYLALAHMIKFRGHFLIEGDLNPDNSDVDKLFIQLVQTYNQLFEENPINASGVDAKAILSARLSKSRRLENLIAQLPGEKKNGLFGNLIALSLGLTPNFKSNFDLAEDAKLQLSKDTYDDDLDNLLAQIGDQYADLFLAAKNLSDAILLSDILRVNTEITKAPLSASMIKRYDEHHQDLTLLKALVRQQLPEKYKEIFFDQSKNGYAGYIDGGASQEEFYKFIKPILEKMDGTEELLVKLNREDLLRKQRTFDNGSIPHQIHLGELHAILRRQEDFYPFLKDNREKIEKILTFRIPYYVGPLARGNSRFAWMTRKSEETITPWNFEEVVDKGASAQSFIERMTNFDKNLPNEKVLPKHSLLYEYFTVYNELTKVKYVTEGMRKPAFLSGEQKKAIVDLLFKTNRKVTVKQLKEDYFKKIECFDSVEISGVEDRFNASLGTYHDLLKIIKDKDFLDNEENEDILEDIVLTLTLFEDREMIEERLKTYAHLFDDKVMKQLKRRRYTGWGRLSRKLINGIRDKQSGKTILDFLKSDGFANRNFMQLIHDDSLTFKEDIQKAQVSGQGDSLHEHIANLAGSPAIKKGILQTVKVVDELVKVMGRHKPENIVIEMARENQTTQKGQKNSRERMKRIEEGIKELGSQILKEHPVENTQLQNEKLYLYYLQNGRDMYVDQELDINRLSDYDVDHIVPQSFLKDDSIDNKVLTRSDKARGKSDNVPSEEVVKKMKNYWRQLLNAKLITQRKFDNLTKAERGGLSELDKAGFIKRQLVETRQITKHVAQILDSRMNTKYDENDKLIREVKVITLKSKLVSDFRKDFQFYKVREINNYHHAHDAYLNAVVGTALIKKYPKLESEFVYGDYKVYDVRKMIAKSEQEIGKATAKYFFYSNIMNFFKTEITLANGEIRKRPLIETNGETGEIVWDKGRDFATVRKVLSMPQVNIVKKTEVQTGGFSKESILPKRNSDKLIARKKDWDPKKYGGFDSPTVAYSVLVVAKVEKGKSKKLKSVKELLGITIMERSSFEKNPIDFLEAKGYKEVKKDLIIKLPKYSLFELENGRKRMLASAGELQKGNELALPSKYVNFLYLASHYEKLKGSPEDNEQKQLFVEQHKHYLDEIIEQISEFSKRVILADANLDKVLSAYNKHRDKPIREQAENIIHLFTLTNLGAPAAFKYFDTTIDRKRYTSTKEVLDATLIHQSITGLYETRIDLSQLGGDGGGGGGGSPAPGGVLNLEEEYRLHEKPVPSSIDPSWLQLFPTVWAERAGMGLANQVPPVVVELRSGASPVAVRQYPMSKEAREGIRPHIQRFLDLGVLVPCQSPWNTPLLPVKKPGTNDYRPVQDLREINKRVQDIHPTVPNPYNLLSSLPPSHTWYSVLDLKDAFFCLKLHPNSQPLFAFEWRDPEKGNTGQLTWTRLPQGFKNSPTLFNEALHRDLAPFRALNPQVVLLQYVDDLLVAAPTYRDCKEGTQKLLQELSKLGYRVSAKKAQLCQKEVTYLGYLLKEGKRWLTPARKATVMKIPPPTTPRQVREFLGKAGFCRLFIPGFASLAAPLYPLTKPSIPFIWTEEHQKAFDRIKEALLSAPALALPDLTKPFTLYVDERAGVARGVLTQTLGPWRRPVAYLSKKLDPVASGWPTCLKAVAAVALLLKDADKLTLGQNVTVIASHSLESIVRQPPDRWMTNARMTHYQSLLLNERVSFAPPAVLNPATLLPVESEATPVHRCSEILAEETGTRRDLKDQPLPGVPAWYTDGSSFIAEGKRRAGAAIVDGKRTVWASSLPEGTSAQKAELVALTQALRLAEGKDINIYTDSRYAFATAHIHGAIYKQRGWLTSAGKDIKNKEEILALLEAIHLPKRVAIIHCPGHQKGNDPVATGNRRADEAAKQAALSTRVLAETTKPAGKRTADGSEFEKRTADGSEFESPKKKAKVE

SEQ ID NO: 7009 - protein, 2096 aa, synthetic construct
MPAAKRVKLDGGDKKYSIGLDIGTNSVGWAVITDEYKVPSKKFKVLGNTDRHSIKKNLIGALLFDSGETAEATRLKRTARRRYTRRKNRICYLQEIFSNEMAKVDDSFFHRLEESFLVEEDKKHERHPIFGNIVDEVAYHEKYPTIYHLRKKLVDSTDKADLRLIYLALAHMIKFRGHFLIEGDLNPDNSDVDKLFIQLVQTYNQLFEENPINASGVDAKAILSARLSKSRRLENLIAQLPGEKKNGLFGNLIALSLGLTPNFKSNFDLAEDAKLQLSKDTYDDDLDNLLAQIGDQYADLFLAAKNLSDAILLSDILRVNTEITKAPLSASMIKRYDEHHQDLTLLKALVRQQLPEKYKEIFFDQSKNGYAGYIDGGASQEEFYKFIKPILEKMDGTEELLVKLNREDLLRKQRTFDNGSIPHQIHLGELHAILRRQEDFYPFLKDNREKIEKILTFRIPYYVGPLARGNSRFAWMTRKSEETITPWNFEEVVDKGASAQSFIERMTNFDKNLPNEKVLPKHSLLYEYFTVYNELTKVKYVTEGMRKPAFLSGEQKKAIVDLLFKTNRKVTVKQLKEDYFKKIECFDSVEISGVEDRFNASLGTYHDLLKIIKDKDFLDNEENEDILEDIVLTLTLFEDREMIEERLKTYAHLFDDKVMKQLKRRRYTGWGRLSRKLINGIRDKQSGKTILDFLKSDGFANRNFMQLIHDDSLTFKEDIQKAQVSGQGDSLHEHIANLAGSPAIKKGILQTVKVVDELVKVMGRHKPENIVIEMARENQTTQKGQKNSRERMKRIEEGIKELGSQILKEHPVENTQLQNEKLYLYYLQNGRDMYVDQELDINRLSDYDVDHIVPQSFLKDDSIDNKVLTRSDKARGKSDNVPSEEVVKKMKNYWRQLLNAKLITQRKFDNLTKAERGGLSELDKAGFIKRQLVETRQITKHVAQILDSRMNTKYDENDKLIREVKVITLKSKLVSDFRKDFQFYKVREINNYHHAHDAYLNAVVGTALIKKYPKLESEFVYGDYKVYDVRKMIAKSEQEIGKATAKYFFYSNIMNFFKTEITLANGEIRKRPLIETNGETGEIVWDKGRDFATVRKVLSMPQVNIVKKTEVQTGGFSKESILPKRNSDKLIARKKDWDPKKYGGFDSPTVAYSVLVVAKVEKGKSKKLKSVKELLGITIMERSSFEKNPIDFLEAKGYKEVKKDLIIKLPKYSLFELENGRKRMLASAGELQKGNELALPSKYVNFLYLASHYEKLKGSPEDNEQKQLFVEQHKHYLDEIIEQISEFSKRVILADANLDKVLSAYNKHRDKPIREQAENIIHLFTLTNLGAPAAFKYFDTTIDRKRYTSTKEVLDATLIHQSITGLYETRIDLSQLGGDGGGGGPAPGGSGGTAPLEEEYRLFLEAPIQNVTLLEQWKREIPKVWAEINPPGLASTQAPIHVQLLSTALPVRVRQYPITLEAKRSLRETIRKFRAAGILRPVHSPWNTPLLPVRKSGTSEYRMVQDLREVNKRVETIHPTVPNPYTLLSLLPPDRIWYSVLDLKDAFFCIPLAPESQLIFAFEWADAEEGESGQLTWTRLPQGFKNSPTLFNEALNRDLQGFRLDHPSVSLLQYVDDLLIAADTQAACLSATRDLLMTLAELGYRVSGKKAQLCQEEVTYLGFKIHKGSRSLSNSRTQAILQIPVPKTKRQVREFLGTIGYCRLWIPGFAELAQPLYAATRPGNDPLVWGEKEEEAFQSLKLALTQPPALALPSLDKPFQLFVEETSGAAKGVLTQALGPWKRPVAYLSKRLDPVAAGWPRCLRAIAAAALLTREASKLTFGQDIEITSSHNLESLLRSPPDKWLTNARITQYQVLLLDPPRVRFKQTAALNPATLLPETDDTLPIHHCLDTLDSLTSTRPDLTDQPLAQAEATLFTDGSSYIRDGKRYAGAAVVTLDSVIWAEPLPIGTSAQKAELIALTKALEWSKDKSVNIYTDSRYAFATLHVHGMIYRERGWLTAGGKAIKNAPEILALLTAVWLPKRVAVMHCKGHQKDDAPTSTGNRRADEVAREVAIRPLSTQATISAGKRTADGSEFEKRTADGSEFESPKKKAKVE

SEQ ID NO: 7010 - protein, 2216 aa, synthetic construct
MPAAKRVKLDGGDKKYSIGLDIGTNSVGWAVITDEYKVPSKKFKVLGNTDRHSIKKNLIGALLFDSGETAEATRLKRTARRRYTRRKNRICYLQEIFSNEMAKVDDSFFHRLEESFLVEEDKKHERHPIFGNIVDEVAYHEKYPTIYHLRKKLVDSTDKADLRLIYLALAHMIKFRGHFLIEGDLNPDNSDVDKLFIQLVQTYNQLFEENPINASGVDAKAILSARLSKSRRLENLIAQLPGEKKNGLFGNLIALSLGLTPNFKSNFDLAEDAKLQLSKDTYDDDLDNLLAQIGDQYADLFLAAKNLSDAILLSDILRVNTEITKAPLSASMIKRYDEHHQDLTLLKALVRQQLPEKYKEIFFDQSKNGYAGYIDGGASQEEFYKFIKPILEKMDGTEELLVKLNREDLLRKQRTFDNGSIPHQIHLGELHAILRRQEDFYPFLKDNREKIEKILTFRIPYYVGPLARGNSRFAWMTRKSEETITPWNFEEVVDKGASAQSFIERMTNFDKNLPNEKVLPKHSLLYEYFTVYNELTKVKYVTEGMRKPAFLSGEQKKAIVDLLFKTNRKVTVKQLKEDYFKKIECFDSVEISGVEDRFNASLGTYHDLLKIIKDKDFLDNEENEDILEDIVLTLTLFEDREMIEERLKTYAHLFDDKVMKQLKRRRYTGWGRLSRKLINGIRDKQSGKTILDFLKSDGFANRNFMQLIHDDSLTFKEDIQKAQVSGQGDSLHEHIANLAGSPAIKKGILQTVKVVDELVKVMGRHKPENIVIEMARENQTTQKGQKNSRERMKRIEEGIKELGSQILKEHPVENTQLQNEKLYLYYLQNGRDMYVDQELDINRLSDYDVDHIVPQSFLKDDSIDNKVLTRSDKARGKSDNVPSEEVVKKMKNYWRQLLNAKLITQRKFDNLTKAERGGLSELDKAGFIKRQLVETRQITKHVAQILDSRMNTKYDENDKLIREVKVITLKSKLVSDFRKDFQFYKVREINNYHHAHDAYLNAVVGTALIKKYPKLESEFVYGDYKVYDVRKMIAKSEQEIGKATAKYFFYSNIMNFFKTEITLANGEIRKRPLIETNGETGEIVWDKGRDFATVRKVLSMPQVNIVKKTEVQTGGFSKESILPKRNSDKLIARKKDWDPKKYGGFDSPTVAYSVLVVAKVEKGKSKKLKSVKELLGITIMERSSFEKNPIDFLEAKGYKEVKKDLIIKLPKYSLFELENGRKRMLASAGELQKGNELALPSKYVNFLYLASHYEKLKGSPEDNEQKQLFVEQHKHYLDEIIEQISEFSKRVILADANLDKVLSAYNKHRDKPIREQAENIIHLFTLTNLGAPAAFKYFDTTIDRKRYTSTKEVLDATLIHQSITGLYETRIDLSQLGGDGGGGGPAPGGSGGTLGDQGSRGSDPLPEPRVTLTVEGIPTEFLVNTGAEHSVLTKPMGKMGSKRTVVAGATGSKVYPWTTKRLLKIGQKQVTHSFLVIPECPAPLLGRDLLTKLKAQIQFSTEGPQVTWEDRPAMCLVLNLEEEYRLHEKPVPPSIDPSWLQLFPMVWAEKAGMGLANQVPPVVVELKSDASPVAVRQYPMSKEAREGIRPHIQRFLDLGILVPCQSPWNTPLLPVKKPGTNDYRPVQDLREVNKRVQDIHPTVPNPYNLLSSLPPSHTWYSVLDLKDAFFCLKLHPNSQPLFAFEWRDPEKGNTGQLTWTRLPQGFKNSPTLFDEALHRDLASFRALNPQVVMLQYVDDLLVAAPTYRDCKEGTRRLLQELSKLGYRVSAKKAQLCREEVTYLGYLLKGGKRWLTPARKATVMKIPTPTTPRQVREFLGTAGFCRLWIPGFASLAAPLYPLTREKVPFTWTEAHQEAFGRIKEALLSAPALALPDLTKPFALYVDEKEGVARGVLTQTLGPWRRPVAYLSKKLDPVASGWPTCLKAIAAVALLLKDADKLTLGQNVLVIAPHNLESIVRQPPDRWMTNARMTHYQSLLLNERVSFAPPAILNPATLLPVESDDTPIHICSEILAEETGTRPDLRDQPLPGVPAWYTDGSSFIMDGRRQAGAAIVDNKRTVWASNLPEGTSAQKAELIALTQALRLAEGKSINIYTDSRYAFATAHVHGAIYKQRGLLTSAGKDIKNKEEILALLEAIHLPKRVAIIHCPGHQRGTDPVATGNRKADEAAKQAAQSTRILTETTKNAGKRTADGSEFEKRTADGSEFESPKKKAKVE

SEQ ID NO: 7011 - protein, 2125 aa, synthetic construct
MPAAKRVKLDGGDKKYSIGLDIGTNSVGWAVITDEYKVPSKKFKVLGNTDRHSIKKNLIGALLFDSGETAEATRLKRTARRRYTRRKNRICYLQEIFSNEMAKVDDSFFHRLEESFLVEEDKKHERHPIFGNIVDEVAYHEKYPTIYHLRKKLVDSTDKADLRLIYLALAHMIKFRGHFLIEGDLNPDNSDVDKLFIQLVQTYNQLFEENPINASGVDAKAILSARLSKSRRLENLIAQLPGEKKNGLFGNLIALSLGLTPNFKSNFDLAEDAKLQLSKDTYDDDLDNLLAQIGDQYADLFLAAKNLSDAILLSDILRVNTEITKAPLSASMIKRYDEHHQDLTLLKALVRQQLPEKYKEIFFDQSKNGYAGYIDGGASQEEFYKFIKPILEKMDGTEELLVKLNREDLLRKQRTFDNGSIPHQIHLGELHAILRRQEDFYPFLKDNREKIEKILTFRIPYYVGPLARGNSRFAWMTRKSEETITPWNFEEVVDKGASAQSFIERMTNFDKNLPNEKVLPKHSLLYEYFTVYNELTKVKYVTEGMRKPAFLSGEQKKAIVDLLFKTNRKVTVKQLKEDYFKKIECFDSVEISGVEDRFNASLGTYHDLLKIIKDKDFLDNEENEDILEDIVLTLTLFEDREMIEERLKTYAHLFDDKVMKQLKRRRYTGWGRLSRKLINGIRDKQSGKTILDFLKSDGFANRNFMQLIHDDSLTFKEDIQKAQVSGQGDSLHEHIANLAGSPAIKKGILQTVKVVDELVKVMGRHKPENIVIEMARENQTTQKGQKNSRERMKRIEEGIKELGSQILKEHPVENTQLQNEKLYLYYLQNGRDMYVDQELDINRLSDYDVDHIVPQSFLKDDSIDNKVLTRSDKARGKSDNVPSEEVVKKMKNYWRQLLNAKLITQRKFDNLTKAERGGLSELDKAGFIKRQLVETRQITKHVAQILDSRMNTKYDENDKLIREVKVITLKSKLVSDFRKDFQFYKVREINNYHHAHDAYLNAVVGTALIKKYPKLESEFVYGDYKVYDVRKMIAKSEQEIGKATAKYFFYSNIMNFFKTEITLANGEIRKRPLIETNGETGEIVWDKGRDFATVRKVLSMPQVNIVKKTEVQTGGFSKESILPKRNSDKLIARKKDWDPKKYGGFDSPTVAYSVLVVAKVEKGKSKKLKSVKELLGITIMERSSFEKNPIDFLEAKGYKEVKKDLIIKLPKYSLFELENGRKRMLASAGELQKGNELALPSKYVNFLYLASHYEKLKGSPEDNEQKQLFVEQHKHYLDEIIEQISEFSKRVILADANLDKVLSAYNKHRDKPIREQAENIIHLFTLTNLGAPAAFKYFDTTIDRKRYTSTKEVLDATLIHQSITGLYETRIDLSQLGGDGGGGGPAPGGSGGLLGRDLLTKLKAQIQFSTEGPQVTWEDRPAMCLVLNLEEEYRLHEKPVPPSIDPSWLQLFPMVWAEKAGMGLANQVPPVVVELKSDASPVAVRQYPMSKEAREGIRPHIQRFLDLGILVPCQSPWNTPLLPVKKPGTNDYRPVQDLREVNKRVQDIHPTVPNPYNLLSSLPPSHTWYSVLDLKDAFFCLKLHPNSQPLFAFEWRDPEKGNTGQLTWTRLPQGFKNSPTLFNEALHRDLASFRALNPQVVMLQYVDDLLVAAPTYRDCKEGTRRLLQELSKLGYRVSAKKAQLCREEVTYLGYLLKGGKRWLTPARKATVMKIPTPTTPRQVREFLGTAGFCRLWIPGFASLAAPLYPLTRPKVPFTWTEAHQEAFGRIKEALLSAPALALPDLTKPFALYVDEKEGVARGVLTQTLGPWRRPVAYLSKKLDPVASGWPTCLKAIAAVALLLKDADKLTLGQNVLVIAPHNLESIVRQPPDRWMTNARMTHYQSLLLNERVSFAPPAILNPATLLPVESDDTPIHICSEILAEETGTRPDLRDQPLPGVPAWYTDGSSFIMDGRRQAGAAIVDNKRTVWASNLPEGTSAQKAELIALTQALRLAEGKSINIYTDSRYAFATAHVHGAIYKQRGWLTSAGKDIKNKEEILALLEAIHLPKRVAIIHCPGHQRGTDPVATGNRKADEAAKQAAQSTRILTETTKNAGKRTADGSEFEKRTADGSEFESPKKKAKVE

SEQ ID NO: 7012 - protein, 2094 aa, synthetic construct
MPAAKRVKLDGGDKKYSIGLDIGTNSVGWAVITDEYKVPSKKFKVLGNTDRHSIKKNLIGALLFDSGETAEATRLKRTARRRYTRRKNRICYLQEIFSNEMAKVDDSFFHRLEESFLVEEDKKHERHPIFGNIVDEVAYHEKYPTIYHLRKKLVDSTDKADLRLIYLALAHMIKFRGHFLIEGDLNPDNSDVDKLFIQLVQTYNQLFEENPINASGVDAKAILSARLSKSRRLENLIAQLPGEKKNGLFGNLIALSLGLTPNFKSNFDLAEDAKLQLSKDTYDDDLDNLLAQIGDQYADLFLAAKNLSDAILLSDILRVNTEITKAPLSASMIKRYDEHHQDLTLLKALVRQQLPEKYKEIFFDQSKNGYAGYIDGGASQEEFYKFIKPILEKMDGTEELLVKLNREDLLRKQRTFDNGSIPHQIHLGELHAILRRQEDFYPFLKDNREKIEKILTFRIPYYVGPLARGNSRFAWMTRKSEETITPWNFEEVVDKGASAQSFIERMTNFDKNLPNEKVLPKHSLLYEYFTVYNELTKVKYVTEGMRKPAFLSGEQKKAIVDLLFKTNRKVTVKQLKEDYFKKIECFDSVEISGVEDRFNASLGTYHDLLKIIKDKDFLDNEENEDILEDIVLTLTLFEDREMIEERLKTYAHLFDDKVMKQLKRRRYTGWGRLSRKLINGIRDKQSGKTILDFLKSDGFANRNFMQLIHDDSLTFKEDIQKAQVSGQGDSLHEHIANLAGSPAIKKGILQTVKVVDELVKVMGRHKPENIVIEMARENQTTQKGQKNSRERMKRIEEGIKELGSQILKEHPVENTQLQNEKLYLYYLQNGRDMYVDQELDINRLSDYDVDHIVPQSFLKDDSIDNKVLTRSDKARGKSDNVPSEEVVKKMKNYWRQLLNAKLITQRKFDNLTKAERGGLSELDKAGFIKRQLVETRQITKHVAQILDSRMNTKYDENDKLIREVKVITLKSKLVSDFRKDFQFYKVREINNYHHAHDAYLNAVVGTALIKKYPKLESEFVYGDYKVYDVRKMIAKSEQEIGKATAKYFFYSNIMNFFKTEITLANGEIRKRPLIETNGETGEIVWDKGRDFATVRKVLSMPQVNIVKKTEVQTGGFSKESILPKRNSDKLIARKKDWDPKKYGGFDSPTVAYSVLVVAKVEKGKSKKLKSVKELLGITIMERSSFEKNPIDFLEAKGYKEVKKDLIIKLPKYSLFELENGRKRMLASAGELQKGNELALPSKYVNFLYLASHYEKLKGSPEDNEQKQLFVEQHKHYLDEIIEQISEFSKRVILADANLDKVLSAYNKHRDKPIREQAENIIHLFTLTNLGAPAAFKYFDTTIDRKRYTSTKEVLDATLIHQSITGLYETRIDLSQLGGDGGGGGPAPGGSGGTLGIEDEYRLHETSTEPDVSLGSTWLSDFPQAWAETGGMGLAVRQAPLIIPLKATSTPVSIQQYPMSHEARLGIKPHIQRLLDQGILVPCQSPWNTPLLPVKKPGTNDYRPVQDLREVNKRVEDIHPTVPNPYNLLSGLPPSHQWYTVLDLKDAFFCLRLHPTSQPLFAFEWRDPGMGISGQLTWTRLPQGFKNSPTLFNEALHRDLADFRIQHPDLILLQYVDDILLAATSELDCQQGTRALLQTLGDLGYRASAKKAQICQKQVKYLGYLLREGQRWLTEARKETVMGQPVPKTPRQLREFLGTAGFCRLWIPGFAEMAAPLYPLTKPGTLFSWGPDQQKAYQEIKQALLTAPALGLPDLTKPFELFVDEKQGYAKGVLTQKLGPWRRPVAYLSKKLDPVAAGWPPCLRMVAAIAVLTKDAGKLTMGQPLVILAPHAVEALVKQPPDRWLSNARMTHYQAMLLDTDRVQFGPVVALNPATLLPLPEEGAPHDCLEILAETHGTRPDLTDQPIPDADHTWYTDGSSFLQEGQRKAGAAVTTETEVIWAGALPAGTSAQRAELIALTQALKMAEGKRLNVYTDSRYAFATAHIHGEIYRRRGWLTSEGREIKNKSEILALLKALFLPKRLSIIHCLGHQKGDSAEARGNRLADQAAREAAIKTPPDTSTLLAGKRTADGSEFEKRTADGSEFESPKKKAKVE

SEQ ID NO: 7013 - protein, 2086 aa, synthetic construct
MPAAKRVKLDGGDKKYSIGLDIGTNSVGWAVITDEYKVPSKKFKVLGNTDRHSIKKNLIGALLFDSGETAEATRLKRTARRRYTRRKNRICYLQEIFSNEMAKVDDSFFHRLEESFLVEEDKKHERHPIFGNIVDEVAYHEKYPTIYHLRKKLVDSTDKADLRLIYLALAHMIKFRGHFLIEGDLNPDNSDVDKLFIQLVQTYNQLFEENPINASGVDAKAILSARLSKSRRLENLIAQLPGEKKNGLFGNLIALSLGLTPNFKSNFDLAEDAKLQLSKDTYDDDLDNLLAQIGDQYADLFLAAKNLSDAILLSDILRVNTEITKAPLSASMIKRYDEHHQDLTLLKALVRQQLPEKYKEIFFDQSKNGYAGYIDGGASQEEFYKFIKPILEKMDGTEELLVKLNREDLLRKQRTFDNGSIPHQIHLGELHAILRRQEDFYPFLKDNREKIEKILTFRIPYYVGPLARGNSRFAWMTRKSEETITPWNFEEVVDKGASAQSFIERMTNFDKNLPNEKVLPKHSLLYEYFTVYNELTKVKYVTEGMRKPAFLSGEQKKAIVDLLFKTNRKVTVKQLKEDYFKKIECFDSVEISGVEDRFNASLGTYHDLLKIIKDKDFLDNEENEDILEDIVLTLTLFEDREMIEERLKTYAHLFDDKVMKQLKRRRYTGWGRLSRKLINGIRDKQSGKTILDFLKSDGFANRNFMQLIHDDSLTFKEDIQKAQVSGQGDSLHEHIANLAGSPAIKKGILQTVKVVDELVKVMGRHKPENIVIEMARENQTTQKGQKNSRERMKRIEEGIKELGSQILKEHPVENTQLQNEKLYLYYLQNGRDMYVDQELDINRLSDYDVDHIVPQSFLKDDSIDNKVLTRSDKARGKSDNVPSEEVVKKMKNYWRQLLNAKLITQRKFDNLTKAERGGLSELDKAGFIKRQLVETRQITKHVAQILDSRMNTKYDENDKLIREVKVITLKSKLVSDFRKDFQFYKVREINNYHHAHDAYLNAVVGTALIKKYPKLESEFVYGDYKVYDVRKMIAKSEQEIGKATAKYFFYSNIMNFFKTEITLANGEIRKRPLIETNGETGEIVWDKGRDFATVRKVLSMPQVNIVKKTEVQTGGFSKESILPKRNSDKLIARKKDWDPKKYGGFDSPTVAYSVLVVAKVEKGKSKKLKSVKELLGITIMERSSFEKNPIDFLEAKGYKEVKKDLIIKLPKYSLFELENGRKRMLASAGELQKGNELALPSKYVNFLYLASHYEKLKGSPEDNEQKQLFVEQHKHYLDEIIEQISEFSKRVILADANLDKVLSAYNKHRDKPIREQAENIIHLFTLTNLGAPAAFKYFDTTIDRKRYTSTKEVLDATLIHQSITGLYETRIDLSQLGGDGGGGGPAPGGSGGLDDEYRLYSPLVKPDQNIQFWLEQFPQAWAETAGMGLAKQVPPQVIQLKASATPVSVRQYPLSKEAQEGIRPHVQRLIQQGILVPVQSPWNTPLLPVRKPGTNDYRPVQDLREVNKRVQDIHPTVPNPYNLLCALPPQRSWYTVLDLKDAFFCLRLHPTSQPLFAFEWRDPGTGRTGQLTWTRLPQGFKNSPTIFNEALHRDLANFRIQHPQVTLLQYVDDLLLAGATKQDCLEGTKALLLELSDLGYRASAKKAQICRREVTYLGYSLRDGQRWLTEARKKTVVQIPAPTTAKQVREFLGKAGFCRLFIPGFATLAAPLYPLTKPKGEFSWAPEHQKAFDAIKKALLSAPALALPDVTKPFTLYVDERKGVARGVLTQTLGPWRRPVAYLSKKLDPVASGWPVCLKAIAAVAILVKDADKLTLGQNITVIAPHALENIVRQPPDRWMTNARMTHYQSLLLTERVTFAPPAALNPATLLPEETDEPVTHDCHQLLIEETGVRKDLTDIPLTGEVLTWFTDGSSYVVEGKRMAGAAVVDGTRTIWASSLPEGTSAQKAELMALTQALRLAEGKSINIYTDSRYAFATAHVHGAIYKQRGWLTSAGREIKNKEEILSLLEALHLPKRLAIIHCPGHQKAKDPISRGNQMADRVAKQAAQGVNLLPAGKRTADGSEFEKRTADGSEFESPKKKAKVE

SEQ ID NO: 7014 - protein, 2088 aa, synthetic construct
MPAAKRVKLDGGDKKYSIGLDIGTNSVGWAVITDEYKVPSKKFKVLGNTDRHSIKKNLIGALLFDSGETAEATRLKRTARRRYTRRKNRICYLQEIFSNEMAKVDDSFFHRLEESFLVEEDKKHERHPIFGNIVDEVAYHEKYPTIYHLRKKLVDSTDKADLRLIYLALAHMIKFRGHFLIEGDLNPDNSDVDKLFIQLVQTYNQLFEENPINASGVDAKAILSARLSKSRRLENLIAQLPGEKKNGLFGNLIALSLGLTPNFKSNFDLAEDAKLQLSKDTYDDDLDNLLAQIGDQYADLFLAAKNLSDAILLSDILRVNTEITKAPLSASMIKRYDEHHQDLTLLKALVRQQLPEKYKEIFFDQSKNGYAGYIDGGASQEEFYKFIKPILEKMDGTEELLVKLNREDLLRKQRTFDNGSIPHQIHLGELHAILRRQEDFYPFLKDNREKIEKILTFRIPYYVGPLARGNSRFAWMTRKSEETITPWNFEEVVDKGASAQSFIERMTNFDKNLPNEKVLPKHSLLYEYFTVYNELTKVKYVTEGMRKPAFLSGEQKKAIVDLLFKTNRKVTVKQLKEDYFKKIECFDSVEISGVEDRFNASLGTYHDLLKIIKDKDFLDNEENEDILEDIVLTLTLFEDREMIEERLKTYAHLFDDKVMKQLKRRRYTGWGRLSRKLINGIRDKQSGKTILDFLKSDGFANRNFMQLIHDDSLTFKEDIQKAQVSGQGDSLHEHIANLAGSPAIKKGILQTVKVVDELVKVMGRHKPENIVIEMARENQTTQKGQKNSRERMKRIEEGIKELGSQILKEHPVENTQLQNEKLYLYYLQNGRDMYVDQELDINRLSDYDVDHIVPQSFLKDDSIDNKVLTRSDKARGKSDNVPSEEVVKKMKNYWRQLLNAKLITQRKFDNLTKAERGGLSELDKAGFIKRQLVETRQITKHVAQILDSRMNTKYDENDKLIREVKVITLKSKLVSDFRKDFQFYKVREINNYHHAHDAYLNAVVGTALIKKYPKLESEFVYGDYKVYDVRKMIAKSEQEIGKATAKYFFYSNIMNFFKTEITLANGEIRKRPLIETNGETGEIVWDKGRDFATVRKVLSMPQVNIVKKTEVQTGGFSKESILPKRNSDKLIARKKDWDPKKYGGFDSPTVAYSVLVVAKVEKGKSKKLKSVKELLGITIMERSSFEKNPIDFLEAKGYKEVKKDLIIKLPKYSLFELENGRKRMLASAGELQKGNELALPSKYVNFLYLASHYEKLKGSPEDNEQKQLFVEQHKHYLDEIIEQISEFSKRVILADANLDKVLSAYNKHRDKPIREQAENIIHLFTLTNLGAPAAFKYFDTTIDRKRYTSTKEVLDATLIHQSITGLYETRIDLSQLGGDGGGGGPAPGGSGGTLQLDDEYRLYSPLVKPDQNIQFWLEQFPQAWAETAGMGLAKQVPPQVIQLKASATPVSVRQYPLSKEAQEGIRPHVQRLIQQGILVPVQSPWNTPLLPVRKPGTNDYRPVQDLREVNKRVQDIHPTVPNPYNLLCALPPQRSWYTVLDLKDAFFCLRLHPTSQPLFAFEWRDPGTGRTGQLTWTRLPQGFKNSPTIFDEALHRDLANFRIQHPQVTLLQYVDDLLLAGATKQDCLEGTKALLLELSDLGYRASAKKAQICRREVTYLGYSLRDGQRWLTEARKKTVVQIPAPTTAKQVREFLGTAGFCRLWIPGFATLAAPLYPLTKEKGEFSWAPEHQKAFDAIKKALLSAPALALPDVTKPFTLYVDERKGVARGVLTQTLGPWRRPVAYLSKKLDPVASGWPVCLKAIAAVAILVKDADKLTLGQNITVIAPHALENIVRQPPDRWMTNARMTHYQSLLLTERVTFAPPAALNPATLLPEETDEPVTHDCHQLLIEETGVRKDLTDIPLTGEVLTWFTDGSSYVVEGKRMAGAAVVDGTRTIWASSLPEGTSAQKAELMALTQALRLAEGKSINIYTDSRYAFATAHVHGAIYKQRGLLTSAGREIKNKEEILSLLEALHLPKRLAIIHCPGHQKAKDPISRGNQMADRVAKQAAQGVNLLAGKRTADGSEFEKRTADGSEFESPKKKAKVE

SEQ ID NO: 7015 - protein, 2086 aa, synthetic construct; identical to SEQ ID NO: 7013

SEQ ID NO: 7016 - protein, 2085 aa, synthetic construct
MPAAKRVKLDGGDKKYSIGLDIGTNSVGWAVITDEYKVPSKKFKVLGNTDRHSIKKNLIGALLFDSGETAEATRLKRTARRRYTRRKNRICYLQEIFSNEMAKVDDSFFHRLEESFLVEEDKKHERHPIFGNIVDEVAYHEKYPTIYHLRKKLVDSTDKADLRLIYLALAHMIKFRGHFLIEGDLNPDNSDVDKLFIQLVQTYNQLFEENPINASGVDAKAILSARLSKSRRLENLIAQLPGEKKNGLFGNLIALSLGLTPNFKSNFDLAEDAKLQLSKDTYDDDLDNLLAQIGDQYADLFLAAKNLSDAILLSDILRVNTEITKAPLSASMIKRYDEHHQDLTLLKALVRQQLPEKYKEIFFDQSKNGYAGYIDGGASQEEFYKFIKPILEKMDGTEELLVKLNREDLLRKQRTFDNGSIPHQIHLGELHAILRRQEDFYPFLKDNREKIEKILTFRIPYYVGPLARGNSRFAWMTRKSEETITPWNFEEVVDKGASAQSFIERMTNFDKNLPNEKVLPKHSLLYEYFTVYNELTKVKYVTEGMRKPAFLSGEQKKAIVDLLFKTNRKVTVKQLKEDYFKKIECFDSVEISGVEDRFNASLGTYHDLLKIIKDKDFLDNEENEDILEDIVLTLTLFEDREMIEERLKTYAHLFDDKVMKQLKRRRYTGWGRLSRKLINGIRDKQSGKTILDFLKSDGFANRNFMQLIHDDSLTFKEDIQKAQVSGQGDSLHEHIANLAGSPAIKKGILQTVKVVDELVKVMGRHKPENIVIEMARENQTTQKGQKNSRERMKRIEEGIKELGSQILKEHPVENTQLQNEKLYLYYLQNGRDMYVDQELDINRLSDYDVDHIVPQSFLKDDSIDNKVLTRSDKARGKSDNVPSEEVVKKMKNYWRQLLNAKLITQRKFDNLTKAERGGLSELDKAGFIKRQLVETRQITKHVAQILDSRMNTKYDENDKLIREVKVITLKSKLVSDFRKDFQFYKVREINNYHHAHDAYLNAVVGTALIKKYPKLESEFVYGDYKVYDVRKMIAKSEQEIGKATAKYFFYSNIMNFFKTEITLANGEIRKRPLIETNGETGEIVWDKGRDFATVRKVLSMPQVNIVKKTEVQTGGFSKESILPKRNSDKLIARKKDWDPKKYGGFDSPTVAYSVLVVAKVEKGKSKKLKSVKELLGITIMERSSFEKNPIDFLEAKGYKEVKKDLIIKLPKYSLFELENGRKRMLASAGELQKGNELALPSKYVNFLYLASHYEKLKGSPEDNEQKQLFVEQHKHYLDEIIEQISEFSKRVILADANLDKVLSAYNKHRDKPIREQAENIIHLFTLTNLGAPAAFKYFDTTIDRKRYTSTKEVLDATLIHQSITGLYETRIDLSQLGGDGGGGGPAPGGSGGIPWLMKKPLQLTTLVPLQEYEERLLKQTMLTGSYKEKLQSLFLKYDALWQHWENQVGHRRIKPHHIATGTVNPRPQKQYPINPKAKASIQTVINDLLKQGVLIQQNSIMNTPVYPVPKPDGKWRMVLDYREVNKTIPLIAAQNQHSAGILSSIFRGKYKTTLDLSNGFWAHSITPESYWLTAFTWLGQQYCWTRLPQGFLNSPALFNADVVDLLKEVPNVQVYVDDIYISHDDPREHLEQLEKVFSLLLNAGYVVSLKKSEIAQHEVEFLGFNITKEGRGLTETFKQKLLNITPPRDLKQLQSILGLLNFARNFIPNFSELVKPLYNIIATAPGKYITWTTDNSQQLQNIISMLNSAENLEERNPEVRLIMKVNTSPSAGYIRFYNEFAKRPIMYLNYVYTKAEVKFTNTEKLLTTIHKGLIKALDLGMGQEILVYSPIVSMTKIQKTPLPERKALPIRWITWMSYLEDPRIQFHYDKTLPELQQVPTVTDDIIAKIKHPSEFSMVFYTDGSAIKHPNVNKSHNAGMGIAQVQFKPEFTVINTWSIPLGDHTAQLAEVAAVEFACKKALKIDGPVLIVTDSFYVAESVNKELPYWQSNGFFNNKKKPLKHVSKWKSIADCIQLKPDIIIIHEKGHQPTASTFHTEGNNLADKLATQGSYVVNAGKRTADGSEFEKRTADGSEFESPKKKAKVE

SEQ ID NO: 7017 - protein, 2092 aa, synthetic construct
MPAAKRVKLDGGDKKYSIGLDIGTNSVGWAVITDEYKVPSKKFKVLGNTDRHSIKKNLIGALLFDSGETAEATRLKRTARRRYTRRKNRICYLQEIFSNEMAKVDDSFFHRLEESFLVEEDKKHERHPIFGNIVDEVAYHEKYPTIYHLRKKLVDSTDKADLRLIYLALAHMIKFRGHFLIEGDLNPDNSDVDKLFIQLVQTYNQLFEENPINASGVDAKAILSARLSKSRRLENLIAQLPGEKKNGLFGNLIALSLGLTPNFKSNFDLAEDAKLQLSKDTYDDDLDNLLAQIGDQYADLFLAAKNLSDAILLSDILRVNTEITKAPLSASMIKRYDEHHQDLTLLKALVRQQLPEKYKEIFFDQSKNGYAGYIDGGASQEEFYKFIKPILEKMDGTEELLVKLNREDLLRKQRTFDNGSIPHQIHLGELHAILRRQEDFYPFLKDNREKIEKILTFRIPYYVGPLARGNSRFAWMTRKSEETITPWNFEEVVDKGASAQSFIERMTNFDKNLPNEKVLPKHSLLYEYFTVYNELTKVKYVTEGMRKPAFLSGEQKKAIVDLLFKTNRKVTVKQLKEDYFKKIECFDSVEISGVEDRFNASLGTYHDLLKIIKDKDFLDNEENEDILEDIVLTLTLFEDREMIEERLKTYAHLFDDKVMKQLKRRRYTGWGRLSRKLINGIRDKQSGKTILDFLKSDGFANRNFMQLIHDDSLTFKEDIQKAQVSGQGDSLHEHIANLAGSPAIKKGILQTVKVVDELVKVMGRHKPENIVIEMARENQTTQKGQKNSRERMKRIEEGIKELGSQILKEHPVENTQLQNEKLYLYYLQNGRDMYVDQELDINRLSDYDVDHIVPQSFLKDDSIDNKVLTRSDKARGKSDNVPSEEVVKKMKNYWRQLLNAKLITQRKFDNLTKAERGGLSELDKAGFIKRQLVETRQITKHVAQILDSRMNTKYDENDKLIREVKVITLKSKLVSDFRKDFQFYKVREINNYHHAHDAYLNAVVGTALIKKYPKLESEFVYGDYKVYDVRKMIAKSEQEIGKATAKYFFYSNIMNFFKTEITLANGEIRKRPLIETNGETGEIVWDKGRDFATVRKVLSMPQVNIVKKTEVQTGGFSKESILPKRNSDKLIARKKDWDPKKYGGFDSPTVAYSVLVVAKVEKGKSKKLKSVKELLGITIMERSSFEKNPIDFLEAKGYKEVKKDLIIKLPKYSLFELENGRKRMLASAGELQKGNELALPSKYVNFLYLASHYEKLKGSPEDNEQKQLFVEQHKHYLDEIIEQISEFSKRVILADANLDKVLSAYNKHRDKPIREQAENIIHLFTLTNLGAPAAFKYFDTTIDRKRYTSTKEVLDATLIHQSITGLYETRIDLSQLGGDGGGGGPAPGGSGGVLNLEEEYRLHEKPVPSSIDPSWLQLFPTVWAERAGMGLANQVPPVVVELRSGASPVAVRQYPMSKEAREGIRPHIQRFLDLGVLVPCQSPWNTPLLPVKKPGTNDYRPVQDLREINKRVQDIHPTVPNPYNLLSSLPPSHTWYSVLDLKDAFFCLKLHPNSQPLFAFEWRDPEKGNTGQLTWTRLPQGFKNSPTLFNEALHRDLAPFRALNPQVVLLQYVDDLLVAAPTYRDCKEGTQKLLQELSKLGYRVSAKKAQLCQKEVTYLGYLLKEGKRWLTPARKATVMKIPPPTTPRQVREFLGTAGFCRLWIPGFASLAAPLYPLTKPSIPFIWTEEHQKAFDRIKEALLSAPALALPDLTKPFTLYVDERAGVARGVLTQTLGPWRRPVAYLSKKLDPVASGWPTCLKAVAAVALLLKDADKLTLGQNVTVIASHSLESIVRQPPDRWMTNARMTHYQSLLLNERVSFAPPAVLNPATLLPVESEATPVHRCSEILAEETGTRRDLKDQPLPGVPAWYTDGSSFIAEGKRRAGAAIVDGKRTVWASSLPEGTSAQKAELVALTQALRLAEGKDINIYTDSRYAFATAHIHGAIYKQRGWLTSAGKDIKNKEEILALLEAIHLPKRVAIIHCPGHQKGNDPVATGNRRADEAAKQAALSTRVLAETTKPAGKRTADGSEFEKRTADGSEFESPKKKAKVE

SEQ ID NO: 7018 - protein, 2096 aa, synthetic construct
MPAAKRVKLDGGDKKYSIGLDIGTNSVGWAVITDEYKVPSKKFKVLGNTDRHSIKKNLIGALLFDSGETAEATRLKRTARRRYTRRKNRICYLQEIFSNEMAKVDDSFFHRLEESFLVEEDKKHERHPIFGNIVDEVAYHEKYPTIYHLRKKLVDSTDKADLRLIYLALAHMIKFRGHFLIEGDLNPDNSDVDKLFIQLVQTYNQLFEENPINASGVDAKAILSARLSKSRRLENLIAQLPGEKKNGLFGNLIALSLGLTPNFKSNFDLAEDAKLQLSKDTYDDDLDNLLAQIGDQYADLFLAAKNLSDAILLSDILRVNTEITKAPLSASMIKRYDEHHQDLTLLKALVRQQLPEKYKEIFFDQSKNGYAGYIDGGASQEEFYKFIKPILEKMDGTEELLVKLNREDLLRKQRTFDNGSIPHQIHLGELHAILRRQEDFYPFLKDNREKIEKILTFRIPYYVGPLARGNSRFAWMTRKSEETITPWNFEEVVDKGASAQSFIERMTNFDKNLPNEKVLPKHSLLYEYFTVYNELTKVKYVTEGMRKPAFLSGEQKKAIVDLLFKTNRKVTVKQLKEDYFKKIECFDSVEISGVEDRFNASLGTYHDLLKIIKDKDFLDNEENEDILEDIVLTLTLFEDREMIEERLKTYAHLFDDKVMKQLKRRRYTGWGRLSRKLINGIRDKQSGKTILDFLKSDGFANRNFMQLIHDDSLTFKEDIQKAQVSGQGDSLHEHIANLAGSPAIKKGILQTVKVVDELVKVMGRHKPENIVIEMARENQTTQKGQKNSRERMKRIEEGIKELGSQILKEHPVENTQLQNEKLYLYYLQNGRDMYVDQELDINRLSDYDVDHIVPQSFLKDDSIDNKVLTRSDKARGKSDNVPSEEVVKKMKNYWRQLLNAKLITQRKFDNLTKAERGGLSELDKAGFIKRQLVETRQITKHVAQILDSRMNTKYDENDKLIREVKVITLKSKLVSDFRKDFQFYKVREINNYHHAHDAYLNAVVGTALIKKYPKLESEFVYGDYKVYDVRKMIAKSEQEIGKATAKYFFYSNIMNFFKTEITLANGEIRKRPLIETNGETGEIVWDKGRDFATVRKVLSMPQVNIVKKTEVQTGGFSKESILPKRNSDKLIARKKDWDPKKYGGFDSPTVAYSVLVVAKVEKGKSKKLKSVKELLGITIMERSSFEKNPIDFLEAKGYKEVKKDLIIKLPKYSLFELENGRKRMLASAGELQKGNELALPSKYVNFLYLASHYEKLKGSPEDNEQKQLFVEQHKHYLDEIIEQISEFSKRVILADANLDKVLSAYNKHRDKPIREQAENIIHLFTLTNLGAPAAFKYFDTTIDRKRYTSTKEVLDATLIHQSITGLYETRIDLSQLGGDGGPAPGGSGGGGGTAPLEEEYRLFLEAPIQNVTLLEQWKREIPKVWAEINPPGLASTQAPIHVQLLSTALPVRVRQYPITLEAKRSLRETIRKFRAAGILRPVHSPWNTPLLPVRKSGTSEYRMVQDLREVNKRVETIHPTVPNPYTLLSLLPPDRIWYSVLDLKDAFFCIPLAPESQLIFAFEWADAEEGESGQLTWTRLPQGFKNSPTLFNEALNRDLQGFRLDHPSVSLLQYVDDLLIAADTQAACLSATRDLLMTLAELGYRVSGKKAQLCQEEVTYLGFKIHKGSRSLSNSRTQAILQIPVPKTKRQVREFLGTIGYCRLWIPGFAELAQPLYAATRPGNDPLVWGEKEEEAFQSLKLALTQPPALALPSLDKPFQLFVEETSGAAKGVLTQALGPWKRPVAYLSKRLDPVAAGWPRCLRAIAAAALLTREASKLTFGQDIEITSSHNLESLLRSPPDKWLTNARITQYQVLLLDPPRVRFKQTAALNPATLLPETDDTLPIHHCLDTLDSLTSTRPDLTDQPLAQAEATLFTDGSSYIRDGKRYAGAAVVTLDSVIWAEPLPIGTSAQKAELIALTKALEWSKDKSVNIYTDSRYAFATLHVHGMIYRERGWLTAGGKAIKNAPEILALLTAVWLPKRVAVMHCKGHQKDDAPTSTGNRRADEVAREVAIRPLSTQATISAGKRTADGSEFEKRTADGSEFESPKKKAKVE

SEQ ID NO: 7019 - protein, 2092 aa, synthetic construct
MPAAKRVKLDGGDKKYSIGLDIGTNSVGWAVITDEYKVPSKKFKVLGNTDRHSIKKNLIGALLFDSGETAEATRLKRTARRRYTRRKNRICYLQEIFSNEMAKVDDSFFHRLEESFLVEEDKKHERHPIFGNIVDEVAYHEKYPTIYHLRKKLVDSTDKADLRLIYLALAHMIKFRGHFLIEGDLNPDNSDVDKLFIQLVQTYNQLFEENPINASGVDAKAILSARLSKSRRLENLIAQLPGEKKNGLFGNLIALSLGLTPNFKSNFDLAEDAKLQLSKDTYDDDLDNLLAQIGDQYADLFLAAKNLSDAILLSDILRVNTEITKAPLSASMIKRYDEHHQDLTLLKALVRQQLPEKYKEIFFDQSKNGYAGYIDGGASQEEFYKFIKPILEKMDGTEELLVKLNREDLLRKQRTFDNGSIPHQIHLGELHAILRRQEDFYPFLKDNREKIEKILTFRIPYYVGPLARGNSRFAWMTRKSEETITPWNFEEVVDKGASAQSFIERMTNFDKNLPNEKVLPKHSLLYEYFTVYNELTKVKYVTEGMRKPAFLSGEQKKAIVDLLFKTNRKVTVKQLKEDYFKKIECFDSVEISGVEDRFNASLGTYHDLLKIIKDKDFLDNEENEDILEDIVLTLTLFEDREMIEERLKTYAHLFDDKVMKQLKRRRYTGWGRLSRKLINGIRDKQSGKTILDFLKSDGFANRNFMQLIHDDSLTFKEDIQKAQVSGQGDSLHEHIANLAGSPAIKKGILQTVKVVDELVKVMGRHKPENIVIEMARENQTTQKGQKNSRERMKRIEEGIKELGSQILKEHPVENTQLQNEKLYLYYLQNGRDMYVDQELDINRLSDYDVDHIVPQSFLKDDSIDNKVLTRSDKARGKSDNVPSEEVVKKMKNYWRQLLNAKLITQRKFDNLTKAERGGLSELDKAGFIKRQLVETRQITKHVAQILDSRMNTKYDENDKLIREVKVITLKSKLVSDFRKDFQFYKVREINNYHHAHDAYLNAVVGTALIKKYPKLESEFVYGDYKVYDVRKMIAKSEQEIGKATAKYFFYSNIMNFFKTEITLANGEIRKRPLIETNGETGEIVWDKGRDFATVRKVLSMPQVNIVKKTEVQTGGFSKESILPKRNSDKLIARKKDWDPKKYGGFDSPTVAYSVLVVAKVEKGKSKKLKSVKELLGITIMERSSFEKNPIDFLEAKGYKEVKKDLIIKLPKYSLFELENGRKRMLASAGELQKGNELALPSKYVNFLYLASHYEKLKGSPEDNEQKQLFVEQHKHYLDEIIEQISEFSKRVILADANLDKVLSAYNKHRDKPIREQAENIIHLFTLTNLGAPAAFKYFDTTIDRKRYTSTKEVLDATLIHQSITGLYETRIDLSQLGGDGGPAPGGSGGGGGVLNLEEEYRLHEKPVPSSIDPSWLQLFPTVWAERAGMGLANQVPPVVVELRSGASPVAVRQYPMSKEAREGIRPHIQKFLDLGVLVPCRSPWNTPLLPVKKPGTNDYRPVQDLREINKRVQDIHPTVPNPYNLLSSLPPSYTWYSVLDLKDAFFCLRLHPNSQPLFAFEWKDPEKGNTGQLTWTRLPQGFKNSPTLFNEALHRDLAPFRALNPQVVLLQYVDDLLVAAPTYEDCKKGTQKLLQELSKLGYRVSAKKAQLCQREVTYLGYLLKEGKRWLTPARKATVMKIPVPTTPRQVREFLGKAGFCRLFIPGFASLAAPLYPLTKPSIPFIWTEEHQQAFDHIKKALLSAPALALPDLTKPFTLYIDERAGVARGVLTQTLGPWRRPVAYLSKKLDPVASGWPTCLKAVAAVALLLKDADKLTLGQNVTVIASHSLESIVRQPPDRWMTNARMTHYQSLLLNERVSFAPPAVLNPATLLPVESEATPVHRCSEILAEETGTRRDLEDQPLPGVPTWYTDGSSFITEGKRRAGAPIVDGKRTVWASSLPEGTSAQKAELVALTQALRLAEGKNINIYTDSRYAFATAHIHGAIYKQRGWLTSAGKDIKNKEEILALLEAIHLPRRVAIIHCPGHQRGSNPVATGNRRADEAAKQAALSTRVLAGTTKPAGKRTADGSEFEKRTADGSEFESPKKKAKVE

SEQ ID NO: 7020 - protein, 2094 aa, synthetic construct
MPAAKRVKLDGGDKKYSIGLDIGTNSVGWAVITDEYKVPSKKFKVLGNTDRHSIKKNLIGALLFDSGETAEATRLKRTARRRYTRRKNRICYLQEIFSNEMAKVDDSFFHRLEESFLVEEDKKHERHPIFGNIVDEVAYHEKYPTIYHLRKKLVDSTDKADLRLIYLALAHMIKFRGHFLIEGDLNPDNSDVDKLFIQLVQTYNQLFEENPINASGVDAKAILSARLSKSRRLENLIAQLPGEKKNGLFGNLIALSLGLTPNFKSNFDLAEDAKLQLSKDTYDDDLDNLLAQIGDQYADLFLAAKNLSDAILLSDILRVNTEITKAPLSASMIKRYDEHHQDLTLLKALVRQQLPEKYKEIFFDQSKNGYAGYIDGGASQEEFYKFIKPILEKMDGTEELLVKLNREDLLRKQRTFDNGSIPHQIHLGELHAILRRQEDFYPFLKDNREKIEKILTFRIPYYVGPLARGNSRFAWMTRKSEETITPWNFEEVVDKGASAQSFIERMTNFDKNLPNEKVLPKHSLLYEYFTVYNELTKVKYVTEGMRKPAFLSGEQKKAIVDLLFKTNRKVTVKQLKEDYFKKIECFDSVEISGVEDRFNASLGTYHDLLKIIKDKDFLDNEENEDILEDIVLTLTLFEDREMIEERLKTYAHLFDDKVMKQLKRRRYTGWGRLSRKLINGIRDKQSGKTILDFLKSDGFANRNFMQLIHDDSLTFKEDIQKAQVSGQGDSLHEHIANLAGSPAIKKGILQTVKVVDELVKVMGRHKPENIVIEMARENQTTQKGQKNSRERMKRIEEGIKELGSQILKEHPVENTQLQNEKLYLYYLQNGRDMYVDQELDINRLSDYDVDHIVPQSFLKDDSIDNKVLTRSDKARGKSDNVPSEEVVKKMKNYWRQLLNAKLITQRKFDNLTKAERGGLSELDKAGFIKRQLVETRQITKHVAQILDSRMNTKYDENDKLIREVKVITLKSKLVSDFRKDFQFYKVREINNYHHAHDAYLNAVVGTALIKKYPKLESEFVYGDYKVYDVRKMIAKSEQEIGKATAKYFFYSNIMNFFKTEITLANGEIRKRPLIETNGETGEIVWDKGRDFATVRKVLSMPQVNIVKKTEVQTGGFSKESILPKRNSDKLIARKKDWDPKKYGGFDSPTVAYSVLVVAKVEKGKSKKLKSVKELLGITIMERSSFEKNPIDFLEAKGYKEVKKDLIIKLPKYSLFELENGRKRMLASAGELQKGNELALPSKYVNFLYLASHYEKLKGSPEDNEQKQLFVEQHKHYLDEIIEQISEFSKRVILADANLDKVLSAYNKHRDKPIREQAENIIHLFTLTNLGAPAAFKYFDTTIDRKRYTSTKEVLDATLIHQSITGLYETRIDLSQLGGDGGPAPGGSGGGGGTLNLEDEYRLYETSAEPEVSPGSTWLSDFPQAWAETGGMGLAVRQAPLIIPLKATSTPVSIKQYPMSQEAKLGIKPHIQRLLDQGILVPCQSPWNTPLLPVKKPGTNDYRPVQDLREVNKRVEDIHPTVPNPYNLLSGLPPSHRWYTVLDLKDAFFCLRLHPTSQPLFAFEWRDPGMGISGQLTWTRLPQGFKNSPTLFNEALHRDLADFRIQHPDLILLQYVDDILLAATSELDCQQGTRALLLTLGNLGYRASAKKAQLCQKQVKYLGYLLKEGQRWLTEARKETVMGQPTPKTPRQLREFLGKAGFCRLFIPGFAEMAAPLYPLTKPGTLFNWGPDQQKAYQEIKQALLTAPALGLPDLTKPFELFVDEKQGYAKGVLTQKLGPWRRPVAYLSKKLDPVAAGWPPCLRMVAAIAVLRKDAGKLTMGQPLVILAPHAVEALVKQPPDRWLSNARMTHYQAMLLDTDRVQFGPVVALNPATLLPLPEEGAPHDCLEILAETHGTRPDLTDQPIPDADHTWYTDGSSFLQEGQRKAGAAVTTETEVIWARALPAGTSAQRAELIALTQALKMAEGKRLNVYTDSRYAFATAHIHGEIYRRRGWLTSEGREIKNKSEILALLKALFLPKRLSIIHCLGHQKGDSAEARGNRLADQAAREAAIKTPPDTSTLLAGKRTADGSEFEKRTADGSEFESPKKKAKVE

SEQ ID NO: 7021 - protein, 2094 aa, synthetic construct
MPAAKRVKLDGGDKKYSIGLDIGTNSVGWAVITDEYKVPSKKFKVLGNTDRHSIKKNLIGALLFDSGETAEATRLKRTARRRYTRRKNRICYLQEIFSNEMAKVDDSFFHRLEESFLVEEDKKHERHPIFGNIVDEVAYHEKYPTIYHLRKKLVDSTDKADLRLIYLALAHMIKFRGHFLIEGDLNPDNSDVDKLFIQLVQTYNQLFEENPINASGVDAKAILSARLSKSRRLENLIAQLPGEKKNGLFGNLIALSLGLTPNFKSNFDLAEDAKLQLSKDTYDDDLDNLLAQIGDQYADLFLAAKNLSDAILLSDILRVNTEITKAPLSASMIKRYDEHHQDLTLLKALVRQQLPEKYKEIFFDQSKNGYAGYIDGGASQEEFYKFIKPILEKMDGTEELLVKLNREDLLRKQRTFDNGSIPHQIHLGELHAILRRQEDFYPFLKDNREKIEKILTFRIPYYVGPLARGNSRFAWMTRKSEETITPWNFEEVVDKGASAQSFIERMTNFDKNLPNEKVLPKHSLLYEYFTVYNELTKVKYVTEGMRKPAFLSGEQKKAIVDLLFKTNRKVTVKQLKEDYFKKIECFDSVEISGVEDRFNASLGTYHDLLKIIKDKDFLDNEENEDILEDIVLTLTLFEDREMIEERLKTYAHLFDDKVMKQLKRRRYTGWGRLSRKLINGIRDKQSGKTILDFLKSDGFANRNFMQLIHDDSLTFKEDIQKAQVSGQGDSLHEHIANLAGSPAIKKGILQTVKVVDELVKVMGRHKPENIVIEMARENQTTQKGQKNSRERMKRIEEGIKELGSQILKEHPVENTQLQNEKLYLYYLQNGRDMYVDQELDINRLSDYDVDHIVPQSFLKDDSIDNKVLTRSDKARGKSDNVPSEEVVKKMKNYWRQLLNAKLITQRKFDNLTKAERGGLSELDKAGFIKRQLVETRQITKHVAQILDSRMNTKYDENDKLIREVKVITLKSKLVSDFRKDFQFYKVREINNYHHAHDAYLNAVVGTALIKKYPKLESEFVYGDYKVYDVRKMIAKSEQEIGKATAKYFFYSNIMNFFKTEITLANGEIRKRPLIETNGETGEIVWDKGRDFATVRKVLSMPQVNIVKKTEVQTGGFSKESILPKRNSDKLIARKKDWDPKKYGGFDSPTVAYSVLVVAKVEKGKSKKLKSVKELLGITIMERSSFEKNPIDFLEAKGYKEVKKDLIIKLPKYSLFELENGRKRMLASAGELQKGNELALPSKYVNFLYLASHYEKLKGSPEDNEQKQLFVEQHKHYLDEIIEQISEFSKRVILADANLDKVLSAYNKHRDKPIREQAENIIHLFTLTNLGAPAAFKYFDTTIDRKRYTSTKEVLDATLIHQSITGLYETRIDLSQLGGDGGPAPGGSGGGGGTLGIEDEYRLHETSTEPDVSLGSTWLSDFPQAWAETGGMGLAVRQAPLIIPLKATSTPVSIQQYPMSHEARLGIKPHIQRLLDQGILVPCQSPWNTPLLPVKKPGTNDYRPVQDLREVNKRVEDIHPTVPNPYNLLSGLPPSHQWYTVLDLKDAFFCLRLHPTSQPLFAFEWRDPGMGISGQLTWTRLPQGFKNSPTLFDEALHRDLADFRIQHPDLILLQYVDDILLAATSELDCQQGTRALLQTLGDLGYRASAKKAQICQKQVKYLGYLLREGQRWLTEARKETVMGQPVPKTPRQLREFLGTAGFCRLWIPGFAEMAAPLYPLTKTGTLFSWGPDQQKAYQEIKQALLTAPALGLPDLTKPFELFVDEKQGYAKGVLTQKLGPWRRPVAYLSKKLDPVAAGWPPCLRMVAAIAVLTKDAGKLTMGQPLVILAPHAVEALVKQPPDRWLSNARMTHYQAMLLDTDRVQFGPVVALNPATLLPLPEEGAPHDCLEILAETHGTRPDLTDQPIPDADHTWYTDGSSFLQEGQRKAGAAVTTETEVIWAGALPAGTSAQRAELIALTQALKMAEGKRLNVYTDSRYAFATAHIHGEIYRRRGLLTSEGREIKNKSEILALLKALFLPKRLSIIHCLGHQKGDSAEARGNRLADQAAREAAIKTPPDTSTLLAGKRTADGSEFEKRTADGSEFESPKKKAKVE

SEQ ID NO: 7022 - protein, 2094 aa, synthetic construct
MPAAKRVKLDGGDKKYSIGLDIGTNSVGWAVITDEYKVPSKKFKVLGNTDRHSIKKNLIGALLFDSGETAEATRLKRTARRRYTRRKNRICYLQEIFSNEMAKVDDSFFHRLEESFLVEEDKKHERHPIFGNIVDEVAYHEKYPTIYHLRKKLVDSTDKADLRLIYLALAHMIKFRGHFLIEGDLNPDNSDVDKLFIQLVQTYNQLFEENPINASGVDAKAILSARLSKSRRLENLIAQLPGEKKNGLFGNLIALSLGLTPNFKSNFDLAEDAKLQLSKDTYDDDLDNLLAQIGDQYADLFLAAKNLSDAILLSDILRVNTEITKAPLSASMIKRYDEHHQDLTLLKALVRQQLPEKYKEIFFDQSKNGYAGYIDGGASQEEFYKFIKPILEKMDGTEELLVKLNREDLLRKQRTFDNGSIPHQIHLGELHAILRRQEDFYPFLKDNREKIEKILTFRIPYYVGPLARGNSRFAWMTRKSEETITPWNFEEVVDKGASAQSFIERMTNFDKNLPNEKVLPKHSLLYEYFTVYNELTKVKYVTEGMRKPAFLSGEQKKAIVDLLFKTNRKVTVKQLKEDYFKKIECFDSVEISGVEDRFNASLGTYHDLLKIIKDKDFLDNEENEDILEDIVLTLTLFEDREMIEERLKTYAHLFDDKVMKQLKRRRYTGWGRLSRKLINGIRDKQSGKTILDFLKSDGFANRNFMQLIHDDSLTFKEDIQKAQVSGQGDSLHEHIANLAGSPAIKKGILQTVKVVDELVKVMGRHKPENIVIEMARENQTTQKGQKNSRERMKRIEEGIKELGSQILKEHPVENTQLQNEKLYLYYLQNGRDMYVDQELDINRLSDYDVDHIVPQSFLKDDSIDNKVLTRSDKARGKSDNVPSEEVVKKMKNYWRQLLNAKLITQRKFDNLTKAERGGLSELDKAGFIKRQLVETRQITKHVAQILDSRMNTKYDENDKLIREVKVITLKSKLVSDFRKDFQFYKVREINNYHHAHDAYLNAVVGTALIKKYPKLESEFVYGDYKVYDVRKMIAKSEQEIGKATAKYFFYSNIMNFFKTEITLANGEIRKRPLIETNGETGEIVWDKGRDFATVRKVLSMPQVNIVKKTEVQTGGFSKESILPKRNSDKLIARKKDWDPKKYGGFDSPTVAYSVLVVAKVEKGKSKKLKSVKELLGITIMERSSFEKNPIDFLEAKGYKEVKKDLIIKLPKYSLFELENGRKRMLASAGELQKGNELALPSKYVNFLYLASHYEKLKGSPEDNEQKQLFVEQHKHYLDEIIEQISEFSKRVILADANLDKVLSAYNKHRDKPIREQAENIIHLFTLTNLGAPAAFKYFDTTIDRKRYTSTKEVLDATLIHQSITGLYETRIDLSQLGGDGGPAPGGSGGGGGTLNIEDEHRLHETSKEPDVSLGSTWLSDFPQAWAETGGMGLAVRQAPLIIPLKATSTPVSIKQYPMSQEARLGIKPHIQRLLDQGILVPCQSPWNTPLLPVKKPGTNDYRPVQDLREVNKRVEDIHPTVPNPYNLLSGLPPSHQWYTVLDLKDAFFCLRLHPTSQPLFAFEWRDPEMGISGQLTWTRLPQGFKNSPTLFDEALHRDLADFRIQHPDLILLQYVDDLLLAATSELDCQQGTRALLQTLGNLGYRASAKKAQICQKQVKYLGYLLKEGQRWLTEARKETVMGQPTPKTPRQLREFLGTAGFCRLWIPGFAEMAAPLYPLTKTGTLFNWGPDQQKAYQEIKQALLTAPALGLPDLTKPFELFVDEKQGYAKGVLTQKLGPWRRPVAYLSKKLDPVAAGWPPCLRMVAAIAVLTKDAGKLTMGQPLVILAPHAVEALVKQPPDRWLSNARMTHYQALLLDTDRVQFGPVVALNPATLLPLPEEGLQHNCLDILAEAHGTRPDLTDQPLPDADHTWYTDGSSLLQEGQRKAGAAVTTETEVIWAKALPAGTSAQRAELIALTQALKMAEGKKLNVYTDSRYAFATAHIHGEIYRRRGLLTSEGKEIKNKDEILALLKALFLPKRLSIIHCPGHQKGHSAEARGNRMADQAARKAAITETPDTSTLLAGKRTADGSEFEKRTADGSEFESPKKKAKVE

SEQ ID NO: 7023 - protein, 2088 aa, synthetic construct
MPAAKRVKLDGGDKKYSIGLDIGTNSVGWAVITDEYKVPSKKFKVLGNTDRHSIKKNLIGALLFDSGETAEATRLKRTARRRYTRRKNRICYLQEIFSNEMAKVDDSFFHRLEESFLVEEDKKHERHPIFGNIVDEVAYHEKYPTIYHLRKKLVDSTDKADLRLIYLALAHMIKFRGHFLIEGDLNPDNSDVDKLFIQLVQTYNQLFEENPINASGVDAKAILSARLSKSRRLENLIAQLPGEKKNGLFGNLIALSLGLTPNFKSNFDLAEDAKLQLSKDTYDDDLDNLLAQIGDQYADLFLAAKNLSDAILLSDILRVNTEITKAPLSASMIKRYDEHHQDLTLLKALVRQQLPEKYKEIFFDQSKNGYAGYIDGGASQEEFYKFIKPILEKMDGTEELLVKLNREDLLRKQRTFDNGSIPHQIHLGELHAILRRQEDFYPFLKDNREKIEKILTFRIPYYVGPLARGNSRFAWMTRKSEETITPWNFEEVVDKGASAQSFIERMTNFDKNLPNEKVLPKHSLLYEYFTVYNELTKVKYVTEGMRKPAFLSGEQKKAIVDLLFKTNRKVTVKQLKEDYFKKIECFDSVEISGVEDRFNASLGTYHDLLKIIKDKDFLDNEENEDILEDIVLTLTLFEDREMIEERLKTYAHLFDDKVMKQLKRRRYTGWGRLSRKLINGIRDKQSGKTILDFLKSDGFANRNFMQLIHDDSLTFKEDIQKAQVSGQGDSLHEHIANLAGSPAIKKGILQTVKVVDELVKVMGRHKPENIVIEMARENQTTQKGQKNSRERMKRIEEGIKELGSQILKEHPVENTQLQNEKLYLYYLQNGRDMYVDQELDINRLSDYDVDHIVPQSFLKDDSIDNKVLTRSDKARGKSDNVPSEEVVKKMKNYWRQLLNAKLITQRKFDNLTKAERGGLSELDKAGFIKRQLVETRQITKHVAQILDSRMNTKYDENDKLIREVKVITLKSKLVSDFRKDFQFYKVREINNYHHAHDAYLNAVVGTALIKKYPKLESEFVYGDYKVYDVRKMIAKSEQEIGKATAKYFFYSNIMNFFKTEITLANGEIRKRPLIETNGETGEIVWDKGRDFATVRKVLSMPQVNIVKKTEVQTGGFSKESILPKRNSDKLIARKKDWDPKKYGGFDSPTVAYSVLVVAKVEKGKSKKLKSVKELLGITIMERSSFEKNPIDFLEAKGYKEVKKDLIIKLPKYSLFELENGRKRMLASAGELQKGNELALPSKYVNFLYLASHYEKLKGSPEDNEQKQLFVEQHKHYLDEIIEQISEFSKRVILADANLDKVLSAYNKHRDKPIREQAENIIHLFTLTNLGAPAAFKYFDTTIDRKRYTSTKEVLDATLIHQSITGLYETRIDLSQLGGDGGPAPGGSGGGGGTLQLDDEYRLYSPLVKPDQNIQFWLEQFPQAWAETAGMGLAKQVPPQVIQLKASATPVSVRQYPLSKEAQEGIRPHVQRLIQQGILVPVQSPWNTPLLPVRKPGTNDYRPVQDLREVNKRVQDIHPTVPNPYNLLCALPPQRSWYTVLDLKDAFFCLRLHPTSQPLFAFEWRDPGTGRTGQLTWTRLPQGFKNSPTIFDEALHRDLANFRIQHPQVTLLQYVDDLLLAGATKQDCLEGTKALLLELSDLGYRASAKKAQICRREVTYLGYSLRDGQRWLTEARKKTVVQIPAPTTAKQVREFLGTAGFCRLWIPGFATLAAPLYPLTKEKGEFSWAPEHQKAFDAIKKALLSAPALALPDVTKPFTLYVDERKGVARGVLTQTLGPWRRPVAYLSKKLDPVASGWPVCLKAIAAVAILVKDADKLTLGQNITVIAPHALENIVRQPPDRWMTNARMTHYQSLLLTERVTFAPPAALNPATLLPEETDEPVTHDCHQLLIEETGVRKDLTDIPLTGEVLTWFTDGSSYVVEGKRMAGAAVVDGTRTIWASSLPEGTSAQKAELMALTQALRLAEGKSINIYTDSRYAFATAHVHGAIYKQRGLLTSAGREIKNKEEILSLLEALHLPKRLAIIHCPGHQKAKDPISRGNQMADRVAKQAAQGVNLLAGKRTADGSEFEKRTADGSEFESPKKKAKVE

SEQ ID NO: 7024 - protein, 2085 aa, synthetic construct
MPAAKRVKLDGGDKKYSIGLDIGTNSVGWAVITDEYKVPSKKFKVLGNTDRHSIKKNLIGALLFDSGETAEATRLKRTARRRYTRRKNRICYLQEIFSNEMAKVDDSFFHRLEESFLVEEDKKHERHPIFGNIVDEVAYHEKYPTIYHLRKKLVDSTDKADLRLIYLALAHMIKFRGHFLIEGDLNPDNSDVDKLFIQLVQTYNQLFEENPINASGVDAKAILSARLSKSRRLENLIAQLPGEKKNGLFGNLIALSLGLTPNFKSNFDLAEDAKLQLSKDTYDDDLDNLLAQIGDQYADLFLAAKNLSDAILLSDILRVNTEITKAPLSASMIKRYDEHHQDLTLLKALVRQQLPEKYKEIFFDQSKNGYAGYIDGGASQEEFYKFIKPILEKMDGTEELLVKLNREDLLRKQRTFDNGSIPHQIHLGELHAILRRQEDFYPFLKDNREKIEKILTFRIPYYVGPLARGNSRFAWMTRKSEETITPWNFEEVVDKGASAQSFIERMTNFDKNLPNEKVLPKHSLLYEYFTVYNELTKVKYVTEGMRKPAFLSGEQKKAIVDLLFKTNRKVTVKQLKEDYFKKIECFDSVEISGVEDRFNASLGTYHDLLKIIKDKDFLDNEENEDILEDIVLTLTLFEDREMIEERLKTYAHLFDDKVMKQLKRRRYTGWGRLSRKLINGIRDKQSGKTILDFLKSDGFANRNFMQLIHDDSLTFKEDIQKAQVSGQGDSLHEHIANLAGSPAIKKGILQTVKVVDELVKVMGRHKPENIVIEMARENQTTQKGQKNSRERMKRIEEGIKELGSQILKEHPVENTQLQNEKLYLYYLQNGRDMYVDQELDINRLSDYDVDHIVPQSFLKDDSIDNKVLTRSDKARGKSDNVPSEEVVKKMKNYWRQLLNAKLITQRKFDNLTKAERGGLSELDKAGFIKRQLVETRQITKHVAQILDSRMNTKYDENDKLIREVKVITLKSKLVSDFRKDFQFYKVREINNYHHAHDAYLNAVVGTALIKKYPKLESEFVYGDYKVYDVRKMIAKSEQEIGKATAKYFFYSNIMNFFKTEITLANGEIRKRPLIETNGETGEIVWDKGRDFATVRKVLSMPQVNIVKKTEVQTGGFSKESILPKRNSDKLIARKKDWDPKKYGGFDSPTVAYSVLVVAKVEKGKSKKLKSVKELLGITIMERSSFEKNPIDFLEAKGYKEVKKDLIIKLPKYSLFELENGRKRMLASAGELQKGNELALPSKYVNFLYLASHYEKLKGSPEDNEQKQLFVEQHKHYLDEIIEQISEFSKRVILADANLDKVLSAYNKHRDKPIREQAENIIHLFTLTNLGAPAAFKYFDTTIDRKRYTSTKEVLDATLIHQSITGLYETRIDLSQLGGDGGPAPGGSGGGGGIPWLMKKPLQLTTLVPLQEYEERLLKQTMLTGSYKEKLQSLFLKYDALWQHWENQVGHRRIKPHHIATGTVNPRPQKQYPINPKAKASIQTVINDLLKQGVLIQQNSIMNTPVYPVPKPDGKWRMVLDYREVNKTIPLIAAQNQHSAGILSSIFRGKYKTTLDLSNGFWAHSITPESYWLTAFTWLGQQYCWTRLPQGFLNSPALFNADVVDLLKEVPNVQVYVDDIYISHDDPREHLEQLEKVFSLLLNAGYVVSLKKSEIAQHEVEFLGFNITKEGRGLTETFKQKLLNITPPRDLKQLQSILGKLNFARNFIPNFSELVKPLYNIIATAPGKYITWTTDNSQQLQNIISMLNSAENLEERNPEVRLIMKVNTSPSAGYIRFYNEFAKRPIMYLNYVYTKAEVKFTNTEKLLTTIHKGLIKALDLGMGQEILVYSPIVSMTKIQKTPLPERKALPIRWITWMSYLEDPRIQFHYDKTLPELQQVPTVTDDIIAKIKHPSEFSMVFYTDGSAIKHPNVNKSHNAGMGIAQVQFKPEFTVINTWSIPLGDHTAQLAEVAAVEFACKKALKIDGPVLIVTDSFYVAESVNKELPYWQSNGFFNNKKKPLKHVSKWKSIADCIQLKPDIIIIHEKGHQPTASTFHTEGNNLADKLATQGSYVVNAGKRTADGSEFEKRTADGSEFESPKKKAKVE

SEQ ID NO: 7025 - protein, 2096 aa, synthetic construct
MPAAKRVKLDGGDKKYSIGLDIGTNSVGWAVITDEYKVPSKKFKVLGNTDRHSIKKNLIGALLFDSGETAEATRLKRTARRRYTRRKNRICYLQEIFSNEMAKVDDSFFHRLEESFLVEEDKKHERHPIFGNIVDEVAYHEKYPTIYHLRKKLVDSTDKADLRLIYLALAHMIKFRGHFLIEGDLNPDNSDVDKLFIQLVQTYNQLFEENPINASGVDAKAILSARLSKSRRLENLIAQLPGEKKNGLFGNLIALSLGLTPNFKSNFDLAEDAKLQLSKDTYDDDLDNLLAQIGDQYADLFLAAKNLSDAILLSDILRVNTEITKAPLSASMIKRYDEHHQDLTLLKALVRQQLPEKYKEIFFDQSKNGYAGYIDGGASQEEFYKFIKPILEKMDGTEELLVKLNREDLLRKQRTFDNGSIPHQIHLGELHAILRRQEDFYPFLKDNREKIEKILTFRIPYYVGPLARGNSRFAWMTRKSEETITPWNFEEVVDKGASAQSFIERMTNFDKNLPNEKVLPKHSLLYEYFTVYNELTKVKYVTEGMRKPAFLSGEQKKAIVDLLFKTNRKVTVKQLKEDYFKKIECFDSVEISGVEDRFNASLGTYHDLLKIIKDKDFLDNEENEDILEDIVLTLTLFEDREMIEERLKTYAHLFDDKVMKQLKRRRYTGWGRLSRKLINGIRDKQSGKTILDFLKSDGFANRNFMQLIHDDSLTFKEDIQKAQVSGQGDSLHEHIANLAGSPAIKKGILQTVKVVDELVKVMGRHKPENIVIEMARENQTTQKGQKNSRERMKRIEEGIKELGSQILKEHPVENTQLQNEKLYLYYLQNGRDMYVDQELDINRLSDYDVDHIVPQSFLKDDSIDNKVLTRSDKARGKSDNVPSEEVVKKMKNYWRQLLNAKLITQRKFDNLTKAERGGLSELDKAGFIKRQLVETRQITKHVAQILDSRMNTKYDENDKLIREVKVITLKSKLVSDFRKDFQFYKVREINNYHHAHDAYLNAVVGTALIKKYPKLESEFVYGDYKVYDVRKMIAKSEQEIGKATAKYFFYSNIMNFFKTEITLANGEIRKRPLIETNGETGEIVWDKGRDFATVRKVLSMPQVNIVKKTEVQTGGFSKESILPKRNSDKLIARKKDWDPKKYGGFDSPTVAYSVLVVAKVEKGKSKKLKSVKELLGITIMERSSFEKNPIDFLEAKGYKEVKKDLIIKLPKYSLFELENGRKRMLASAGELQKGNELALPSKYVNFLYLASHYEKLKGSPEDNEQKQLFVEQHKHYLDEIIEQISEFSKRVILADANLDKVLSAYNKHRDKPIREQAENIIHLFTLTNLGAPAAFKYFDTTIDRKRYTSTKEVLDATLIHQSITGLYETRIDLSQLGGDGGPAPGGGGGSGGTAPLEEEYRLFLEAPIQNVTLLEQWKREIPKVWAEINPPGLASTQAPIHVQLLSTALPVRVRQYPITLEAKRSLRETIRKFRAAGILRPVHSPWNTPLLPVRKSGTSEYRMVQDLREVNKRVETIHPTVPNPYTLLSLLPPDRIWYSVLDLKDAFFCIPLAPESQLIFAFEWADAEEGESGQLTWTRLPQGFKNSPTLFDEALNRDLQGFRLDHPSVSLLQYVDDLLIAADTQAACLSATRDLLMTLAELGYRVSGKKAQLCQEEVTYLGFKIHKGSRSLSNSRTQAILQIPVPKTKRQVREFLGTIGYCRLWIPGFAELAQPLYAATRGGNDPLVWGEKEEEAFQSLKLALTQPPALALPSLDKPFQLFVEETSGAAKGVLTQALGPWKRPVAYLSKRLDPVAAGWPRCLRAIAAAALLTREASKLTFGQDIEITSSHNLESLLRSPPDKWLTNARITQYQVLLLDPPRVRFKQTAALNPATLLPETDDTLPIHHCLDTLDSLTSTRPDLTDQPLAQAEATLFTDGSSYIRDGKRYAGAAVVTLDSVIWAEPLPIGTSAQKAELIALTKALEWSKDKSVNIYTDSRYAFATLHVHGMIYRERGLLTAGGKAIKNAPEILALLTAVWLPKRVAVMHCKGHQKDDAPTSTGNRRADEVAREVAIRPLSTQATISAGKRTADGSEFEKRTADGSEFESPKKKAKVE

SEQ ID NO: 7026 - protein, 2100 aa, synthetic construct
MPAAKRVKLDGGDKKYSIGLDIGTNSVGWAVITDEYKVPSKKFKVLGNTDRHSIKKNLIGALLFDSGETAEATRLKRTARRRYTRRKNRICYLQEIFSNEMAKVDDSFFHRLEESFLVEEDKKHERHPIFGNIVDEVAYHEKYPTIYHLRKKLVDSTDKADLRLIYLALAHMIKFRGHFLIEGDLNPDNSDVDKLFIQLVQTYNQLFEENPINASGVDAKAILSARLSKSRRLENLIAQLPGEKKNGLFGNLIALSLGLTPNFKSNFDLAEDAKLQLSKDTYDDDLDNLLAQIGDQYADLFLAAKNLSDAILLSDILRVNTEITKAPLSASMIKRYDEHHQDLTLLKALVRQQLPEKYKEIFFDQSKNGYAGYIDGGASQEEFYKFIKPILEKMDGTEELLVKLNREDLLRKQRTFDNGSIPHQIHLGELHAILRRQEDFYPFLKDNREKIEKILTFRIPYYVGPLARGNSRFAWMTRKSEETITPWNFEEVVDKGASAQSFIERMTNFDKNLPNEKVLPKHSLLYEYFTVYNELTKVKYVTEGMRKPAFLSGEQKKAIVDLLFKTNRKVTVKQLKEDYFKKIECFDSVEISGVEDRFNASLGTYHDLLKIIKDKDFLDNEENEDILEDIVLTLTLFEDREMIEERLKTYAHLFDDKVMKQLKRRRYTGWGRLSRKLINGIRDKQSGKTILDFLKSDGFANRNFMQLIHDDSLTFKEDIQKAQVSGQGDSLHEHIANLAGSPAIKKGILQTVKVVDELVKVMGRHKPENIVIEMARENQTTQKGQKNSRERMKRIEEGIKELGSQILKEHPVENTQLQNEKLYLYYLQNGRDMYVDQELDINRLSDYDVDHIVPQSFLKDDSIDNKVLTRSDKARGKSDNVPSEEVVKKMKNYWRQLLNAKLITQRKFDNLTKAERGGLSELDKAGFIKRQLVETRQITKHVAQILDSRMNTKYDENDKLIREVKVITLKSKLVSDFRKDFQFYKVREINNYHHAHDAYLNAVVGTALIKKYPKLESEFVYGDYKVYDVRKMIAKSEQEIGKATAKYFFYSNIMNFFKTEITLANGEIRKRPLIETNGETGEIVWDKGRDFATVRKVLSMPQVNIVKKTEVQTGGFSKESILPKRNSDKLIARKKDWDPKKYGGFDSPTVAYSVLVVAKVEKGKSKKLKSVKELLGITIMERSSFEKNPIDFLEAKGYKEVKKDLIIKLPKYSLFELENGRKRMLASAGELQKGNELALPSKYVNFLYLASHYEKLKGSPEDNEQKQLFVEQHKHYLDEIIEQISEFSKRVILADANLDKVLSAYNKHRDKPIREQAENIIHLFTLTNLGAPAAFKYFDTTIDRKRYTSTKEVLDATLIHQSITGLYETRIDLSQLGGDGGPAPGGGGGSGGTVSLQDEHRLFDIPVTTSLPDVWLQDFPQAWAETGGLGRAKCQAPIIIDLKPTAVPVSIKQYPMSLEAHMGIRQHIIKFLELGVLRPCRSPWNTPLLPVKKPGTQDYRPVQDLREINKRTVDIHPTVPNPYNLLSTLKPDYSWYTVLDLKDAFFCLPLAPQSQELFAFEWKDPERGISGQLTWTRLPQGFKNSPTLFNEALHRDLTDFRTQHPEVTLLQYVDDLLLAAPTKKACTQGTRHLLQELGEKGYRASAKKAQICQTKVTYLGYILSEGKRWLTPGRIETVARIPPPRNPREVREFLGTAGFCRLWIPGFAELAAPLYALTKPSTPFTWQTEHQLAFEALKKALLSAPALGLPDTSKPFTLFLDERQGIAKGVLTQKLGPWKRPVAYLSKKLDPVAAGWPPCLRIMAATAMLVKDSAKLTLGQPLTVITPHTLEAIVRQPPDRWITNARLTHYQALLLDTDRVQFGPPVTLNPATLLPVPENQPSPHDCRQVLAETHGTREDLKDQELPDADHTWYTDGSSYLDSGTRRAGAAVVDGHNTIWAQSLPPGTSAQKAELIALTKALELSKGKKANIYTDSRYAFATAHTHGSIYERRGWLTSEGKEIKNKAEIIALLKALFLPQEVAIIHCPGHQKGQDPVAVGNRQADRVARQAAMAEVLTLATEPDNTSHITAGKRTADGSEFEKRTADGSEFESPKKKAKVE

SEQ ID NO: 7027 - protein, 2171 aa, synthetic construct
MPAAKRVKLDGGDKKYSIGLDIGTNSVGWAVITDEYKVPSKKFKVLGNTDRHSIKKNLIGALLFDSGETAEATRLKRTARRRYTRRKNRICYLQEIFSNEMAKVDDSFFHRLEESFLVEEDKKHERHPIFGNIVDEVAYHEKYPTIYHLRKKLVDSTDKADLRLIYLALAHMIKFRGHFLIEGDLNPDNSDVDKLFIQLVQTYNQLFEENPINASGVDAKAILSARLSKSRRLENLIAQLPGEKKNGLFGNLIALSLGLTPNFKSNFDLAEDAKLQLSKDTYDDDLDNLLAQIGDQYADLFLAAKNLSDAILLSDILRVNTEITKAPLSASMIKRYDEHHQDLTLLKALVRQQLPEKYKEIFFDQSKNGYAGYIDGGASQEEFYKFIKPILEKMDGTEELLVKLNREDLLRKQRTFDNGSIPHQIHLGELHAILRRQEDFYPFLKDNREKIEKILTFRIPYYVGPLARGNSRFAWMTRKSEETITPWNFEEVVDKGASAQSFIERMTNFDKNLPNEKVLPKHSLLYEYFTVYNELTKVKYVTEGMRKPAFLSGEQKKAIVDLLFKTNRKVTVKQLKEDYFKKIECFDSVEISGVEDRFNASLGTYHDLLKIIKDKDFLDNEENEDILEDIVLTLTLFEDREMIEERLKTYAHLFDDKVMKQLKRRRYTGWGRLSRKLINGIRDKQSGKTILDFLKSDGFANRNFMQLIHDDSLTFKEDIQKAQVSGQGDSLHEHIANLAGSPAIKKGILQTVKVVDELVKVMGRHKPENIVIEMARENQTTQKGQKNSRERMKRIEEGIKELGSQILKEHPVENTQLQNEKLYLYYLQNGRDMYVDQELDINRLSDYDVDHIVPQSFLKDDSIDNKVLTRSDKARGKSDNVPSEEVVKKMKNYWRQLLNAKLITQRKFDNLTKAERGGLSELDKAGFIKRQLVETRQITKHVAQILDSRMNTKYDENDKLIREVKVITLKSKLVSDFRKDFQFYKVREINNYHHAHDAYLNAVVGTALIKKYPKLESEFVYGDYKVYDVRKMIAKSEQEIGKATAKYFFYSNIMNFFKTEITLANGEIRKRPLIETNGETGEIVWDKGRDFATVRKVLSMPQVNIVKKTEVQTGGFSKESILPKRNSDKLIARKKDWDPKKYGGFDSPTVAYSVLVVAKVEKGKSKKLKSVKELLGITIMERSSFEKNPIDFLEAKGYKEVKKDLIIKLPKYSLFELENGRKRMLASAGELQKGNELALPSKYVNFLYLASHYEKLKGSPEDNEQKQLFVEQHKHYLDEIIEQISEFSKRVILADANLDKVLSAYNKHRDKPIREQAENIIHLFTLTNLGAPAAFKYFDTTIDRKRYTSTKEVLDATLIHQSITGLYETRIDLSQLGGDGGPAPGGGGGSGGMDLLKPLTVERKGVKIKGYWNSQADITCVPKDLLQGEEPVRQQNVTTIHGTQEGDVYYVNLKIDGRRINTEVIGTTLDYAIITPGDVPWILKKPLELTIKLDLEEQQGTLLNNSILSKKGKEELKQLFEKYSALWQSWENQVGHRRIRPHKIATGTVKPTPQKQYHINPKAKPDIQIVINDLLKQGVLIQKESTMNTPVYPVPKPNGRWRMVLDYRAVNKVTPLIAVQNQHSYGILGSLFKGRYKTTIDLSNGFWAHPIVPEDYWITAFTWQGKQYCWTVLPQGFLNSPGLFTGDVVDLLQGIPNVEVYVDDVYISHDSEKEHLEYLDILFNRLKEAGYIISLKKSNIANSIVDFLGFQITNEGRGLTDTFKEKLENITAPTTLKQLQSILGLLNFARNFIPDFTELIAPLYALIPKSTKNYVPWQIEHSTTLETLITKLNGAEYLQGRKGDKTLIMKVNASYTTGYIRYYNEGEKKPISYVSIVFSKTELKFTELEKLLTTVHKGLLKALDLSMGQNIHVYSPIVSMQNIQKTPQTAKKALASRWLSWLSYLEDPRIRFFYDPQMPALKDLPAVDTGKDNKKHPSNFQHIFYTDGSAITSPTKEGHLNAGMGIVYFINKDGNLQKQQEWSISLGNHTAQFAEIAAFEFALKKCLPLGGNILVVTDSNYVAKAYNEELDVWASNGFVNNRKKPLKHISKWKSVADLKRLRPDVVVTHEPGHQKLDSSPHAYGNNLADQLATQASFKVHAGKRTADGSEFEKRTADGSEFESPKKKAKVE

SEQ ID NO: 7028 - protein, 2085 aa, synthetic construct
MPAAKRVKLDGGDKKYSIGLDIGTNSVGWAVITDEYKVPSKKFKVLGNTDRHSIKKNLIGALLFDSGETAEATRLKRTARRRYTRRKNRICYLQEIFSNEMAKVDDSFFHRLEESFLVEEDKKHERHPIFGNIVDEVAYHEKYPTIYHLRKKLVDSTDKADLRLIYLALAHMIKFRGHFLIEGDLNPDNSDVDKLFIQLVQTYNQLFEENPINASGVDAKAILSARLSKSRRLENLIAQLPGEKKNGLFGNLIALSLGLTPNFKSNFDLAEDAKLQLSKDTYDDDLDNLLAQIGDQYADLFLAAKNLSDAILLSDILRVNTEITKAPLSASMIKRYDEHHQDLTLLKALVRQQLPEKYKEIFFDQSKNGYAGYIDGGASQEEFYKFIKPILEKMDGTEELLVKLNREDLLRKQRTFDNGSIPHQIHLGELHAILRRQEDFYPFLKDNREKIEKILTFRIPYYVGPLARGNSRFAWMTRKSEETITPWNFEEVVDKGASAQSFIERMTNFDKNLPNEKVLPKHSLLYEYFTVYNELTKVKYVTEGMRKPAFLSGEQKKAIVDLLFKTNRKVTVKQLKEDYFKKIECFDSVEISGVEDRFNASLGTYHDLLKIIKDKDFLDNEENEDILEDIVLTLTLFEDREMIEERLKTYAHLFDDKVMKQLKRRRYTGWGRLSRKLINGIRDKQSGKTILDFLKSDGFANRNFMQLIHDDSLTFKEDIQKAQVSGQGDSLHEHIANLAGSPAIKKGILQTVKVVDELVKVMGRHKPENIVIEMARENQTTQKGQKNSRERMKRIEEGIKELGSQILKEHPVENTQLQNEKLYLYYLQNGRDMYVDQELDINRLSDYDVDHIVPQSFLKDDSIDNKVLTRSDKARGKSDNVPSEEVVKKMKNYWRQLLNAKLITQRKFDNLTKAERGGLSELDKAGFIKRQLVETRQITKHVAQILDSRMNTKYDENDKLIREVKVITLKSKLVSDFRKDFQFYKVREINNYHHAHDAYLNAVVGTALIKKYPKLESEFVYGDYKVYDVRKMIAKSEQEIGKATAKYFFYSNIMNFFKTEITLANGEIRKRPLIETNGETGEIVWDKGRDFATVRKVLSMPQVNIVKKTEVQTGGFSKESILPKRNSDKLIARKKDWDPKKYGGFDSPTVAYSVLVVAKVEKGKSKKLKSVKELLGITIMERSSFEKNPIDFLEAKGYKEVKKDLIIKLPKYSLFELENGRKRMLASAGELQKGNELALPSKYVNFLYLASHYEKLKGSPEDNEQKQLFVEQHKHYLDEIIEQISEFSKRVILADANLDKVLSAYNKHRDKPIREQAENIIHLFTLTNLGAPAAFKYFDTTIDRKRYTSTKEVLDATLIHQSITGLYETRIDLSQLGGDGGPAPGGGGGSGGVPWILKKPLELTIKLDLEEQQGTLLNNSILSKKGKEELKQLFEKYSALWQSWENQVGHRRIRPHKIATGTVKPTPQKQYHINPKAKPDIQIVINDLLKQGVLIQKESTMNTPVYPVPKPNGRWRMVLDYRAVNKVTPLIAVQNQHSYGILGSLFKGRYKTTIDLSNGFWAHPIVPEDYWITAFTWQGKQYCWTVLPQGFLNSPGLFTGDVVDLLQGIPNVEVYVDDVYISHDSEKEHLEYLDILFNRLKEAGYIISLKKSNIANSIVDFLGFQITNEGRGLTDTFKEKLENITAPTTLKQLQSILGLLNFARNFIPDFTELIAPLYALIPKSTKNYVPWQIEHSTTLETLITKLNGAEYLQGRKGDKTLIMKVNASYTTGYIRYYNEGEKKPISYVSIVFSKTELKFTELEKLLTTVHKGLLKALDLSMGQNIHVYSPIVSMQNIQKTPQTAKKALASRWLSWLSYLEDPRIRFFYDPQMPALKDLPAVDTGKDNKKHPSNFQHIFYTDGSAITSPTKEGHLNAGMGIVYFINKDGNLQKQQEWSISLGNHTAQFAEIAAFEFALKKCLPLGGNILVVTDSNYVAKAYNEELDVWASNGFVNNRKKPLKHISKWKSVADLKRLRPDVVVTHEPGHQKLDSSPHAYGNNLADQLATQASFKVHAGKRTADGSEFEKRTADGSEFESPKKKAKVE

SEQ ID NO: 7029 - protein, 2093 aa, synthetic construct
MPAAKRVKLDGGDKKYSIGLDIGTNSVGWAVITDEYKVPSKKFKVLGNTDRHSIKKNLIGALLFDSGETAEATRLKRTARRRYTRRKNRICYLQEIFSNEMAKVDDSFFHRLEESFLVEEDKKHERHPIFGNIVDEVAYHEKYPTIYHLRKKLVDSTDKADLRLIYLALAHMIKFRGHFLIEGDLNPDNSDVDKLFIQLVQTYNQLFEENPINASGVDAKAILSARLSKSRRLENLIAQLPGEKKNGLFGNLIALSLGLTPNFKSNFDLAEDAKLQLSKDTYDDDLDNLLAQIGDQYADLFLAAKNLSDAILLSDILRVNTEITKAPLSASMIKRYDEHHQDLTLLKALVRQQLPEKYKEIFFDQSKNGYAGYIDGGASQEEFYKFIKPILEKMDGTEELLVKLNREDLLRKQRTFDNGSIPHQIHLGELHAILRRQEDFYPFLKDNREKIEKILTFRIPYYVGPLARGNSRFAWMTRKSEETITPWNFEEVVDKGASAQSFIERMTNFDKNLPNEKVLPKHSLLYEYFTVYNELTKVKYVTEGMRKPAFLSGEQKKAIVDLLFKTNRKVTVKQLKEDYFKKIECFDSVEISGVEDRFNASLGTYHDLLKIIKDKDFLDNEENEDILEDIVLTLTLFEDREMIEERLKTYAHLFDDKVMKQLKRRRYTGWGRLSRKLINGIRDKQSGKTILDFLKSDGFANRNFMQLIHDDSLTFKEDIQKAQVSGQGDSLHEHIANLAGSPAIKKGILQTVKVVDELVKVMGRHKPENIVIEMARENQTTQKGQKNSRERMKRIEEGIKELGSQILKEHPVENTQLQNEKLYLYYLQNGRDMYVDQELDINRLSDYDVDHIVPQSFLKDDSIDNKVLTRSDKARGKSDNVPSEEVVKKMKNYWRQLLNAKLITQRKFDNLTKAERGGLSELDKAGFIKRQLVETRQITKHVAQILDSRMNTKYDENDKLIREVKVITLKSKLVSDFRKDFQFYKVREINNYHHAHDAYLNAVVGTALIKKYPKLESEFVYGDYKVYDVRKMIAKSEQEIGKATAKYFFYSNIMNFFKTEITLANGEIRKRPLIETNGETGEIVWDKGRDFATVRKVLSMPQVNIVKKTEVQTGGFSKESILPKRNSDKLIARKKDWDPKKYGGFDSPTVAYSVLVVAKVEKGKSKKLKSVKELLGITIMERSSFEKNPIDFLEAKGYKEVKKDLIIKLPKYSLFELENGRKRMLASAGELQKGNELALPSKYVNFLYLASHYEKLKGSPEDNEQKQLFVEQHKHYLDEIIEQISEFSKRVILADANLDKVLSAYNKHRDKPIREQAENIIHLFTLTNLGAPAAFKYFDTTIDRKRYTSTKEVLDATLIHQSITGLYETRIDLSQLGGDGGPAPGGGGGSGGTLQLEEEYRLFEPESTQKQEMDIWLKNFPQAWAETGGMGTAHCQAPVLIQLKATATPISIRQYPMPHEAYQGIKPHIRRMLDQGILKPCQSPWNTPLLPVKKPGTEDYRPVQDLREVNKRVEDIHPTVPNPYNLLSTLPPSHPWYTVLDLKDAFFCLRLHSESQLLFAFEWRDPEIGLSGQLTWTRLPQGFKNSPTLFNEALHSDLADFRVRYPALVLLQYVDDLLLAAATRTECLEGTKALLETLGNKGYRASAKKAQICLQEVTYLGYSLKDGQRWLTKARKEAILSIPVPKNSRQVREFLGTAGYCRLWIPGFAELAAPLYPLTRPGTLFQWGTEQQLAFEDIKKALLSSPALGLPDITKPFELFIDENSGFAKGVLVQKLGPWKRPVAYLSKKLDTVASGWPPCLRMVAAIAILVKDAGKLTLGQPLTILTSHPVEALVRQPPNKWLSNARMTHYQAMLLDAERVHFGPTVSLNPATLLPLPSGGNHHDCLQILAETHGTRPDLTDQPLPDADLTWYTDGSSFIRNGEREAGAAVTTESEVIWAAPLPPGTSAQRAELIALTQALKMAEGKKLTVYTDSRYAFATTHVHGEIYRRRGWLTSEGKEIKNKNEILALLEALFLPKRLSIIHCPGHQKGDSPQAKGNRLADDTAKKAATETHSSLTVLPAGKRTADGSEFEKRTADGSEFESPKKKAKVE

SEQ ID NO: 7030 - protein, 2125 aa, synthetic construct
MPAAKRVKLDGGDKKYSIGLDIGTNSVGWAVITDEYKVPSKKFKVLGNTDRHSIKKNLIGALLFDSGETAEATRLKRTARRRYTRRKNRICYLQEIFSNEMAKVDDSFFHRLEESFLVEEDKKHERHPIFGNIVDEVAYHEKYPTIYHLRKKLVDSTDKADLRLIYLALAHMIKFRGHFLIEGDLNPDNSDVDKLFIQLVQTYNQLFEENPINASGVDAKAILSARLSKSRRLENLIAQLPGEKKNGLFGNLIALSLGLTPNFKSNFDLAEDAKLQLSKDTYDDDLDNLLAQIGDQYADLFLAAKNLSDAILLSDILRVNTEITKAPLSASMIKRYDEHHQDLTLLKALVRQQLPEKYKEIFFDQSKNGYAGYIDGGASQEEFYKFIKPILEKMDGTEELLVKLNREDLLRKQRTFDNGSIPHQIHLGELHAILRRQEDFYPFLKDNREKIEKILTFRIPYYVGPLARGNSRFAWMTRKSEETITPWNFEEVVDKGASAQSFIERMTNFDKNLPNEKVLPKHSLLYEYFTVYNELTKVKYVTEGMRKPAFLSGEQKKAIVDLLFKTNRKVTVKQLKEDYFKKIECFDSVEISGVEDRFNASLGTYHDLLKIIKDKDFLDNEENEDILEDIVLTLTLFEDREMIEERLKTYAHLFDDKVMKQLKRRRYTGWGRLSRKLINGIRDKQSGKTILDFLKSDGFANRNFMQLIHDDSLTFKEDIQKAQVSGQGDSLHEHIANLAGSPAIKKGILQTVKVVDELVKVMGRHKPENIVIEMARENQTTQKGQKNSRERMKRIEEGIKELGSQILKEHPVENTQLQNEKLYLYYLQNGRDMYVDQELDINRLSDYDVDHIVPQSFLKDDSIDNKVLTRSDKARGKSDNVPSEEVVKKMKNYWRQLLNAKLITQRKFDNLTKAERGGLSELDKAGFIKRQLVETRQITKHVAQILDSRMNTKYDENDKLIREVKVITLKSKLVSDFRKDFQFYKVREINNYHHAHDAYLNAVVGTALIKKYPKLESEFVYGDYKVYDVRKMIAKSEQEIGKATAKYFFYSNIMNFFKTEITLANGEIRKRPLIETNGETGEIVWDKGRDFATVRKVLSMPQVNIVKKTEVQTGGFSKESILPKRNSDKLIARKKDWDPKKYGGFDSPTVAYSVLVVAKVEKGKSKKLKSVKELLGITIMERSSFEKNPIDFLEAKGYKEVKKDLIIKLPKYSLFELENGRKRMLASAGELQKGNELALPSKYVNFLYLASHYEKLKGSPEDNEQKQLFVEQHKHYLDEIIEQISEFSKRVILADANLDKVLSAYNKHRDKPIREQAENIIHLFTLTNLGAPAAFKYFDTTIDRKRYTSTKEVLDATLIHQSITGLYETRIDLSQLGGDGGPAPGGGGGSGGLLGRDLLTKLKAQIQFSTEGPQVTWEDRPAMCLVLNLEEEYRLHEKPVPPSIDPSWLQLFPMVWAEKAGMGLANQVPPVVVELKSDASPVAVRQYPMSKEAREGIRPHIQRFLDLGILVPCQSPWNTPLLPVKKPGTNDYRPVQDLREVNKRVQDIHPTVPNPYNLLSSLPPSHTWYSVLDLKDAFFCLKLHPNSQPLFAFEWRDPEKGNTGQLTWTRLPQGFKNSPTLFNEALHRDLASFRALNPQVVMLQYVDDLLVAAPTYRDCKEGTRRLLQELSKLGYRVSAKKAQLCREEVTYLGYLLKGGKRWLTPARKATVMKIPTPTTPRQVREFLGTAGFCRLWIPGFASLAAPLYPLTRPKVPFTWTEAHQEAFGRIKEALLSAPALALPDLTKPFALYVDEKEGVARGVLTQTLGPWRRPVAYLSKKLDPVASGWPTCLKAIAAVALLLKDADKLTLGQNVLVIAPHNLESIVRQPPDRWMTNARMTHYQSLLLNERVSFAPPAILNPATLLPVESDDTPIHICSEILAEETGTRPDLRDQPLPGVPAWYTDGSSFIMDGRRQAGAAIVDNKRTVWASNLPEGTSAQKAELIALTQALRLAEGKSINIYTDSRYAFATAHVHGAIYKQRGWLTSAGKDIKNKEEILALLEAIHLPKRVAIIHCPGHQRGTDPVATGNRKADEAAKQAAQSTRILTETTKNAGKRTADGSEFEKRTADGSEFESPKKKAKVE

SEQ ID NO: 7031 - protein, 2125 aa, synthetic construct
MPAAKRVKLDGGDKKYSIGLDIGTNSVGWAVITDEYKVPSKKFKVLGNTDRHSIKKNLIGALLFDSGETAEATRLKRTARRRYTRRKNRICYLQEIFSNEMAKVDDSFFHRLEESFLVEEDKKHERHPIFGNIVDEVAYHEKYPTIYHLRKKLVDSTDKADLRLIYLALAHMIKFRGHFLIEGDLNPDNSDVDKLFIQLVQTYNQLFEENPINASGVDAKAILSARLSKSRRLENLIAQLPGEKKNGLFGNLIALSLGLTPNFKSNFDLAEDAKLQLSKDTYDDDLDNLLAQIGDQYADLFLAAKNLSDAILLSDILRVNTEITKAPLSASMIKRYDEHHQDLTLLKALVRQQLPEKYKEIFFDQSKNGYAGYIDGGASQEEFYKFIKPILEKMDGTEELLVKLNREDLLRKQRTFDNGSIPHQIHLGELHAILRRQEDFYPFLKDNREKIEKILTFRIPYYVGPLARGNSRFAWMTRKSEETITPWNFEEVVDKGASAQSFIERMTNFDKNLPNEKVLPKHSLLYEYFTVYNELTKVKYVTEGMRKPAFLSGEQKKAIVDLLFKTNRKVTVKQLKEDYFKKIECFDSVEISGVEDRFNASLGTYHDLLKIIKDKDFLDNEENEDILEDIVLTLTLFEDREMIEERLKTYAHLFDDKVMKQLKRRRYTGWGRLSRKLINGIRDKQSGKTILDFLKSDGFANRNFMQLIHDDSLTFKEDIQKAQVSGQGDSLHEHIANLAGSPAIKKGILQTVKVVDELVKVMGRHKPENIVIEMARENQTTQKGQKNSRERMKRIEEGIKELGSQILKEHPVENTQLQNEKLYLYYLQNGRDMYVDQELDINRLSDYDVDHIVPQSFLKDDSIDNKVLTRSDKARGKSDNVPSEEVVKKMKNYWRQLLNAKLITQRKFDNLTKAERGGLSELDKAGFIKRQLVETRQITKHVAQILDSRMNTKYDENDKLIREVKVITLKSKLVSDFRKDFQFYKVREINNYHHAHDAYLNAVVGTALIKKYPKLESEFVYGDYKVYDVRKMIAKSEQEIGKATAKYFFYSNIMNFFKTEITLANGEIRKRPLIETNGETGEIVWDKGRDFATVRKVLSMPQVNIVKKTEVQTGGFSKESILPKRNSDKLIARKKDWDPKKYGGFDSPTVAYSVLVVAKVEKGKSKKLKSVKELLGITIMERSSFEKNPIDFLEAKGYKEVKKDLIIKLPKYSLFELENGRKRMLASAGELQKGNELALPSKYVNFLYLASHYEKLKGSPEDNEQKQLFVEQHKHYLDEIIEQISEFSKRVILADANLDKVLSAYNKHRDKPIREQAENIIHLFTLTNLGAPAAFKYFDTTIDRKRYTSTKEVLDATLIHQSITGLYETRIDLSQLGGDGGPAPGGGGGSGGLLGRDLLTKLKAQIQFSTEGPQVTWEDRPAMCLVLNLEEEYRLHEKPVPPSIDPSWLQLFPMVWAEKAGMGLANQVPPVVVELKSDASPVAVRQYPMSKEAREGIRPHIQRFLDLGILVPCQSPWNTPLLPVKKPGTNDYRPVQDLREVNKRVQDIHPTVPNPYNLLSSLPPSHTWYSVLDLKDAFFCLKLHPNSQPLFAFEWRDPEKGNTGQLTWTRLPQGFKNSPTLFNEALHRDLASFRALNPQVVMLQYVDDLLVAAPTYRDCKEGTRRLLQELSKLGYRVSAKKAQLCREEVTYLGYLLKGGKRWLTPARKATVMKIPTPTTPRQVREFLGKAGFCRLFIPGFASLAAPLYPLTRPKVPFTWTEAHQEAFGRIKEALLSAPALALPDLTKPFALYVDEKEGVARGVLTQTLGPWRRPVAYLSKKLDPVASGWPTCLKAIAAVALLLKDADKLTLGQNVLVIAPHNLESIVRQPPDRWMTNARMTHYQSLLLNERVSFAPPAILNPATLLPVESDDTPIHICSEILAEETGTRPDLRDQPLPGVPAWYTDGSSFIMDGRRQAGAAIVDNKRTVWASNLPEGTSAQKAELIALTQALRLAEGKSINIYTDSRYAFATAHVHGAIYKQRGWLTSAGKDIKNKEEILALLEAIHLPKRVAIIHCPGHQRGTDPVATGNRKADEAAKQAAQSTRILTETTKNAGKRTADGSEFEKRTADGSEFESPKKKAKVE

SEQ ID NO: 7032 - protein, 2094 aa, synthetic construct
MPAAKRVKLDGGDKKYSIGLDIGTNSVGWAVITDEYKVPSKKFKVLGNTDRHSIKKNLIGALLFDSGETAEATRLKRTARRRYTRRKNRICYLQEIFSNEMAKVDDSFFHRLEESFLVEEDKKHERHPIFGNIVDEVAYHEKYPTIYHLRKKLVDSTDKADLRLIYLALAHMIKFRGHFLIEGDLNPDNSDVDKLFIQLVQTYNQLFEENPINASGVDAKAILSARLSKSRRLENLIAQLPGEKKNGLFGNLIALSLGLTPNFKSNFDLAEDAKLQLSKDTYDDDLDNLLAQIGDQYADLFLAAKNLSDAILLSDILRVNTEITKAPLSASMIKRYDEHHQDLTLLKALVRQQLPEKYKEIFFDQSKNGYAGYIDGGASQEEFYKFIKPILEKMDGTEELLVKLNREDLLRKQRTFDNGSIPHQIHLGELHAILRRQEDFYPFLKDNREKIEKILTFRIPYYVGPLARGNSRFAWMTRKSEETITPWNFEEVVDKGASAQSFIERMTNFDKNLPNEKVLPKHSLLYEYFTVYNELTKVKYVTEGMRKPAFLSGEQKKAIVDLLFKTNRKVTVKQLKEDYFKKIECFDSVEISGVEDRFNASLGTYHDLLKIIKDKDFLDNEENEDILEDIVLTLTLFEDREMIEERLKTYAHLFDDKVMKQLKRRRYTGWGRLSRKLINGIRDKQSGKTILDFLKSDGFANRNFMQLIHDDSLTFKEDIQKAQVSGQGDSLHEHIANLAGSPAIKKGILQTVKVVDELVKVMGRHKPENIVIEMARENQTTQKGQKNSRERMKRIEEGIKELGSQILKEHPVENTQLQNEKLYLYYLQNGRDMYVDQELDINRLSDYDVDHIVPQSFLKDDSIDNKVLTRSDKARGKSDNVPSEEVVKKMKNYWRQLLNAKLITQRKFDNLTKAERGGLSELDKAGFIKRQLVETRQITKHVAQILDSRMNTKYDENDKLIREVKVITLKSKLVSDFRKDFQFYKVREINNYHHAHDAYLNAVVGTALIKKYPKLESEFVYGDYKVYDVRKMIAKSEQEIGKATAKYFFYSNIMNFFKTEITLANGEIRKRPLIETNGETGEIVWDKGRDFATVRKVLSMPQVNIVKKTEVQTGGFSKESILPKRNSDKLIARKKDWDPKKYGGFDSPTVAYSVLVVAKVEKGKSKKLKSVKELLGITIMERSSFEKNPIDFLEAKGYKEVKKDLIIKLPKYSLFELENGRKRMLASAGELQKGNELALPSKYVNFLYLASHYEKLKGSPEDNEQKQLFVEQHKHYLDEIIEQISEFSKRVILADANLDKVLSAYNKHRDKPIREQAENIIHLFTLTNLGAPAAFKYFDTTIDRKRYTSTKEVLDATLIHQSITGLYETRIDLSQLGGDGGPAPGGGGGSGGTLNLEDEYRLYETSAEPEVSPGSTWLSDFPQAWAETGGMGLAVRQAPLIIPLKATSTPVSIKQYPMSQEAKLGIKPHIQRLLDQGILVPCQSPWNTPLLPVKKPGTNDYRPVQDLREVNKRVEDIHPTVPNPYNLLSGLPPSHRWYTVLDLKDAFFCLRLHPTSQPLFAFEWRDPGMGISGQLTWTRLPQGFKNSPTLFNEALHRDLADFRIQHPDLILLQYVDDILLAATSELDCQQGTRALLLTLGNLGYRASAKKAQLCQKQVKYLGYLLKEGQRWLTEARKETVMGQPTPKTPRQLREFLGKAGFCRLFIPGFAEMAAPLYPLTKPGTLFNWGPDQQKAYQEIKQALLTAPALGLPDLTKPFELFVDEKQGYAKGVLTQKLGPWRRPVAYLSKKLDPVAAGWPPCLRMVAAIAVLRKDAGKLTMGQPLVILAPHAVEALVKQPPDRWLSNARMTHYQAMLLDTDRVQFGPVVALNPATLLPLPEEGAPHDCLEILAETHGTRPDLTDQPIPDADHTWYTDGSSFLQEGQRKAGAAVTTETEVIWARALPAGTSAQRAELIALTQALKMAEGKRLNVYTDSRYAFATAHIHGEIYRRRGWLTSEGREIKNKSEILALLKALFLPKRLSIIHCLGHQKGDSAEARGNRLADQAAREAAIKTPPDTSTLLAGKRTADGSEFEKRTADGSEFESPKKKAKVE

SEQ ID NO: 7033 - protein, 2094 aa, synthetic construct
MPAAKRVKLDGGDKKYSIGLDIGTNSVGWAVITDEYKVPSKKFKVLGNTDRHSIKKNLIGALLFDSGETAEATRLKRTARRRYTRRKNRICYLQEIFSNEMAKVDDSFFHRLEESFLVEEDKKHERHPIFGNIVDEVAYHEKYPTIYHLRKKLVDSTDKADLRLIYLALAHMIKFRGHFLIEGDLNPDNSDVDKLFIQLVQTYNQLFEENPINASGVDAKAILSARLSKSRRLENLIAQLPGEKKNGLFGNLIALSLGLTPNFKSNFDLAEDAKLQLSKDTYDDDLDNLLAQIGDQYADLFLAAKNLSDAILLSDILRVNTEITKAPLSASMIKRYDEHHQDLTLLKALVRQQLPEKYKEIFFDQSKNGYAGYIDGGASQEEFYKFIKPILEKMDGTEELLVKLNREDLLRKQRTFDNGSIPHQIHLGELHAILRRQEDFYPFLKDNREKIEKILTFRIPYYVGPLARGNSRFAWMTRKSEETITPWNFEEVVDKGASAQSFIERMTNFDKNLPNEKVLPKHSLLYEYFTVYNELTKVKYVTEGMRKPAFLSGEQKKAIVDLLFKTNRKVTVKQLKEDYFKKIECFDSVEISGVEDRFNASLGTYHDLLKIIKDKDFLDNEENEDILEDIVLTLTLFEDREMIEERLKTYAHLFDDKVMKQLKRRRYTGWGRLSRKLINGIRDKQSGKTILDFLKSDGFANRNFMQLIHDDSLTFKEDIQKAQVSGQGDSLHEHIANLAGSPAIKKGILQTVKVVDELVKVMGRHKPENIVIEMARENQTTQKGQKNSRERMKRIEEGIKELGSQILKEHPVENTQLQNEKLYLYYLQNGRDMYVDQELDINRLSDYDVDHIVPQSFLKDDSIDNKVLTRSDKARGKSDNVPSEEVVKKMKNYWRQLLNAKLITQRKFDNLTKAERGGLSELDKAGFIKRQLVETRQITKHVAQILDSRMNTKYDENDKLIREVKVITLKSKLVSDFRKDFQFYKVREINNYHHAHDAYLNAVVGTALIKKYPKLESEFVYGDYKVYDVRKMIAKSEQEIGKATAKYFFYSNIMNFFKTEITLANGEIRKRPLIETNGETGEIVWDKGRDFATVRKVLSMPQVNIVKKTEVQTGGFSKESILPKRNSDKLIARKKDWDPKKYGGFDSPTVAYSVLVVAKVEKGKSKKLKSVKELLGITIMERSSFEKNPIDFLEAKGYKEVKKDLIIKLPKYSLFELENGRKRMLASAGELQKGNELALPSKYVNFLYLASHYEKLKGSPEDNEQKQLFVEQHKHYLDEIIEQISEFSKRVILADANLDKVLSAYNKHRDKPIREQAENIIHLFTLTNLGAPAAFKYFDTTIDRKRYTSTKEVLDATLIHQSITGLYETRIDLSQLGGDGGPAPGGGGGSGGTLGIEDEYRLHETSTEPDVSLGSTWLSDFPQAWAETGGMGLAVRQAPLIIPLKATSTPVSIQQYPMSHEARLGIKPHIQRLLDQGILVPCQSPWNTPLLPVKKPGTNDYRPVQDLREVNKRVEDIHPTVPNPYNLLSGLPPSHQWYTVLDLKDAFFCLRLHPTSQPLFAFEWRDPGMGISGQLTWTRLPQGFKNSPTLFNEALHRDLADFRIQHPDLILLQYVDDILLAATSELDCQQGTRALLQTLGDLGYRASAKKAQICQKQVKYLGYLLREGQRWLTEARKETVMGQPVPKTPRQLREFLGTAGFCRLWIPGFAEMAAPLYPLTKPGTLFSWGPDQQKAYQEIKQALLTAPALGLPDLTKPFELFVDEKQGYAKGVLTQKLGPWRRPVAYLSKKLDPVAAGWPPCLRMVAAIAVLTKDAGKLTMGQPLVILAPHAVEALVKQPPDRWLSNARMTHYQAMLLDTDRVQFGPVVALNPATLLPLPEEGAPHDCLEILAETHGTRPDLTDQPIPDADHTWYTDGSSFLQEGQRKAGAAVTTETEVIWAGALPAGTSAQRAELIALTQALKMAEGKRLNVYTDSRYAFATAHIHGEIYRRRGWLTSEGREIKNKSEILALLKALFLPKRLSIIHCLGHQKGDSAEARGNRLADQAAREAAIKTPPDTSTLLAGKRTADGSEFEKRTADGSEFESPKKKAKVE

SEQ ID NO: 7034 - protein, 2094 aa, synthetic construct
MPAAKRVKLDGGDKKYSIGLDIGTNSVGWAVITDEYKVPSKKFKVLGNTDRHSIKKNLIGALLFDSGETAEATRLKRTARRRYTRRKNRICYLQEIFSNEMAKVDDSFFHRLEESFLVEEDKKHERHPIFGNIVDEVAYHEKYPTIYHLRKKLVDSTDKADLRLIYLALAHMIKFRGHFLIEGDLNPDNSDVDKLFIQLVQTYNQLFEENPINASGVDAKAILSARLSKSRRLENLIAQLPGEKKNGLFGNLIALSLGLTPNFKSNFDLAEDAKLQLSKDTYDDDLDNLLAQIGDQYADLFLAAKNLSDAILLSDILRVNTEITKAPLSASMIKRYDEHHQDLTLLKALVRQQLPEKYKEIFFDQSKNGYAGYIDGGASQEEFYKFIKPILEKMDGTEELLVKLNREDLLRKQRTFDNGSIPHQIHLGELHAILRRQEDFYPFLKDNREKIEKILTFRIPYYVGPLARGNSRFAWMTRKSEETITPWNFEEVVDKGASAQSFIERMTNFDKNLPNEKVLPKHSLLYEYFTVYNELTKVKYVTEGMRKPAFLSGEQKKAIVDLLFKTNRKVTVKQLKEDYFKKIECFDSVEISGVEDRFNASLGTYHDLLKIIKDKDFLDNEENEDILEDIVLTLTLFEDREMIEERLKTYAHLFDDKVMKQLKRRRYTGWGRLSRKLINGIRDKQSGKTILDFLKSDGFANRNFMQLIHDDSLTFKEDIQKAQVSGQGDSLHEHIANLAGSPAIKKGILQTVKVVDELVKVMGRHKPENIVIEMARENQTTQKGQKNSRERMKRIEEGIKELGSQILKEHPVENTQLQNEKLYLYYLQNGRDMYVDQELDINRLSDYDVDHIVPQSFLKDDSIDNKVLTRSDKARGKSDNVPSEEVVKKMKNYWRQLLNAKLITQRKFDNLTKAERGGLSELDKAGFIKRQLVETRQITKHVAQILDSRMNTKYDENDKLIREVKVITLKSKLVSDFRKDFQFYKVREINNYHHAHDAYLNAVVGTALIKKYPKLESEFVYGDYKVYDVRKMIAKSEQEIGKATAKYFFYSNIMNFFKTEITLANGEIRKRPLIETNGETGEIVWDKGRDFATVRKVLSMPQVNIVKKTEVQTGGFSKESILPKRNSDKLIARKKDWDPKKYGGFDSPTVAYSVLVVAKVEKGKSKKLKSVKELLGITIMERSSFEKNPIDFLEAKGYKEVKKDLIIKLPKYSLFELENGRKRMLASAGELQKGNELALPSKYVNFLYLASHYEKLKGSPEDNEQKQLFVEQHKHYLDEIIEQISEFSKRVILADANLDKVLSAYNKHRDKPIREQAENIIHLFTLTNLGAPAAFKYFDTTIDRKRYTSTKEVLDATLIHQSITGLYETRIDLSQLGGDGGPAPGGGGGSGGTLNIEDEYRLHETSKEPDVSLGSTWLSDFPQAWAETGGMGLAVRQAPLIIPLKATSTPVSIKQYPMSQEARLGIKPHIQRLLDQGILVPCQSPWNTPLLPVKKPGTNDYRPVQDLREVNKRVEDIHPTVPNPYNLLSGLPPSHQWYTVLDLKDAFFCLRLHPTSQPLFAFEWRDPEMGISGQLTWTRLPQGFKNSPTLFNEALHRDLAGFRIQHPDLILLQYVDDLLLAATSELDCQQGTRALLQTLGDLGYRASAKKAQICQKQVKYLGYLLKEGQRWLTEARKETVMGQPIPKTPRQLREFLGTAGFCRLWIPGFAEMAAPLYPLTKPGTLFNWGPDQQKAFQEIKQALLTAPALGLPDLTKPFELFVDEKQGYAKGVLTQKLGPWRRPVAYLSKKLDPVAAGWPPCLRMVAAIAVLTKDAGKLTMGQPLVILAPHAVEALVKQPPDRWLSNARMTHYQALLLDTDRVQFGPVVALNPATLLPLPEEGLQHDCLDILAEAHGTRSDLMDQPLPDADHTWYTDGSSFLQEGQRKAGAAVTTETEVIWARALPAGTSAQRAELIALTQALKMAEGKKLNVYTDSRYAFATAHIHGEIYRRRGWLTSEGKEIKNKDEILALLKALFLPKRLSIIHCPGHQKGNSAEARGNRMADQAAREVATRETPETSTLLAGKRTADGSEFEKRTADGSEFESPKKKAKVE

SEQ ID NO: 7035 - protein, 2094 aa, synthetic construct
MPAAKRVKLDGGDKKYSIGLDIGTNSVGWAVITDEYKVPSKKFKVLGNTDRHSIKKNLIGALLFDSGETAEATRLKRTARRRYTRRKNRICYLQEIFSNEMAKVDDSFFHRLEESFLVEEDKKHERHPIFGNIVDEVAYHEKYPTIYHLRKKLVDSTDKADLRLIYLALAHMIKFRGHFLIEGDLNPDNSDVDKLFIQLVQTYNQLFEENPINASGVDAKAILSARLSKSRRLENLIAQLPGEKKNGLFGNLIALSLGLTPNFKSNFDLAEDAKLQLSKDTYDDDLDNLLAQIGDQYADLFLAAKNLSDAILLSDILRVNTEITKAPLSASMIKRYDEHHQDLTLLKALVRQQLPEKYKEIFFDQSKNGYAGYIDGGASQEEFYKFIKPILEKMDGTEELLVKLNREDLLRKQRTFDNGSIPHQIHLGELHAILRRQEDFYPFLKDNREKIEKILTFRIPYYVGPLARGNSRFAWMTRKSEETITPWNFEEVVDKGASAQSFIERMTNFDKNLPNEKVLPKHSLLYEYFTVYNELTKVKYVTEGMRKPAFLSGEQKKAIVDLLFKTNRKVTVKQLKEDYFKKIECFDSVEISGVEDRFNASLGTYHDLLKIIKDKDFLDNEENEDILEDIVLTLTLFEDREMIEERLKTYAHLFDDKVMKQLKRRRYTGWGRLSRKLINGIRDKQSGKTILDFLKSDGFANRNFMQLIHDDSLTFKEDIQKAQVSGQGDSLHEHIANLAGSPAIKKGILQTVKVVDELVKVMGRHKPENIVIEMARENQTTQKGQKNSRERMKRIEEGIKELGSQILKEHPVENTQLQNEKLYLYYLQNGRDMYVDQELDINRLSDYDVDHIVPQSFLKDDSIDNKVLTRSDKARGKSDNVPSEEVVKKMKNYWRQLLNAKLITQRKFDNLTKAERGGLSELDKAGFIKRQLVETRQITKHVAQILDSRMNTKYDENDKLIREVKVITLKSKLVSDFRKDFQFYKVREINNYHHAHDAYLNAVVGTALIKKYPKLESEFVYGDYKVYDVRKMIAKSEQEIGKATAKYFFYSNIMNFFKTEITLANGEIRKRPLIETNGETGEIVWDKGRDFATVRKVLSMPQVNIVKKTEVQTGGFSKESILPKRNSDKLIARKKDWDPKKYGGFDSPTVAYSVLVVAKVEKGKSKKLKSVKELLGITIMERSSFEKNPIDFLEAKGYKEVKKDLIIKLPKYSLFELENGRKRMLASAGELQKGNELALPSKYVNFLYLASHYEKLKGSPEDNEQKQLFVEQHKHYLDEIIEQISEFSKRVILADANLDKVLSAYNKHRDKPIREQAENIIHLFTLTNLGAPAAFKYFDTTIDRKRYTSTKEVLDATLIHQSITGLYETRIDLSQLGGDGGPAPGGGGGSGGTLNIEDEYRLHETSKGPDVPLGSTWLSDFPQAWAETGGMGLAVRQAPLIIPLKATSTPVSIKQYPMSQEARLGIKPHIQRLLDQGILVPCQSPWNTPLLPVKKPGTNDYRPVQDLREVNKRVEDIHPTVPNPYNLLSGLPPSHQWYTVLDLKDAFFCLRLHPTSQSLFAFEWRDPEMGISGQLTWTRLPQGFKNSPTLFNEALHRDLADFRIQHPDLILLQYVDDLLLAATSELDCQQGTRALLQTLGDLGYRASAKKAQICQKQVKYLGYLLKEGQRWLTEARKETVMGQPTPKTPRQLREFLGKAGFCRLFIPGFAEMAAPLYPLTKPGTLFEWGPDQQKAYQEIKQALLTAPALGLPDLTKPFELFVDEKQGYAKGVLTQKLGPWRRPVAYLSKKLDPVAAGWPPCLRMVAAIAVLTKDAGKLTMGQPLVILAPHAVEALVKQPPDRWLSNARMTHYQALLLDTDRVQFGPIVALNPATLLPLPEEGLQHDCLDILAEAHGTRPDLTDQPLPDADHTWYTDGSSFLQEGQRKAGAAVTTETEVVWAKALPAGTSAQRAELIALTQALKMAEGKKLNVYTDSRYAFATAHIHGEIYRRRGWLTSEGKEIKNKDEILALLKALFLPKRLSIIHCPGHQKGNRAEARGNRMADQAAREVATRETPETSTLLAGKRTADGSEFEKRTADGSEFESPKKKAKVE

SEQ ID NO: 7036 - protein, 2094 aa, synthetic construct; identical to SEQ ID NO: 4521

SEQ ID NO: 7037 - protein, 2094 aa, synthetic construct
MPAAKRVKLDGGDKKYSIGLDIGTNSVGWAVITDEYKVPSKKFKVLGNTDRHSIKKNLIGALLFDSGETAEATRLKRTARRRYTRRKNRICYLQEIFSNEMAKVDDSFFHRLEESFLVEEDKKHERHPIFGNIVDEVAYHEKYPTIYHLRKKLVDSTDKADLRLIYLALAHMIKFRGHFLIEGDLNPDNSDVDKLFIQLVQTYNQLFEENPINASGVDAKAILSARLSKSRRLENLIAQLPGEKKNGLFGNLIALSLGLTPNFKSNFDLAEDAKLQLSKDTYDDDLDNLLAQIGDQYADLFLAAKNLSDAILLSDILRVNTEITKAPLSASMIKRYDEHHQDLTLLKALVRQQLPEKYKEIFFDQSKNGYAGYIDGGASQEEFYKFIKPILEKMDGTEELLVKLNREDLLRKQRTFDNGSIPHQIHLGELHAILRRQEDFYPFLKDNREKIEKILTFRIPYYVGPLARGNSRFAWMTRKSEETITPWNFEEVVDKGASAQSFIERMTNFDKNLPNEKVLPKHSLLYEYFTVYNELTKVKYVTEGMRKPAFLSGEQKKAIVDLLFKTNRKVTVKQLKEDYFKKIECFDSVEISGVEDRFNASLGTYHDLLKIIKDKDFLDNEENEDILEDIVLTLTLFEDREMIEERLKTYAHLFDDKVMKQLKRRRYTGWGRLSRKLINGIRDKQSGKTILDFLKSDGFANRNFMQLIHDDSLTFKEDIQKAQVSGQGDSLHEHIANLAGSPAIKKGILQTVKVVDELVKVMGRHKPENIVIEMARENQTTQKGQKNSRERMKRIEEGIKELGSQILKEHPVENTQLQNEKLYLYYLQNGRDMYVDQELDINRLSDYDVDHIVPQSFLKDDSIDNKVLTRSDKARGKSDNVPSEEVVKKMKNYWRQLLNAKLITQRKFDNLTKAERGGLSELDKAGFIKRQLVETRQITKHVAQILDSRMNTKYDENDKLIREVKVITLKSKLVSDFRKDFQFYKVREINNYHHAHDAYLNAVVGTALIKKYPKLESEFVYGDYKVYDVRKMIAKSEQEIGKATAKYFFYSNIMNFFKTEITLANGEIRKRPLIETNGETGEIVWDKGRDFATVRKVLSMPQVNIVKKTEVQTGGFSKESILPKRNSDKLIARKKDWDPKKYGGFDSPTVAYSVLVVAKVEKGKSKKLKSVKELLGITIMERSSFEKNPIDFLEAKGYKEVKKDLIIKLPKYSLFELENGRKRMLASAGELQKGNELALPSKYVNFLYLASHYEKLKGSPEDNEQKQLFVEQHKHYLDEIIEQISEFSKRVILADANLDKVLSAYNKHRDKPIREQAENIIHLFTLTNLGAPAAFKYFDTTIDRKRYTSTKEVLDATLIHQSITGLYETRIDLSQLGGDGGPAPGGGGGSGGTLNIEDEHRLHETSKEPDVSLGSTWLSDFPQAWAETGGMGLAVRQAPLIIPLKATSTPVSIKQYPMSQEARLGIKPHIQRLLDQGILVPCQSPWNTPLLPVKKPGTNDYRPVQDLREVNKRVEDIHPTVPNPYNLLSGLPPSHQWYTVLDLKDAFFCLRLHPTSQPLFAFEWRDPEMGISGQLTWTRLPQGFKNSPTLFDEALHRDLADFRIQHPDLILLQYVDDLLLAATSELDCQQGTRALLQTLGNLGYRASAKKAQICQKQVKYLGYLLKEGQRWLTEARKETVMGQPTPKTPRQLREFLGTAGFCRLWIPGFAEMAAPLYPLTKTGTLFNWGPDQQKAYQEIKQALLTAPALGLPDLTKPFELFVDEKQGYAKGVLTQKLGPWRRPVAYLSKKLDPVAAGWPPCLRMVAAIAVLTKDAGKLTMGQPLVILAPHAVEALVKQPPDRWLSNARMTHYQALLLDTDRVQFGPVVALNPATLLPLPEEGLQHNCLDILAEAHGTRPDLTDQPLPDADHTWYTDGSSLLQEGQRKAGAAVTTETEVIWAKALPAGTSAQRAELIALTQALKMAEGKKLNVYTDSRYAFATAHIHGEIYRRRGLLTSEGKEIKNKDEILALLKALFLPKRLSIIHCPGHQKGHSAEARGNRMADQAARKAAITETPDTSTLLAGKRTADGSEFEKRTADGSEFESPKKKAKVE

SEQ ID NO: 7038 - protein, 2094 aa, synthetic construct; identical to SEQ ID NO: 4521

SEQ ID NO: 7039 - protein, 2022 aa, synthetic construct
MPAAKRVKLDGGDKKYSIGLDIGTNSVGWAVITDEYKVPSKKFKVLGNTDRHSIKKNLIGALLFDSGETAEATRLKRTARRRYTRRKNRICYLQEIFSNEMAKVDDSFFHRLEESFLVEEDKKHERHPIFGNIVDEVAYHEKYPTIYHLRKKLVDSTDKADLRLIYLALAHMIKFRGHFLIEGDLNPDNSDVDKLFIQLVQTYNQLFEENPINASGVDAKAILSARLSKSRRLENLIAQLPGEKKNGLFGNLIALSLGLTPNFKSNFDLAEDAKLQLSKDTYDDDLDNLLAQIGDQYADLFLAAKNLSDAILLSDILRVNTEITKAPLSASMIKRYDEHHQDLTLLKALVRQQLPEKYKEIFFDQSKNGYAGYIDGGASQEEFYKFIKPILEKMDGTEELLVKLNREDLLRKQRTFDNGSIPHQIHLGELHAILRRQEDFYPFLKDNREKIEKILTFRIPYYVGPLARGNSRFAWMTRKSEETITPWNFEEVVDKGASAQSFIERMTNFDKNLPNEKVLPKHSLLYEYFTVYNELTKVKYVTEGMRKPAFLSGEQKKAIVDLLFKTNRKVTVKQLKEDYFKKIECFDSVEISGVEDRFNASLGTYHDLLKIIKDKDFLDNEENEDILEDIVLTLTLFEDREMIEERLKTYAHLFDDKVMKQLKRRRYTGWGRLSRKLINGIRDKQSGKTILDFLKSDGFANRNFMQLIHDDSLTFKEDIQKAQVSGQGDSLHEHIANLAGSPAIKKGILQTVKVVDELVKVMGRHKPENIVIEMARENQTTQKGQKNSRERMKRIEEGIKELGSQILKEHPVENTQLQNEKLYLYYLQNGRDMYVDQELDINRLSDYDVDHIVPQSFLKDDSIDNKVLTRSDKARGKSDNVPSEEVVKKMKNYWRQLLNAKLITQRKFDNLTKAERGGLSELDKAGFIKRQLVETRQITKHVAQILDSRMNTKYDENDKLIREVKVITLKSKLVSDFRKDFQFYKVREINNYHHAHDAYLNAVVGTALIKKYPKLESEFVYGDYKVYDVRKMIAKSEQEIGKATAKYFFYSNIMNFFKTEITLANGEIRKRPLIETNGETGEIVWDKGRDFATVRKVLSMPQVNIVKKTEVQTGGFSKESILPKRNSDKLIARKKDWDPKKYGGFDSPTVAYSVLVVAKVEKGKSKKLKSVKELLGITIMERSSFEKNPIDFLEAKGYKEVKKDLIIKLPKYSLFELENGRKRMLASAGELQKGNELALPSKYVNFLYLASHYEKLKGSPEDNEQKQLFVEQHKHYLDEIIEQISEFSKRVILADANLDKVLSAYNKHRDKPIREQAENIIHLFTLTNLGAPAAFKYFDTTIDRKRYTSTKEVLDATLIHQSITGLYETRIDLSQLGGDGGPAPGGGGGSGGGRDIMKDIKVRLMTDSPDDSQDLMIGAIESNLFADQISWKSDQPVWLNQWPLKQEKLQALQQLVTEQLQLGHLEESNSPWNTPVFVIKKKSGKWRLLQDLRAVNATMHDMGALQPGLPSPVAPPKGWEIIIIDLQDCFFNIKLHPEDCKRFAFSVPSPNFKRPYQRFQWKVLPQGMKNSPTLCQKFVDKAILTVRDKYQDSYIVHYMDDILLAHPSRSIVDEILTSMIQALNKHGLVVSTEKIQKYDNLKYLGTHIQGDSVSYQKLQIRTDKLRTLNDFQKLLGNINWIRPFLKLTTGELKPLFEILNPDSNPISTRKLTPEACKALQLMNERLSTARVKRLDLSQPWSLCILKTEYTPTACLWQDGVVEWIHLPHISPKVITPYDIFCTQLIIKGRHRSKELFSKDPDYIVVPYTKVQFDLLLQEKEDWPISLLGFLGEVHFHLPKDPLLTFTLQTAIIFPHMTSTTPLEKGIVIFTDGSANGRSVTYIQGREPIIKENTQNTAQQAEIVAVITAFEEVSQPFNLYTDSKYVTGLFPEIETATLSPRTKIYTELKHLQRLIHKRQEKFYIGHIRGHTGLPGPLAQGNAYADSLTRILTAGKRTADGSEFEKRTADGSEFESPKKKAKVE

SEQ ID NO: 7040 - protein, 2086 aa, synthetic construct
MPAAKRVKLDGGDKKYSIGLDIGTNSVGWAVITDEYKVPSKKFKVLGNTDRHSIKKNLIGALLFDSGETAEATRLKRTARRRYTRRKNRICYLQEIFSNEMAKVDDSFFHRLEESFLVEEDKKHERHPIFGNIVDEVAYHEKYPTIYHLRKKLVDSTDKADLRLIYLALAHMIKFRGHFLIEGDLNPDNSDVDKLFIQLVQTYNQLFEENPINASGVDAKAILSARLSKSRRLENLIAQLPGEKKNGLFGNLIALSLGLTPNFKSNFDLAEDAKLQLSKDTYDDDLDNLLAQIGDQYADLFLAAKNLSDAILLSDILRVNTEITKAPLSASMIKRYDEHHQDLTLLKALVRQQLPEKYKEIFFDQSKNGYAGYIDGGASQEEFYKFIKPILEKMDGTEELLVKLNREDLLRKQRTFDNGSIPHQIHLGELHAILRRQEDFYPFLKDNREKIEKILTFRIPYYVGPLARGNSRFAWMTRKSEETITPWNFEEVVDKGASAQSFIERMTNFDKNLPNEKVLPKHSLLYEYFTVYNELTKVKYVTEGMRKPAFLSGEQKKAIVDLLFKTNRKVTVKQLKEDYFKKIECFDSVEISGVEDRFNASLGTYHDLLKIIKDKDFLDNEENEDILEDIVLTLTLFEDREMIEERLKTYAHLFDDKVMKQLKRRRYTGWGRLSRKLINGIRDKQSGKTILDFLKSDGFANRNFMQLIHDDSLTFKEDIQKAQVSGQGDSLHEHIANLAGSPAIKKGILQTVKVVDELVKVMGRHKPENIVIEMARENQTTQKGQKNSRERMKRIEEGIKELGSQILKEHPVENTQLQNEKLYLYYLQNGRDMYVDQELDINRLSDYDVDHIVPQSFLKDDSIDNKVLTRSDKARGKSDNVPSEEVVKKMKNYWRQLLNAKLITQRKFDNLTKAERGGLSELDKAGFIKRQLVETRQITKHVAQILDSRMNTKYDENDKLIREVKVITLKSKLVSDFRKDFQFYKVREINNYHHAHDAYLNAVVGTALIKKYPKLESEFVYGDYKVYDVRKMIAKSEQEIGKATAKYFFYSNIMNFFKTEITLANGEIRKRPLIETNGETGEIVWDKGRDFATVRKVLSMPQVNIVKKTEVQTGGFSKESILPKRNSDKLIARKKDWDPKKYGGFDSPTVAYSVLVVAKVEKGKSKKLKSVKELLGITIMERSSFEKNPIDFLEAKGYKEVKKDLIIKLPKYSLFELENGRKRMLASAGELQKGNELALPSKYVNFLYLASHYEKLKGSPEDNEQKQLFVEQHKHYLDEIIEQISEFSKRVILADANLDKVLSAYNKHRDKPIREQAENIIHLFTLTNLGAPAAFKYFDTTIDRKRYTSTKEVLDATLIHQSITGLYETRIDLSQLGGDGGPAPGGGGGSGGLDDEYRLYSPLVKPDQNIQFWLEQFPQAWAETAGMGLAKQVPPQVIQLKASATPVSVRQYPLSKEAQEGIRPHVQRLIQQGILVPVQSPWNTPLLPVRKPGTNDYRPVQDLREVNKRVQDIHPTVPNPYNLLCALPPQRSWYTVLDLKDAFFCLRLHPTSQPLFAFEWRDPGTGRTGQLTWTRLPQGFKNSPTIFNEALHRDLANFRIQHPQVTLLQYVDDLLLAGATKQDCLEGTKALLLELSDLGYRASAKKAQICRREVTYLGYSLRDGQRWLTEARKKTVVQIPAPTTAKQVREFLGKAGFCRLFIPGFATLAAPLYPLTKPKGEFSWAPEHQKAFDAIKKALLSAPALALPDVTKPFTLYVDERKGVARGVLTQTLGPWRRPVAYLSKKLDPVASGWPVCLKAIAAVAILVKDADKLTLGQNITVIAPHALENIVRQPPDRWMTNARMTHYQSLLLTERVTFAPPAALNPATLLPEETDEPVTHDCHQLLIEETGVRKDLTDIPLTGEVLTWFTDGSSYVVEGKRMAGAAVVDGTRTIWASSLPEGTSAQKAELMALTQALRLAEGKSINIYTDSRYAFATAHVHGAIYKQRGWLTSAGREIKNKEEILSLLEALHLPKRLAIIHCPGHQKAKDPISRGNQMADRVAKQAAQGVNLLPAGKRTADGSEFEKRTADGSEFESPKKKAKVE

SEQ ID NO: 7041 - protein, 2174 aa, synthetic construct
MPAAKRVKLDGGDKKYSIGLDIGTNSVGWAVITDEYKVPSKKFKVLGNTDRHSIKKNLIGALLFDSGETAEATRLKRTARRRYTRRKNRICYLQEIFSNEMAKVDDSFFHRLEESFLVEEDKKHERHPIFGNIVDEVAYHEKYPTIYHLRKKLVDSTDKADLRLIYLALAHMIKFRGHFLIEGDLNPDNSDVDKLFIQLVQTYNQLFEENPINASGVDAKAILSARLSKSRRLENLIAQLPGEKKNGLFGNLIALSLGLTPNFKSNFDLAEDAKLQLSKDTYDDDLDNLLAQIGDQYADLFLAAKNLSDAILLSDILRVNTEITKAPLSASMIKRYDEHHQDLTLLKALVRQQLPEKYKEIFFDQSKNGYAGYIDGGASQEEFYKFIKPILEKMDGTEELLVKLNREDLLRKQRTFDNGSIPHQIHLGELHAILRRQEDFYPFLKDNREKIEKILTFRIPYYVGPLARGNSRFAWMTRKSEETITPWNFEEVVDKGASAQSFIERMTNFDKNLPNEKVLPKHSLLYEYFTVYNELTKVKYVTEGMRKPAFLSGEQKKAIVDLLFKTNRKVTVKQLKEDYFKKIECFDSVEISGVEDRFNASLGTYHDLLKIIKDKDFLDNEENEDILEDIVLTLTLFEDREMIEERLKTYAHLFDDKVMKQLKRRRYTGWGRLSRKLINGIRDKQSGKTILDFLKSDGFANRNFMQLIHDDSLTFKEDIQKAQVSGQGDSLHEHIANLAGSPAIKKGILQTVKVVDELVKVMGRHKPENIVIEMARENQTTQKGQKNSRERMKRIEEGIKELGSQILKEHPVENTQLQNEKLYLYYLQNGRDMYVDQELDINRLSDYDVDHIVPQSFLKDDSIDNKVLTRSDKARGKSDNVPSEEVVKKMKNYWRQLLNAKLITQRKFDNLTKAERGGLSELDKAGFIKRQLVETRQITKHVAQILDSRMNTKYDENDKLIREVKVITLKSKLVSDFRKDFQFYKVREINNYHHAHDAYLNAVVGTALIKKYPKLESEFVYGDYKVYDVRKMIAKSEQEIGKATAKYFFYSNIMNFFKTEITLANGEIRKRPLIETNGETGEIVWDKGRDFATVRKVLSMPQVNIVKKTEVQTGGFSKESILPKRNSDKLIARKKDWDPKKYGGFDSPTVAYSVLVVAKVEKGKSKKLKSVKELLGITIMERSSFEKNPIDFLEAKGYKEVKKDLIIKLPKYSLFELENGRKRMLASAGELQKGNELALPSKYVNFLYLASHYEKLKGSPEDNEQKQLFVEQHKHYLDEIIEQISEFSKRVILADANLDKVLSAYNKHRDKPIREQAENIIHLFTLTNLGAPAAFKYFDTTIDRKRYTSTKEVLDATLIHQSITGLYETRIDLSQLGGDGGPAPGGGGGSGGMDPLQLLQPLEAEIKGTKLKAHWNSGATITCVPEAFLEDERPIQTMLIKTIHGEKQQDVYYLTFKVQGRKVEAEVLASPYDYILLNPSDVPWLMKKPLQLTVLVPLHEYQERLLQQTALPKEQKELLQKLFLKYDALWQHWENQVGHRRIKPHNIATGTLAPRPQKQYPINPKAKPSIQIVIDDLLKQGVLIQQNSTMNTPVYPVPKPDGKWRMVLDYREVNKTIPLIAAQNQHSAGILSSIYRGKYKTTLDLTNGFWAHPITPESYWLTAFTWQGKQYCWTRLPQGFLNSPALFTADVVDLLKEIPNVQAYVDDIYISHDDPQEHLEQLEKIFSILLNAGYVVSLKKSEIAQREVEFLGFNITKEGRGLTDTFKQKLLNITPPKDLKQLQSILGLLNFARNFIPNYSELVKPLYTIVANANGKFISWTEDNSNQLQHIISVLNQADNLEERNPETRLIIKVNSSPSAGYIRYYNEGSKRPIMYVNYIFSKAEAKFTQTEKLLTTMHKGLIKAMDLAMGQEILVYSPIVSMTKIQRTPLPERKALPVRWITWMTYLEDPRIQFHYDKSLPELQQIPNVTEDVIAKTKHPSEFAMVFYTDGSAIKHPDVNKSHSAGMGIAQVQFIPEYKIVHQWSIPLGDHTAQLAEIAAVEFACKKALKISGPVLIVTDSFYVAESANKELPYWKSNGFLNNKKKPLRHVSKWKSIAECLQLKPDIIIMHEKGHQQPMTTLHTEGNNLADKLATQGSYVVHAGKRTADGSEFEKRTADGSEFESPKKKAKVE

SEQ ID NO: 7042 - protein, 2092 aa, synthetic construct
MPAAKRVKLDGGDKKYSIGLDIGTNSVGWAVITDEYKVPSKKFKVLGNTDRHSIKKNLIGALLFDSGETAEATRLKRTARRRYTRRKNRICYLQEIFSNEMAKVDDSFFHRLEESFLVEEDKKHERHPIFGNIVDEVAYHEKYPTIYHLRKKLVDSTDKADLRLIYLALAHMIKFRGHFLIEGDLNPDNSDVDKLFIQLVQTYNQLFEENPINASGVDAKAILSARLSKSRRLENLIAQLPGEKKNGLFGNLIALSLGLTPNFKSNFDLAEDAKLQLSKDTYDDDLDNLLAQIGDQYADLFLAAKNLSDAILLSDILRVNTEITKAPLSASMIKRYDEHHQDLTLLKALVRQQLPEKYKEIFFDQSKNGYAGYIDGGASQEEFYKFIKPILEKMDGTEELLVKLNREDLLRKQRTFDNGSIPHQIHLGELHAILRRQEDFYPFLKDNREKIEKILTFRIPYYVGPLARGNSRFAWMTRKSEETITPWNFEEVVDKGASAQSFIERMTNFDKNLPNEKVLPKHSLLYEYFTVYNELTKVKYVTEGMRKPAFLSGEQKKAIVDLLFKTNRKVTVKQLKEDYFKKIECFDSVEISGVEDRFNASLGTYHDLLKIIKDKDFLDNEENEDILEDIVLTLTLFEDREMIEERLKTYAHLFDDKVMKQLKRRRYTGWGRLSRKLINGIRDKQSGKTILDFLKSDGFANRNFMQLIHDDSLTFKEDIQKAQVSGQGDSLHEHIANLAGSPAIKKGILQTVKVVDELVKVMGRHKPENIVIEMARENQTTQKGQKNSRERMKRIEEGIKELGSQILKEHPVENTQLQNEKLYLYYLQNGRDMYVDQELDINRLSDYDVDHIVPQSFLKDDSIDNKVLTRSDKARGKSDNVPSEEVVKKMKNYWRQLLNAKLITQRKFDNLTKAERGGLSELDKAGFIKRQLVETRQITKHVAQILDSRMNTKYDENDKLIREVKVITLKSKLVSDFRKDFQFYKVREINNYHHAHDAYLNAVVGTALIKKYPKLESEFVYGDYKVYDVRKMIAKSEQEIGKATAKYFFYSNIMNFFKTEITLANGEIRKRPLIETNGETGEIVWDKGRDFATVRKVLSMPQVNIVKKTEVQTGGFSKESILPKRNSDKLIARKKDWDPKKYGGFDSPTVAYSVLVVAKVEKGKSKKLKSVKELLGITIMERSSFEKNPIDFLEAKGYKEVKKDLIIKLPKYSLFELENGRKRMLASAGELQKGNELALPSKYVNFLYLASHYEKLKGSPEDNEQKQLFVEQHKHYLDEIIEQISEFSKRVILADANLDKVLSAYNKHRDKPIREQAENIIHLFTLTNLGAPAAFKYFDTTIDRKRYTSTKEVLDATLIHQSITGLYETRIDLSQLGGDGGPAPGGGGGSGGVLNLEEEYRLHEKPVPSSIDPSWLQLFPTVWAERAGMGLANQVPPVVVELRSGASPVAVRQYPMSKEAREGIRPHIQRFLDLGVLVPCQSPWNTPLLPVKKPGTNDYRPVQDLREINKRVQDIHPTVPNPYNLLSSLPPSHTWYSVLDLKDAFFCLKLHPNSQPLFAFEWRDPEKGNTGQLTWTRLPQGFKNSPTLFDEALHRDLAPFRALNPQVVLLQYVDDLLVAAPTYRDCKEGTQKLLQELSKLGYRVSAKKAQLCQKEVTYLGYLLKEGKRWLTPARKATVMKIPPPTTPRQVREFLGTAGFCRLWIPGFASLAAPLYPLTKESIPFIWTEEHQKAFDRIKEALLSAPALALPDLTKPFTLYVDERAGVARGVLTQTLGPWRRPVAYLSKKLDPVASGWPTCLKAVAAVALLLKDADKLTLGQNVTVIASHSLESIVRQPPDRWMTNARMTHYQSLLLNERVSFAPPAVLNPATLLPVESEATPVHRCSEILAEETGTRRDLKDQPLPGVPAWYTDGSSFIAEGKRRAGAAIVDGKRTVWASSLPEGTSAQKAELVALTQALRLAEGKDINIYTDSRYAFATAHIHGAIYKQRGLLTSAGKDIKNKEEILALLEAIHLPKRVAIIHCPGHQKGNDPVATGNRRADEAAKQAALSTRVLAETTKPAGKRTADGSEFEKRTADGSEFESPKKKAKVE

SEQ ID NO: 7043 - protein, 2092 aa, synthetic construct
MPAAKRVKLDGGDKKYSIGLDIGTNSVGWAVITDEYKVPSKKFKVLGNTDRHSIKKNLIGALLFDSGETAEATRLKRTARRRYTRRKNRICYLQEIFSNEMAKVDDSFFHRLEESFLVEEDKKHERHPIFGNIVDEVAYHEKYPTIYHLRKKLVDSTDKADLRLIYLALAHMIKFRGHFLIEGDLNPDNSDVDKLFIQLVQTYNQLFEENPINASGVDAKAILSARLSKSRRLENLIAQLPGEKKNGLFGNLIALSLGLTPNFKSNFDLAEDAKLQLSKDTYDDDLDNLLAQIGDQYADLFLAAKNLSDAILLSDILRVNTEITKAPLSASMIKRYDEHHQDLTLLKALVRQQLPEKYKEIFFDQSKNGYAGYIDGGASQEEFYKFIKPILEKMDGTEELLVKLNREDLLRKQRTFDNGSIPHQIHLGELHAILRRQEDFYPFLKDNREKIEKILTFRIPYYVGPLARGNSRFAWMTRKSEETITPWNFEEVVDKGASAQSFIERMTNFDKNLPNEKVLPKHSLLYEYFTVYNELTKVKYVTEGMRKPAFLSGEQKKAIVDLLFKTNRKVTVKQLKEDYFKKIECFDSVEISGVEDRFNASLGTYHDLLKIIKDKDFLDNEENEDILEDIVLTLTLFEDREMIEERLKTYAHLFDDKVMKQLKRRRYTGWGRLSRKLINGIRDKQSGKTILDFLKSDGFANRNFMQLIHDDSLTFKEDIQKAQVSGQGDSLHEHIANLAGSPAIKKGILQTVKVVDELVKVMGRHKPENIVIEMARENQTTQKGQKNSRERMKRIEEGIKELGSQILKEHPVENTQLQNEKLYLYYLQNGRDMYVDQELDINRLSDYDVDHIVPQSFLKDDSIDNKVLTRSDKARGKSDNVPSEEVVKKMKNYWRQLLNAKLITQRKFDNLTKAERGGLSELDKAGFIKRQLVETRQITKHVAQILDSRMNTKYDENDKLIREVKVITLKSKLVSDFRKDFQFYKVREINNYHHAHDAYLNAVVGTALIKKYPKLESEFVYGDYKVYDVRKMIAKSEQEIGKATAKYFFYSNIMNFFKTEITLANGEIRKRPLIETNGETGEIVWDKGRDFATVRKVLSMPQVNIVKKTEVQTGGFSKESILPKRNSDKLIARKKDWDPKKYGGFDSPTVAYSVLVVAKVEKGKSKKLKSVKELLGITIMERSSFEKNPIDFLEAKGYKEVKKDLIIKLPKYSLFELENGRKRMLASAGELQKGNELALPSKYVNFLYLASHYEKLKGSPEDNEQKQLFVEQHKHYLDEIIEQISEFSKRVILADANLDKVLSAYNKHRDKPIREQAENIIHLFTLTNLGAPAAFKYFDTTIDRKRYTSTKEVLDATLIHQSITGLYETRIDLSQLGGDGGPAPGGGGGSGGVLNLEEEYRLHEKPVPSSIDPSWLQLFPTVWAERAGMGLANQVPPVVVELRSGASPVAVRQYPMSKEAREGIRPHIQRFLDLGVLVPCQSPWNTPLLPVKKPGTNDYRPVQDLREINKRVQDIHPTVPNPYNLLSSLPPSHTWYSVLDLKDAFFCLKLHPNSQPLFAFEWRDPEKGNTGQLTWTRLPQGFKNSPTLFNEALHRDLAPFRALNPQVVLLQYVDDLLVAAPTYRDCKEGTQKLLQELSKLGYRVSAKKAQLCQKEVTYLGYLLKEGKRWLTPARKATVMKIPPPTTPRQVREFLGKAGFCRLFIPGFASLAAPLYPLTKPSIPFIWTEEHQKAFDRIKEALLSAPALALPDLTKPFTLYVDERAGVARGVLTQTLGPWRRPVAYLSKKLDPVASGWPTCLKAVAAVALLLKDADKLTLGQNVTVIASHSLESIVRQPPDRWMTNARMTHYQSLLLNERVSFAPPAVLNPATLLPVESEATPVHRCSEILAEETGTRRDLKDQPLPGVPAWYTDGSSFIAEGKRRAGAAIVDGKRTVWASSLPEGTSAQKAELVALTQALRLAEGKDINIYTDSRYAFATAHIHGAIYKQRGWLTSAGKDIKNKEEILALLEAIHLPKRVAIIHCPGHQKGNDPVATGNRRADEAAKQAALSTRVLAETTKPAGKRTADGSEFEKRTADGSEFESPKKKAKVE

SEQ ID NO: 7044 - protein, 2094 aa, synthetic construct
MPAAKRVKLDGGDKKYSIGLDIGTNSVGWAVITDEYKVPSKKFKVLGNTDRHSIKKNLIGALLFDSGETAEATRLKRTARRRYTRRKNRICYLQEIFSNEMAKVDDSFFHRLEESFLVEEDKKHERHPIFGNIVDEVAYHEKYPTIYHLRKKLVDSTDKADLRLIYLALAHMIKFRGHFLIEGDLNPDNSDVDKLFIQLVQTYNQLFEENPINASGVDAKAILSARLSKSRRLENLIAQLPGEKKNGLFGNLIALSLGLTPNFKSNFDLAEDAKLQLSKDTYDDDLDNLLAQIGDQYADLFLAAKNLSDAILLSDILRVNTEITKAPLSASMIKRYDEHHQDLTLLKALVRQQLPEKYKEIFFDQSKNGYAGYIDGGASQEEFYKFIKPILEKMDGTEELLVKLNREDLLRKQRTFDNGSIPHQIHLGELHAILRRQEDFYPFLKDNREKIEKILTFRIPYYVGPLARGNSRFAWMTRKSEETITPWNFEEVVDKGASAQSFIERMTNFDKNLPNEKVLPKHSLLYEYFTVYNELTKVKYVTEGMRKPAFLSGEQKKAIVDLLFKTNRKVTVKQLKEDYFKKIECFDSVEISGVEDRFNASLGTYHDLLKIIKDKDFLDNEENEDILEDIVLTLTLFEDREMIEERLKTYAHLFDDKVMKQLKRRRYTGWGRLSRKLINGIRDKQSGKTILDFLKSDGFANRNFMQLIHDDSLTFKEDIQKAQVSGQGDSLHEHIANLAGSPAIKKGILQTVKVVDELVKVMGRHKPENIVIEMARENQTTQKGQKNSRERMKRIEEGIKELGSQILKEHPVENTQLQNEKLYLYYLQNGRDMYVDQELDINRLSDYDVDHIVPQSFLKDDSIDNKVLTRSDKARGKSDNVPSEEVVKKMKNYWRQLLNAKLITQRKFDNLTKAERGGLSELDKAGFIKRQLVETRQITKHVAQILDSRMNTKYDENDKLIREVKVITLKSKLVSDFRKDFQFYKVREINNYHHAHDAYLNAVVGTALIKKYPKLESEFVYGDYKVYDVRKMIAKSEQEIGKATAKYFFYSNIMNFFKTEITLANGEIRKRPLIETNGETGEIVWDKGRDFATVRKVLSMPQVNIVKKTEVQTGGFSKESILPKRNSDKLIARKKDWDPKKYGGFDSPTVAYSVLVVAKVEKGKSKKLKSVKELLGITIMERSSFEKNPIDFLEAKGYKEVKKDLIIKLPKYSLFELENGRKRMLASAGELQKGNELALPSKYVNFLYLASHYEKLKGSPEDNEQKQLFVEQHKHYLDEIIEQISEFSKRVILADANLDKVLSAYNKHRDKPIREQAENIIHLFTLTNLGAPAAFKYFDTTIDRKRYTSTKEVLDATLIHQSITGLYETRIDLSQLGGDGGPAPGGGGGSGGTLNIEDEYRLHETSKEPDVPLGSTWLSDFPQAWAETGGMGLAVRQAPLIIPLKATSTPVSIKQYPMSQEARLGIKPHIQRLLDQGILVPCQSPWNTPLLPVKKPGTNDYRPVQDLREVNKRVEDIHPTVPNPYNLLSGLPPSHQWYTVLDLKDAFFCLRLHPTSQPLFAFEWRDPEMGISGQLTWTRLPQGFKNSPTLFNEALHRDLADFRIQHPDLILLQYVDDLLLAATSEQDCQRGTRALLQTLGNLGYRASAKKAQICQKQVKYLGYLLKEGQRWLTEARKETVMGQPTPKTPRQLREFLGTAGFCRLWIPGFAEMAAPLYPLTKPGTLFNWGPDQQKAYQEIKQALLTAPALGLPDLTKPFELFVDEKQGYAKGVLTQKLGPWRRPVAYLSKKLDPVAAGWPPCLRMVAAIAVLTKDAGKLTMGQPLVILAPHAVEALVKQPPDRWLSNARMTHYQAMLLDTDRVQFGPVVALNPATLLPLPEKEAPHDCLEILAETHGTRPDLTDQPIPDADYTWYTDGSSFLQEGQRRAGAAVTTETEVIWARALPAGTSAQRAELIALTQALKMAEGKKLNVYTDSRYAFATAHVHGEIYRRRGWLTSEGREIKNKNEILALLKALFLPKRLSIIHCPGHQKGNSAEARGNRMADQAAREAAMKAVLETSTLLAGKRTADGSEFEKRTADGSEFESPKKKAKVE

SEQ ID NO: 7045 - protein, 2098 aa, synthetic construct
MPAAKRVKLDGGDKKYSIGLDIGTNSVGWAVITDEYKVPSKKFKVLGNTDRHSIKKNLIGALLFDSGETAEATRLKRTARRRYTRRKNRICYLQEIFSNEMAKVDDSFFHRLEESFLVEEDKKHERHPIFGNIVDEVAYHEKYPTIYHLRKKLVDSTDKADLRLIYLALAHMIKFRGHFLIEGDLNPDNSDVDKLFIQLVQTYNQLFEENPINASGVDAKAILSARLSKSRRLENLIAQLPGEKKNGLFGNLIALSLGLTPNFKSNFDLAEDAKLQLSKDTYDDDLDNLLAQIGDQYADLFLAAKNLSDAILLSDILRVNTEITKAPLSASMIKRYDEHHQDLTLLKALVRQQLPEKYKEIFFDQSKNGYAGYIDGGASQEEFYKFIKPILEKMDGTEELLVKLNREDLLRKQRTFDNGSIPHQIHLGELHAILRRQEDFYPFLKDNREKIEKILTFRIPYYVGPLARGNSRFAWMTRKSEETITPWNFEEVVDKGASAQSFIERMTNFDKNLPNEKVLPKHSLLYEYFTVYNELTKVKYVTEGMRKPAFLSGEQKKAIVDLLFKTNRKVTVKQLKEDYFKKIECFDSVEISGVEDRFNASLGTYHDLLKIIKDKDFLDNEENEDILEDIVLTLTLFEDREMIEERLKTYAHLFDDKVMKQLKRRRYTGWGRLSRKLINGIRDKQSGKTILDFLKSDGFANRNFMQLIHDDSLTFKEDIQKAQVSGQGDSLHEHIANLAGSPAIKKGILQTVKVVDELVKVMGRHKPENIVIEMARENQTTQKGQKNSRERMKRIEEGIKELGSQILKEHPVENTQLQNEKLYLYYLQNGRDMYVDQELDINRLSDYDVDHIVPQSFLKDDSIDNKVLTRSDKARGKSDNVPSEEVVKKMKNYWRQLLNAKLITQRKFDNLTKAERGGLSELDKAGFIKRQLVETRQITKHVAQILDSRMNTKYDENDKLIREVKVITLKSKLVSDFRKDFQFYKVREINNYHHAHDAYLNAVVGTALIKKYPKLESEFVYGDYKVYDVRKMIAKSEQEIGKATAKYFFYSNIMNFFKTEITLANGEIRKRPLIETNGETGEIVWDKGRDFATVRKVLSMPQVNIVKKTEVQTGGFSKESILPKRNSDKLIARKKDWDPKKYGGFDSPTVAYSVLVVAKVEKGKSKKLKSVKELLGITIMERSSFEKNPIDFLEAKGYKEVKKDLIIKLPKYSLFELENGRKRMLASAGELQKGNELALPSKYVNFLYLASHYEKLKGSPEDNEQKQLFVEQHKHYLDEIIEQISEFSKRVILADANLDKVLSAYNKHRDKPIREQAENIIHLFTLTNLGAPAAFKYFDTTIDRKRYTSTKEVLDATLIHQSITGLYETRIDLSQLGGDGGGGSGSSEAAAKGGTAPLEEEYRLFLEAPIQNVTLLEQWKREIPKVWAEINPPGLASTQAPIHVQLLSTALPVRVRQYPITLEAKRSLRETIRKFRAAGILRPVHSPWNTPLLPVRKSGTSEYRMVQDLREVNKRVETIHPTVPNPYTLLSLLPPDRIWYSVLDLKDAFFCIPLAPESQLIFAFEWADAEEGESGQLTWTRLPQGFKNSPTLFNEALNRDLQGFRLDHPSVSLLQYVDDLLIAADTQAACLSATRDLLMTLAELGYRVSGKKAQLCQEEVTYLGFKIHKGSRSLSNSRTQAILQIPVPKTKRQVREFLGTIGYCRLWIPGFAELAQPLYAATRPGNDPLVWGEKEEEAFQSLKLALTQPPALALPSLDKPFQLFVEETSGAAKGVLTQALGPWKRPVAYLSKRLDPVAAGWPRCLRAIAAAALLTREASKLTFGQDIEITSSHNLESLLRSPPDKWLTNARITQYQVLLLDPPRVRFKQTAALNPATLLPETDDTLPIHHCLDTLDSLTSTRPDLTDQPLAQAEATLFTDGSSYIRDGKRYAGAAVVTLDSVIWAEPLPIGTSAQKAELIALTKALEWSKDKSVNIYTDSRYAFATLHVHGMIYRERGWLTAGGKAIKNAPEILALLTAVWLPKRVAVMHCKGHQKDDAPTSTGNRRADEVAREVAIRPLSTQATISAGKRTADGSEFEKRTADGSEFESPKKKAKVE

SEQ ID NO: 7046 - protein, 2098 aa, synthetic construct
MPAAKRVKLDGGDKKYSIGLDIGTNSVGWAVITDEYKVPSKKFKVLGNTDRHSIKKNLIGALLFDSGETAEATRLKRTARRRYTRRKNRICYLQEIFSNEMAKVDDSFFHRLEESFLVEEDKKHERHPIFGNIVDEVAYHEKYPTIYHLRKKLVDSTDKADLRLIYLALAHMIKFRGHFLIEGDLNPDNSDVDKLFIQLVQTYNQLFEENPINASGVDAKAILSARLSKSRRLENLIAQLPGEKKNGLFGNLIALSLGLTPNFKSNFDLAEDAKLQLSKDTYDDDLDNLLAQIGDQYADLFLAAKNLSDAILLSDILRVNTEITKAPLSASMIKRYDEHHQDLTLLKALVRQQLPEKYKEIFFDQSKNGYAGYIDGGASQEEFYKFIKPILEKMDGTEELLVKLNREDLLRKQRTFDNGSIPHQIHLGELHAILRRQEDFYPFLKDNREKIEKILTFRIPYYVGPLARGNSRFAWMTRKSEETITPWNFEEVVDKGASAQSFIERMTNFDKNLPNEKVLPKHSLLYEYFTVYNELTKVKYVTEGMRKPAFLSGEQKKAIVDLLFKTNRKVTVKQLKEDYFKKIECFDSVEISGVEDRFNASLGTYHDLLKIIKDKDFLDNEENEDILEDIVLTLTLFEDREMIEERLKTYAHLFDDKVMKQLKRRRYTGWGRLSRKLINGIRDKQSGKTILDFLKSDGFANRNFMQLIHDDSLTFKEDIQKAQVSGQGDSLHEHIANLAGSPAIKKGILQTVKVVDELVKVMGRHKPENIVIEMARENQTTQKGQKNSRERMKRIEEGIKELGSQILKEHPVENTQLQNEKLYLYYLQNGRDMYVDQELDINRLSDYDVDHIVPQSFLKDDSIDNKVLTRSDKARGKSDNVPSEEVVKKMKNYWRQLLNAKLITQRKFDNLTKAERGGLSELDKAGFIKRQLVETRQITKHVAQILDSRMNTKYDENDKLIREVKVITLKSKLVSDFRKDFQFYKVREINNYHHAHDAYLNAVVGTALIKKYPKLESEFVYGDYKVYDVRKMIAKSEQEIGKATAKYFFYSNIMNFFKTEITLANGEIRKRPLIETNGETGEIVWDKGRDFATVRKVLSMPQVNIVKKTEVQTGGFSKESILPKRNSDKLIARKKDWDPKKYGGFDSPTVAYSVLVVAKVEKGKSKKLKSVKELLGITIMERSSFEKNPIDFLEAKGYKEVKKDLIIKLPKYSLFELENGRKRMLASAGELQKGNELALPSKYVNFLYLASHYEKLKGSPEDNEQKQLFVEQHKHYLDEIIEQISEFSKRVILADANLDKVLSAYNKHRDKPIREQAENIIHLFTLTNLGAPAAFKYFDTTIDRKRYTSTKEVLDATLIHQSITGLYETRIDLSQLGGDGGGGSGSSEAAAKGGTAPLEEEYRLFLEAPIQNVTLLEQWKREIPKVWAEINPPGLASTQAPIHVQLLSTALPVRVRQYPITLEAKRSLRETIRKFRAAGILRPVHSPWNTPLLPVRKSGTSEYRMVQDLREVNKRVETIHPTVPNPYTLLSLLPPDRIWYSVLDLKDAFFCIPLAPESQLIFAFEWADAEEGESGQLTWTRLPQGFKNSPTLFNEALNRDLQGFRLDHPSVSLLQYVDDLLIAADTQAACLSATRDLLMTLAELGYRVSGKKAQLCQEEVTYLGFKIHKGSRSLSNSRTQAILQIPVPKTKRQVREFLGKIGYCRLFIPGFAELAQPLYAATRPGNDPLVWGEKEEEAFQSLKLALTQPPALALPSLDKPFQLFVEETSGAAKGVLTQALGPWKRPVAYLSKRLDPVAAGWPRCLRAIAAAALLTREASKLTFGQDIEITSSHNLESLLRSPPDKWLTNARITQYQVLLLDPPRVRFKQTAALNPATLLPETDDTLPIHHCLDTLDSLTSTRPDLTDQPLAQAEATLFTDGSSYIRDGKRYAGAAVVTLDSVIWAEPLPIGTSAQKAELIALTKALEWSKDKSVNIYTDSRYAFATLHVHGMIYRERGWLTAGGKAIKNAPEILALLTAVWLPKRVAVMHCKGHQKDDAPTSTGNRRADEVAREVAIRPLSTQATISAGKRTADGSEFEKRTADGSEFESPKKKAKVE

SEQ ID NO: 7047 - protein, 2218 aa, synthetic construct
MPAAKRVKLDGGDKKYSIGLDIGTNSVGWAVITDEYKVPSKKFKVLGNTDRHSIKKNLIGALLFDSGETAEATRLKRTARRRYTRRKNRICYLQEIFSNEMAKVDDSFFHRLEESFLVEEDKKHERHPIFGNIVDEVAYHEKYPTIYHLRKKLVDSTDKADLRLIYLALAHMIKFRGHFLIEGDLNPDNSDVDKLFIQLVQTYNQLFEENPINASGVDAKAILSARLSKSRRLENLIAQLPGEKKNGLFGNLIALSLGLTPNFKSNFDLAEDAKLQLSKDTYDDDLDNLLAQIGDQYADLFLAAKNLSDAILLSDILRVNTEITKAPLSASMIKRYDEHHQDLTLLKALVRQQLPEKYKEIFFDQSKNGYAGYIDGGASQEEFYKFIKPILEKMDGTEELLVKLNREDLLRKQRTFDNGSIPHQIHLGELHAILRRQEDFYPFLKDNREKIEKILTFRIPYYVGPLARGNSRFAWMTRKSEETITPWNFEEVVDKGASAQSFIERMTNFDKNLPNEKVLPKHSLLYEYFTVYNELTKVKYVTEGMRKPAFLSGEQKKAIVDLLFKTNRKVTVKQLKEDYFKKIECFDSVEISGVEDRFNASLGTYHDLLKIIKDKDFLDNEENEDILEDIVLTLTLFEDREMIEERLKTYAHLFDDKVMKQLKRRRYTGWGRLSRKLINGIRDKQSGKTILDFLKSDGFANRNFMQLIHDDSLTFKEDIQKAQVSGQGDSLHEHIANLAGSPAIKKGILQTVKVVDELVKVMGRHKPENIVIEMARENQTTQKGQKNSRERMKRIEEGIKELGSQILKEHPVENTQLQNEKLYLYYLQNGRDMYVDQELDINRLSDYDVDHIVPQSFLKDDSIDNKVLTRSDKARGKSDNVPSEEVVKKMKNYWRQLLNAKLITQRKFDNLTKAERGGLSELDKAGFIKRQLVETRQITKHVAQILDSRMNTKYDENDKLIREVKVITLKSKLVSDFRKDFQFYKVREINNYHHAHDAYLNAVVGTALIKKYPKLESEFVYGDYKVYDVRKMIAKSEQEIGKATAKYFFYSNIMNFFKTEITLANGEIRKRPLIETNGETGEIVWDKGRDFATVRKVLSMPQVNIVKKTEVQTGGFSKESILPKRNSDKLIARKKDWDPKKYGGFDSPTVAYSVLVVAKVEKGKSKKLKSVKELLGITIMERSSFEKNPIDFLEAKGYKEVKKDLIIKLPKYSLFELENGRKRMLASAGELQKGNELALPSKYVNFLYLASHYEKLKGSPEDNEQKQLFVEQHKHYLDEIIEQISEFSKRVILADANLDKVLSAYNKHRDKPIREQAENIIHLFTLTNLGAPAAFKYFDTTIDRKRYTSTKEVLDATLIHQSITGLYETRIDLSQLGGDGGGGSGSSEAAAKGGTLGDQGSRGSDPLPEPRVTLTVEGIPTEFLVNTGAEHSVLTKPMGKMGSKRTVVAGATGSKVYPWTTKRLLKIGQKQVTHSFLVIPECPAPLLGRDLLTKLKAQIQFSTEGPQVTWEDRPAMCLVLNLEEEYRLHEKPVPPSIDPSWLQLFPMVWAEKAGMGLANQVPPVVVELKSDASPVAVRQYPMSKEAREGIRPHIQRFLDLGILVPCQSPWNTPLLPVKKPGTNDYRPVQDLREVNKRVQDIHPTVPNPYNLLSSLPPSHTWYSVLDLKDAFFCLKLHPNSQPLFAFEWRDPEKGNTGQLTWTRLPQGFKNSPTLFDEALHRDLASFRALNPQVVMLQYVDDLLVAAPTYRDCKEGTRRLLQELSKLGYRVSAKKAQLCREEVTYLGYLLKGGKRWLTPARKATVMKIPTPTTPRQVREFLGTAGFCRLWIPGFASLAAPLYPLTREKVPFTWTEAHQEAFGRIKEALLSAPALALPDLTKPFALYVDEKEGVARGVLTQTLGPWRRPVAYLSKKLDPVASGWPTCLKAIAAVALLLKDADKLTLGQNVLVIAPHNLESIVRQPPDRWMTNARMTHYQSLLLNERVSFAPPAILNPATLLPVESDDTPIHICSEILAEETGTRPDLRDQPLPGVPAWYTDGSSFIMDGRRQAGAAIVDNKRTVWASNLPEGTSAQKAELIALTQALRLAEGKSINIYTDSRYAFATAHVHGAIYKQRGLLTSAGKDIKNKEEILALLEAIHLPKRVAIIHCPGHQRGTDPVATGNRKADEAAKQAAQSTRILTETTKNAGKRTADGSEFEKRTADGSEFESPKKKAKVE

SEQ ID NO: 7048 - protein, 2096 aa, synthetic construct
MPAAKRVKLDGGDKKYSIGLDIGTNSVGWAVITDEYKVPSKKFKVLGNTDRHSIKKNLIGALLFDSGETAEATRLKRTARRRYTRRKNRICYLQEIFSNEMAKVDDSFFHRLEESFLVEEDKKHERHPIFGNIVDEVAYHEKYPTIYHLRKKLVDSTDKADLRLIYLALAHMIKFRGHFLIEGDLNPDNSDVDKLFIQLVQTYNQLFEENPINASGVDAKAILSARLSKSRRLENLIAQLPGEKKNGLFGNLIALSLGLTPNFKSNFDLAEDAKLQLSKDTYDDDLDNLLAQIGDQYADLFLAAKNLSDAILLSDILRVNTEITKAPLSASMIKRYDEHHQDLTLLKALVRQQLPEKYKEIFFDQSKNGYAGYIDGGASQEEFYKFIKPILEKMDGTEELLVKLNREDLLRKQRTFDNGSIPHQIHLGELHAILRRQEDFYPFLKDNREKIEKILTFRIPYYVGPLARGNSRFAWMTRKSEETITPWNFEEVVDKGASAQSFIERMTNFDKNLPNEKVLPKHSLLYEYFTVYNELTKVKYVTEGMRKPAFLSGEQKKAIVDLLFKTNRKVTVKQLKEDYFKKIECFDSVEISGVEDRFNASLGTYHDLLKIIKDKDFLDNEENEDILEDIVLTLTLFEDREMIEERLKTYAHLFDDKVMKQLKRRRYTGWGRLSRKLINGIRDKQSGKTILDFLKSDGFANRNFMQLIHDDSLTFKEDIQKAQVSGQGDSLHEHIANLAGSPAIKKGILQTVKVVDELVKVMGRHKPENIVIEMARENQTTQKGQKNSRERMKRIEEGIKELGSQILKEHPVENTQLQNEKLYLYYLQNGRDMYVDQELDINRLSDYDVDHIVPQSFLKDDSIDNKVLTRSDKARGKSDNVPSEEVVKKMKNYWRQLLNAKLITQRKFDNLTKAERGGLSELDKAGFIKRQLVETRQITKHVAQILDSRMNTKYDENDKLIREVKVITLKSKLVSDFRKDFQFYKVREINNYHHAHDAYLNAVVGTALIKKYPKLESEFVYGDYKVYDVRKMIAKSEQEIGKATAKYFFYSNIMNFFKTEITLANGEIRKRPLIETNGETGEIVWDKGRDFATVRKVLSMPQVNIVKKTEVQTGGFSKESILPKRNSDKLIARKKDWDPKKYGGFDSPTVAYSVLVVAKVEKGKSKKLKSVKELLGITIMERSSFEKNPIDFLEAKGYKEVKKDLIIKLPKYSLFELENGRKRMLASAGELQKGNELALPSKYVNFLYLASHYEKLKGSPEDNEQKQLFVEQHKHYLDEIIEQISEFSKRVILADANLDKVLSAYNKHRDKPIREQAENIIHLFTLTNLGAPAAFKYFDTTIDRKRYTSTKEVLDATLIHQSITGLYETRIDLSQLGGDGGGGSGSSEAAAKGGTLGIEDEYRLHETSTEPDVSLGSTWLSDFPQAWAETGGMGLAVRQAPLIIPLKATSTPVSIQQYPMSHEARLGIKPHIQRLLDQGILVPCQSPWNTPLLPVKKPGTNDYRPVQDLREVNKRVEDIHPTVPNPYNLLSGLPPSHQWYTVLDLKDAFFCLRLHPTSQPLFAFEWRDPGMGISGQLTWTRLPQGFKNSPTLFNEALHRDLADFRIQHPDLILLQYVDDILLAATSELDCQQGTRALLQTLGDLGYRASAKKAQICQKQVKYLGYLLREGQRWLTEARKETVMGQPVPKTPRQLREFLGTAGFCRLWIPGFAEMAAPLYPLTKPGTLFSWGPDQQKAYQEIKQALLTAPALGLPDLTKPFELFVDEKQGYAKGVLTQKLGPWRRPVAYLSKKLDPVAAGWPPCLRMVAAIAVLTKDAGKLTMGQPLVILAPHAVEALVKQPPDRWLSNARMTHYQAMLLDTDRVQFGPVVALNPATLLPLPEEGAPHDCLEILAETHGTRPDLTDQPIPDADHTWYTDGSSFLQEGQRKAGAAVTTETEVIWAGALPAGTSAQRAELIALTQALKMAEGKRLNVYTDSRYAFATAHIHGEIYRRRGWLTSEGREIKNKSEILALLKALFLPKRLSIIHCLGHQKGDSAEARGNRLADQAAREAAIKTPPDTSTLLAGKRTADGSEFEKRTADGSEFESPKKKAKVE

SEQ ID NO: 7049 - protein, 2096 aa, synthetic construct
MPAAKRVKLDGGDKKYSIGLDIGTNSVGWAVITDEYKVPSKKFKVLGNTDRHSIKKNLIGALLFDSGETAEATRLKRTARRRYTRRKNRICYLQEIFSNEMAKVDDSFFHRLEESFLVEEDKKHERHPIFGNIVDEVAYHEKYPTIYHLRKKLVDSTDKADLRLIYLALAHMIKFRGHFLIEGDLNPDNSDVDKLFIQLVQTYNQLFEENPINASGVDAKAILSARLSKSRRLENLIAQLPGEKKNGLFGNLIALSLGLTPNFKSNFDLAEDAKLQLSKDTYDDDLDNLLAQIGDQYADLFLAAKNLSDAILLSDILRVNTEITKAPLSASMIKRYDEHHQDLTLLKALVRQQLPEKYKEIFFDQSKNGYAGYIDGGASQEEFYKFIKPILEKMDGTEELLVKLNREDLLRKQRTFDNGSIPHQIHLGELHAILRRQEDFYPFLKDNREKIEKILTFRIPYYVGPLARGNSRFAWMTRKSEETITPWNFEEVVDKGASAQSFIERMTNFDKNLPNEKVLPKHSLLYEYFTVYNELTKVKYVTEGMRKPAFLSGEQKKAIVDLLFKTNRKVTVKQLKEDYFKKIECFDSVEISGVEDRFNASLGTYHDLLKIIKDKDFLDNEENEDILEDIVLTLTLFEDREMIEERLKTYAHLFDDKVMKQLKRRRYTGWGRLSRKLINGIRDKQSGKTILDFLKSDGFANRNFMQLIHDDSLTFKEDIQKAQVSGQGDSLHEHIANLAGSPAIKKGILQTVKVVDELVKVMGRHKPENIVIEMARENQTTQKGQKNSRERMKRIEEGIKELGSQILKEHPVENTQLQNEKLYLYYLQNGRDMYVDQELDINRLSDYDVDHIVPQSFLKDDSIDNKVLTRSDKARGKSDNVPSEEVVKKMKNYWRQLLNAKLITQRKFDNLTKAERGGLSELDKAGFIKRQLVETRQITKHVAQILDSRMNTKYDENDKLIREVKVITLKSKLVSDFRKDFQFYKVREINNYHHAHDAYLNAVVGTALIKKYPKLESEFVYGDYKVYDVRKMIAKSEQEIGKATAKYFFYSNIMNFFKTEITLANGEIRKRPLIETNGETGEIVWDKGRDFATVRKVLSMPQVNIVKKTEVQTGGFSKESILPKRNSDKLIARKKDWDPKKYGGFDSPTVAYSVLVVAKVEKGKSKKLKSVKELLGITIMERSSFEKNPIDFLEAKGYKEVKKDLIIKLPKYSLFELENGRKRMLASAGELQKGNELALPSKYVNFLYLASHYEKLKGSPEDNEQKQLFVEQHKHYLDEIIEQISEFSKRVILADANLDKVLSAYNKHRDKPIREQAENIIHLFTLTNLGAPAAFKYFDTTIDRKRYTSTKEVLDATLIHQSITGLYETRIDLSQLGGDGGGGSGSSEAAAKGGTLNIEDEYRLHEISTEPDVSPGSTWLSDFPQAWAETGGMGLAVRQAPLIIPLKATSTPVSIKQYPMSQEAKLGIKPHIQRLLDQGILVPCQSPWNTPLLPVKKPGTNDYRPVQGLREVNKRVEDIHPTVPNPYNLLSGLPTSHRWYTVLDLKDAFFCLRLHPTSQPLFASEWRDPGMGISGQLTWTRLPQGFKNSPTLFNEALHRGLADFRIQHPDLILLQYVDDLLLAATSELDCQQGTRALLKTLGNLGYRASAKKAQICQKQVKYLGYLLREGQRWLTEARKETVMGQPTPKTPRQLREFLGKAGFCRLFIPRFAEMAAPLYPLTKPGTLFNWGPDQQKAYHEIKQALLTAPALGLPDLTKPFELFVDEKQGYAKGVLTQKLGPWRRPVAYLSKKLDPVAAGWPPCLRMVAAIAVLTKDAGKLTMGQPLVILAPHAVEALVKQPPDRWLSNARMTHYQAMLLDTDRVQFGPVVALNPATLLPLPEEGAPHDCLEILAETHGTEPDLTDQPIPDADHTWYTDGSSFLQEGQRKAGAAVTTETEVIWARALPAGTSAQRAELIALTQALKMAEGKRLNVYTDSRYAFATAHIHGEIYKRRGWLTSEGREIKNKSEILALLKALFLPKRLSIIHCLGHQKGDSAEARGNRLADQAAREAAIKTPPDTSTLLAGKRTADGSEFEKRTADGSEFESPKKKAKVE

SEQ ID NO: 7050 - protein, 2090 aa, synthetic construct
MPAAKRVKLDGGDKKYSIGLDIGTNSVGWAVITDEYKVPSKKFKVLGNTDRHSIKKNLIGALLFDSGETAEATRLKRTARRRYTRRKNRICYLQEIFSNEMAKVDDSFFHRLEESFLVEEDKKHERHPIFGNIVDEVAYHEKYPTIYHLRKKLVDSTDKADLRLIYLALAHMIKFRGHFLIEGDLNPDNSDVDKLFIQLVQTYNQLFEENPINASGVDAKAILSARLSKSRRLENLIAQLPGEKKNGLFGNLIALSLGLTPNFKSNFDLAEDAKLQLSKDTYDDDLDNLLAQIGDQYADLFLAAKNLSDAILLSDILRVNTEITKAPLSASMIKRYDEHHQDLTLLKALVRQQLPEKYKEIFFDQSKNGYAGYIDGGASQEEFYKFIKPILEKMDGTEELLVKLNREDLLRKQRTFDNGSIPHQIHLGELHAILRRQEDFYPFLKDNREKIEKILTFRIPYYVGPLARGNSRFAWMTRKSEETITPWNFEEVVDKGASAQSFIERMTNFDKNLPNEKVLPKHSLLYEYFTVYNELTKVKYVTEGMRKPAFLSGEQKKAIVDLLFKTNRKVTVKQLKEDYFKKIECFDSVEISGVEDRFNASLGTYHDLLKIIKDKDFLDNEENEDILEDIVLTLTLFEDREMIEERLKTYAHLFDDKVMKQLKRRRYTGWGRLSRKLINGIRDKQSGKTILDFLKSDGFANRNFMQLIHDDSLTFKEDIQKAQVSGQGDSLHEHIANLAGSPAIKKGILQTVKVVDELVKVMGRHKPENIVIEMARENQTTQKGQKNSRERMKRIEEGIKELGSQILKEHPVENTQLQNEKLYLYYLQNGRDMYVDQELDINRLSDYDVDHIVPQSFLKDDSIDNKVLTRSDKARGKSDNVPSEEVVKKMKNYWRQLLNAKLITQRKFDNLTKAERGGLSELDKAGFIKRQLVETRQITKHVAQILDSRMNTKYDENDKLIREVKVITLKSKLVSDFRKDFQFYKVREINNYHHAHDAYLNAVVGTALIKKYPKLESEFVYGDYKVYDVRKMIAKSEQEIGKATAKYFFYSNIMNFFKTEITLANGEIRKRPLIETNGETGEIVWDKGRDFATVRKVLSMPQVNIVKKTEVQTGGFSKESILPKRNSDKLIARKKDWDPKKYGGFDSPTVAYSVLVVAKVEKGKSKKLKSVKELLGITIMERSSFEKNPIDFLEAKGYKEVKKDLIIKLPKYSLFELENGRKRMLASAGELQKGNELALPSKYVNFLYLASHYEKLKGSPEDNEQKQLFVEQHKHYLDEIIEQISEFSKRVILADANLDKVLSAYNKHRDKPIREQAENIIHLFTLTNLGAPAAFKYFDTTIDRKRYTSTKEVLDATLIHQSITGLYETRIDLSQLGGDGGGGSGSSEAAAKGGTLQLDDEYRLYSPLVKPDQNIQFWLEQFPQAWAETAGMGLAKQVPPQVIQLKASATPVSVRQYPLSKEAQEGIRPHVQRLIQQGILVPVQSPWNTPLLPVRKPGTNDYRPVQDLREVNKRVQDIHPTVPNPYNLLCALPPQRSWYTVLDLKDAFFCLRLHPTSQPLFAFEWRDPGTGRTGQLTWTRLPQGFKNSPTIFDEALHRDLANFRIQHPQVTLLQYVDDLLLAGATKQDCLEGTKALLLELSDLGYRASAKKAQICRREVTYLGYSLRDGQRWLTEARKKTVVQIPAPTTAKQVREFLGTAGFCRLWIPGFATLAAPLYPLTKEKGEFSWAPEHQKAFDAIKKALLSAPALALPDVTKPFTLYVDERKGVARGVLTQTLGPWRRPVAYLSKKLDPVASGWPVCLKAIAAVAILVKDADKLTLGQNITVIAPHALENIVRQPPDRWMTNARMTHYQSLLLTERVTFAPPAALNPATLLPEETDEPVTHDCHQLLIEETGVRKDLTDIPLTGEVLTWFTDGSSYVVEGKRMAGAAVVDGTRTIWASSLPEGTSAQKAELMALTQALRLAEGKSINIYTDSRYAFATAHVHGAIYKQRGLLTSAGREIKNKEEILSLLEALHLPKRLAIIHCPGHQKAKDPISRGNQMADRVAKQAAQGVNLLAGKRTADGSEFEKRTADGSEFESPKKKAKVE

SEQ ID NO: 7051 - protein, 2087 aa, synthetic construct
MPAAKRVKLDGGDKKYSIGLDIGTNSVGWAVITDEYKVPSKKFKVLGNTDRHSIKKNLIGALLFDSGETAEATRLKRTARRRYTRRKNRICYLQEIFSNEMAKVDDSFFHRLEESFLVEEDKKHERHPIFGNIVDEVAYHEKYPTIYHLRKKLVDSTDKADLRLIYLALAHMIKFRGHFLIEGDLNPDNSDVDKLFIQLVQTYNQLFEENPINASGVDAKAILSARLSKSRRLENLIAQLPGEKKNGLFGNLIALSLGLTPNFKSNFDLAEDAKLQLSKDTYDDDLDNLLAQIGDQYADLFLAAKNLSDAILLSDILRVNTEITKAPLSASMIKRYDEHHQDLTLLKALVRQQLPEKYKEIFFDQSKNGYAGYIDGGASQEEFYKFIKPILEKMDGTEELLVKLNREDLLRKQRTFDNGSIPHQIHLGELHAILRRQEDFYPFLKDNREKIEKILTFRIPYYVGPLARGNSRFAWMTRKSEETITPWNFEEVVDKGASAQSFIERMTNFDKNLPNEKVLPKHSLLYEYFTVYNELTKVKYVTEGMRKPAFLSGEQKKAIVDLLFKTNRKVTVKQLKEDYFKKIECFDSVEISGVEDRFNASLGTYHDLLKIIKDKDFLDNEENEDILEDIVLTLTLFEDREMIEERLKTYAHLFDDKVMKQLKRRRYTGWGRLSRKLINGIRDKQSGKTILDFLKSDGFANRNFMQLIHDDSLTFKEDIQKAQVSGQGDSLHEHIANLAGSPAIKKGILQTVKVVDELVKVMGRHKPENIVIEMARENQTTQKGQKNSRERMKRIEEGIKELGSQILKEHPVENTQLQNEKLYLYYLQNGRDMYVDQELDINRLSDYDVDHIVPQSFLKDDSIDNKVLTRSDKARGKSDNVPSEEVVKKMKNYWRQLLNAKLITQRKFDNLTKAERGGLSELDKAGFIKRQLVETRQITKHVAQILDSRMNTKYDENDKLIREVKVITLKSKLVSDFRKDFQFYKVREINNYHHAHDAYLNAVVGTALIKKYPKLESEFVYGDYKVYDVRKMIAKSEQEIGKATAKYFFYSNIMNFFKTEITLANGEIRKRPLIETNGETGEIVWDKGRDFATVRKVLSMPQVNIVKKTEVQTGGFSKESILPKRNSDKLIARKKDWDPKKYGGFDSPTVAYSVLVVAKVEKGKSKKLKSVKELLGITIMERSSFEKNPIDFLEAKGYKEVKKDLIIKLPKYSLFELENGRKRMLASAGELQKGNELALPSKYVNFLYLASHYEKLKGSPEDNEQKQLFVEQHKHYLDEIIEQISEFSKRVILADANLDKVLSAYNKHRDKPIREQAENIIHLFTLTNLGAPAAFKYFDTTIDRKRYTSTKEVLDATLIHQSITGLYETRIDLSQLGGDGGGGSGSSEAAAKGGIPWLMKKPLQLTTLVPLQEYEERLLKQTMLTGSYKEKLQSLFLKYDALWQHWENQVGHRRIKPHHIATGTVNPRPQKQYPINPKAKASIQTVINDLLKQGVLIQQNSIMNTPVYPVPKPDGKWRMVLDYREVNKTIPLIAAQNQHSAGILSSIFRGKYKTTLDLSNGFWAHSITPESYWLTAFTWLGQQYCWTRLPQGFLNSPALFNADVVDLLKEVPNVQVYVDDIYISHDDPREHLEQLEKVFSLLLNAGYVVSLKKSEIAQHEVEFLGFNITKEGRGLTETFKQKLLNITPPRDLKQLQSILGLLNFARNFIPNFSELVKPLYNIIATAPGKYITWTTDNSQQLQNIISMLNSAENLEERNPEVRLIMKVNTSPSAGYIRFYNEFAKRPIMYLNYVYTKAEVKFTNTEKLLTTIHKGLIKALDLGMGQEILVYSPIVSMTKIQKTPLPERKALPIRWITWMSYLEDPRIQFHYDKTLPELQQVPTVTDDIIAKIKHPSEFSMVFYTDGSAIKHPNVNKSHNAGMGIAQVQFKPEFTVINTWSIPLGDHTAQLAEVAAVEFACKKALKIDGPVLIVTDSFYVAESVNKELPYWQSNGFFNNKKKPLKHVSKWKSIADCIQLKPDIIIIHEKGHQPTASTFHTEGNNLADKLATQGSYVVNAGKRTADGSEFEKRTADGSEFESPKKKAKVE

SEQ ID NO: 7052 - protein, 2098 aa, synthetic construct
MPAAKRVKLDGGDKKYSIGLDIGTNSVGWAVITDEYKVPSKKFKVLGNTDRHSIKKNLIGALLFDSGETAEATRLKRTARRRYTRRKNRICYLQEIFSNEMAKVDDSFFHRLEESFLVEEDKKHERHPIFGNIVDEVAYHEKYPTIYHLRKKLVDSTDKADLRLIYLALAHMIKFRGHFLIEGDLNPDNSDVDKLFIQLVQTYNQLFEENPINASGVDAKAILSARLSKSRRLENLIAQLPGEKKNGLFGNLIALSLGLTPNFKSNFDLAEDAKLQLSKDTYDDDLDNLLAQIGDQYADLFLAAKNLSDAILLSDILRVNTEITKAPLSASMIKRYDEHHQDLTLLKALVRQQLPEKYKEIFFDQSKNGYAGYIDGGASQEEFYKFIKPILEKMDGTEELLVKLNREDLLRKQRTFDNGSIPHQIHLGELHAILRRQEDFYPFLKDNREKIEKILTFRIPYYVGPLARGNSRFAWMTRKSEETITPWNFEEVVDKGASAQSFIERMTNFDKNLPNEKVLPKHSLLYEYFTVYNELTKVKYVTEGMRKPAFLSGEQKKAIVDLLFKTNRKVTVKQLKEDYFKKIECFDSVEISGVEDRFNASLGTYHDLLKIIKDKDFLDNEENEDILEDIVLTLTLFEDREMIEERLKTYAHLFDDKVMKQLKRRRYTGWGRLSRKLINGIRDKQSGKTILDFLKSDGFANRNFMQLIHDDSLTFKEDIQKAQVSGQGDSLHEHIANLAGSPAIKKGILQTVKVVDELVKVMGRHKPENIVIEMARENQTTQKGQKNSRERMKRIEEGIKELGSQILKEHPVENTQLQNEKLYLYYLQNGRDMYVDQELDINRLSDYDVDHIVPQSFLKDDSIDNKVLTRSDKARGKSDNVPSEEVVKKMKNYWRQLLNAKLITQRKFDNLTKAERGGLSELDKAGFIKRQLVETRQITKHVAQILDSRMNTKYDENDKLIREVKVITLKSKLVSDFRKDFQFYKVREINNYHHAHDAYLNAVVGTALIKKYPKLESEFVYGDYKVYDVRKMIAKSEQEIGKATAKYFFYSNIMNFFKTEITLANGEIRKRPLIETNGETGEIVWDKGRDFATVRKVLSMPQVNIVKKTEVQTGGFSKESILPKRNSDKLIARKKDWDPKKYGGFDSPTVAYSVLVVAKVEKGKSKKLKSVKELLGITIMERSSFEKNPIDFLEAKGYKEVKKDLIIKLPKYSLFELENGRKRMLASAGELQKGNELALPSKYVNFLYLASHYEKLKGSPEDNEQKQLFVEQHKHYLDEIIEQISEFSKRVILADANLDKVLSAYNKHRDKPIREQAENIIHLFTLTNLGAPAAFKYFDTTIDRKRYTSTKEVLDATLIHQSITGLYETRIDLSQLGGDGGGGSEAAAKGSSGGTAPLEEEYRLFLEAPIQNVTLLEQWKREIPKVWAEINPPGLASTQAPIHVQLLSTALPVRVRQYPITLEAKRSLRETIRKFRAAGILRPVHSPWNTPLLPVRKSGTSEYRMVQDLREVNKRVETIHPTVPNPYTLLSLLPPDRIWYSVLDLKDAFFCIPLAPESQLIFAFEWADAEEGESGQLTWTRLPQGFKNSPTLFDEALNRDLQGFRLDHPSVSLLQYVDDLLIAADTQAACLSATRDLLMTLAELGYRVSGKKAQLCQEEVTYLGFKIHKGSRSLSNSRTQAILQIPVPKTKRQVREFLGTIGYCRLWIPGFAELAQPLYAATRGGNDPLVWGEKEEEAFQSLKLALTQPPALALPSLDKPFQLFVEETSGAAKGVLTQALGPWKRPVAYLSKRLDPVAAGWPRCLRAIAAAALLTREASKLTFGQDIEITSSHNLESLLRSPPDKWLTNARITQYQVLLLDPPRVRFKQTAALNPATLLPETDDTLPIHHCLDTLDSLTSTRPDLTDQPLAQAEATLFTDGSSYIRDGKRYAGAAVVTLDSVIWAEPLPIGTSAQKAELIALTKALEWSKDKSVNIYTDSRYAFATLHVHGMIYRERGLLTAGGKAIKNAPEILALLTAVWLPKRVAVMHCKGHQKDDAPTSTGNRRADEVAREVAIRPLSTQATISAGKRTADGSEFEKRTADGSEFESPKKKAKVE

SEQ ID NO: 7053 - protein, 2098 aa, synthetic construct
MPAAKRVKLDGGDKKYSIGLDIGTNSVGWAVITDEYKVPSKKFKVLGNTDRHSIKKNLIGALLFDSGETAEATRLKRTARRRYTRRKNRICYLQEIFSNEMAKVDDSFFHRLEESFLVEEDKKHERHPIFGNIVDEVAYHEKYPTIYHLRKKLVDSTDKADLRLIYLALAHMIKFRGHFLIEGDLNPDNSDVDKLFIQLVQTYNQLFEENPINASGVDAKAILSARLSKSRRLENLIAQLPGEKKNGLFGNLIALSLGLTPNFKSNFDLAEDAKLQLSKDTYDDDLDNLLAQIGDQYADLFLAAKNLSDAILLSDILRVNTEITKAPLSASMIKRYDEHHQDLTLLKALVRQQLPEKYKEIFFDQSKNGYAGYIDGGASQEEFYKFIKPILEKMDGTEELLVKLNREDLLRKQRTFDNGSIPHQIHLGELHAILRRQEDFYPFLKDNREKIEKILTFRIPYYVGPLARGNSRFAWMTRKSEETITPWNFEEVVDKGASAQSFIERMTNFDKNLPNEKVLPKHSLLYEYFTVYNELTKVKYVTEGMRKPAFLSGEQKKAIVDLLFKTNRKVTVKQLKEDYFKKIECFDSVEISGVEDRFNASLGTYHDLLKIIKDKDFLDNEENEDILEDIVLTLTLFEDREMIEERLKTYAHLFDDKVMKQLKRRRYTGWGRLSRKLINGIRDKQSGKTILDFLKSDGFANRNFMQLIHDDSLTFKEDIQKAQVSGQGDSLHEHIANLAGSPAIKKGILQTVKVVDELVKVMGRHKPENIVIEMARENQTTQKGQKNSRERMKRIEEGIKELGSQILKEHPVENTQLQNEKLYLYYLQNGRDMYVDQELDINRLSDYDVDHIVPQSFLKDDSIDNKVLTRSDKARGKSDNVPSEEVVKKMKNYWRQLLNAKLITQRKFDNLTKAERGGLSELDKAGFIKRQLVETRQITKHVAQILDSRMNTKYDENDKLIREVKVITLKSKLVSDFRKDFQFYKVREINNYHHAHDAYLNAVVGTALIKKYPKLESEFVYGDYKVYDVRKMIAKSEQEIGKATAKYFFYSNIMNFFKTEITLANGEIRKRPLIETNGETGEIVWDKGRDFATVRKVLSMPQVNIVKKTEVQTGGFSKESILPKRNSDKLIARKKDWDPKKYGGFDSPTVAYSVLVVAKVEKGKSKKLKSVKELLGITIMERSSFEKNPIDFLEAKGYKEVKKDLIIKLPKYSLFELENGRKRMLASAGELQKGNELALPSKYVNFLYLASHYEKLKGSPEDNEQKQLFVEQHKHYLDEIIEQISEFSKRVILADANLDKVLSAYNKHRDKPIREQAENIIHLFTLTNLGAPAAFKYFDTTIDRKRYTSTKEVLDATLIHQSITGLYETRIDLSQLGGDGGGGSEAAAKGSSGGTAPLEEEYRLFLEAPIQNVTLLEQWKREIPKVWAEINPPGLASTQAPIHVQLLSTALPVRVRQYPITLEAKRSLRETIRKFRAAGILRPVHSPWNTPLLPVRKSGTSEYRMVQDLREVNKRVETIHPTVPNPYTLLSLLPPDRIWYSVLDLKDAFFCIPLAPESQLIFAFEWADAEEGESGQLTWTRLPQGFKNSPTLFNEALNRDLQGFRLDHPSVSLLQYVDDLLIAADTQAACLSATRDLLMTLAELGYRVSGKKAQLCQEEVTYLGFKIHKGSRSLSNSRTQAILQIPVPKTKRQVREFLGTIGYCRLWIPGFAELAQPLYAATRPGNDPLVWGEKEEEAFQSLKLALTQPPALALPSLDKPFQLFVEETSGAAKGVLTQALGPWKRPVAYLSKRLDPVAAGWPRCLRAIAAAALLTREASKLTFGQDIEITSSHNLESLLRSPPDKWLTNARITQYQVLLLDPPRVRFKQTAALNPATLLPETDDTLPIHHCLDTLDSLTSTRPDLTDQPLAQAEATLFTDGSSYIRDGKRYAGAAVVTLDSVIWAEPLPIGTSAQKAELIALTKALEWSKDKSVNIYTDSRYAFATLHVHGMIYRERGWLTAGGKAIKNAPEILALLTAVWLPKRVAVMHCKGHQKDDAPTSTGNRRADEVAREVAIRPLSTQATISAGKRTADGSEFEKRTADGSEFESPKKKAKVE

SEQ ID NO: 7054 - protein, 2098 aa, synthetic construct
MPAAKRVKLDGGDKKYSIGLDIGTNSVGWAVITDEYKVPSKKFKVLGNTDRHSIKKNLIGALLFDSGETAEATRLKRTARRRYTRRKNRICYLQEIFSNEMAKVDDSFFHRLEESFLVEEDKKHERHPIFGNIVDEVAYHEKYPTIYHLRKKLVDSTDKADLRLIYLALAHMIKFRGHFLIEGDLNPDNSDVDKLFIQLVQTYNQLFEENPINASGVDAKAILSARLSKSRRLENLIAQLPGEKKNGLFGNLIALSLGLTPNFKSNFDLAEDAKLQLSKDTYDDDLDNLLAQIGDQYADLFLAAKNLSDAILLSDILRVNTEITKAPLSASMIKRYDEHHQDLTLLKALVRQQLPEKYKEIFFDQSKNGYAGYIDGGASQEEFYKFIKPILEKMDGTEELLVKLNREDLLRKQRTFDNGSIPHQIHLGELHAILRRQEDFYPFLKDNREKIEKILTFRIPYYVGPLARGNSRFAWMTRKSEETITPWNFEEVVDKGASAQSFIERMTNFDKNLPNEKVLPKHSLLYEYFTVYNELTKVKYVTEGMRKPAFLSGEQKKAIVDLLFKTNRKVTVKQLKEDYFKKIECFDSVEISGVEDRFNASLGTYHDLLKIIKDKDFLDNEENEDILEDIVLTLTLFEDREMIEERLKTYAHLFDDKVMKQLKRRRYTGWGRLSRKLINGIRDKQSGKTILDFLKSDGFANRNFMQLIHDDSLTFKEDIQKAQVSGQGDSLHEHIANLAGSPAIKKGILQTVKVVDELVKVMGRHKPENIVIEMARENQTTQKGQKNSRERMKRIEEGIKELGSQILKEHPVENTQLQNEKLYLYYLQNGRDMYVDQELDINRLSDYDVDHIVPQSFLKDDSIDNKVLTRSDKARGKSDNVPSEEVVKKMKNYWRQLLNAKLITQRKFDNLTKAERGGLSELDKAGFIKRQLVETRQITKHVAQILDSRMNTKYDENDKLIREVKVITLKSKLVSDFRKDFQFYKVREINNYHHAHDAYLNAVVGTALIKKYPKLESEFVYGDYKVYDVRKMIAKSEQEIGKATAKYFFYSNIMNFFKTEITLANGEIRKRPLIETNGETGEIVWDKGRDFATVRKVLSMPQVNIVKKTEVQTGGFSKESILPKRNSDKLIARKKDWDPKKYGGFDSPTVAYSVLVVAKVEKGKSKKLKSVKELLGITIMERSSFEKNPIDFLEAKGYKEVKKDLIIKLPKYSLFELENGRKRMLASAGELQKGNELALPSKYVNFLYLASHYEKLKGSPEDNEQKQLFVEQHKHYLDEIIEQISEFSKRVILADANLDKVLSAYNKHRDKPIREQAENIIHLFTLTNLGAPAAFKYFDTTIDRKRYTSTKEVLDATLIHQSITGLYETRIDLSQLGGDGGGGSEAAAKGSSGGTAPLEEEYRLFLEAPIQNVTLLEQWKREIPKVWAEINPPGLASTQAPIHVQLLSTALPVRVRQYPITLEAKRSLRETIRKFRAAGILRPVHSPWNTPLLPVRKSGTSEYRMVQDLREVNKRVETIHPTVPNPYTLLSLLPPDRIWYSVLDLKDAFFCIPLAPESQLIFAFEWADAEEGESGQLTWTRLPQGFKNSPTLFNEALNRDLQGFRLDHPSVSLLQYVDDLLIAADTQAACLSATRDLLMTLAELGYRVSGKKAQLCQEEVTYLGFKIHKGSRSLSNSRTQAILQIPVPKTKRQVREFLGKIGYCRLFIPGFAELAQPLYAATRPGNDPLVWGEKEEEAFQSLKLALTQPPALALPSLDKPFQLFVEETSGAAKGVLTQALGPWKRPVAYLSKRLDPVAAGWPRCLRAIAAAALLTREASKLTFGQDIEITSSHNLESLLRSPPDKWLTNARITQYQVLLLDPPRVRFKQTAALNPATLLPETDDTLPIHHCLDTLDSLTSTRPDLTDQPLAQAEATLFTDGSSYIRDGKRYAGAAVVTLDSVIWAEPLPIGTSAQKAELIALTKALEWSKDKSVNIYTDSRYAFATLHVHGMIYRERGWLTAGGKAIKNAPEILALLTAVWLPKRVAVMHCKGHQKDDAPTSTGNRRADEVAREVAIRPLSTQATISAGKRTADGSEFEKRTADGSEFESPKKKAKVE

SEQ ID NO: 7055 - protein, 2087 aa, synthetic construct
MPAAKRVKLDGGDKKYSIGLDIGTNSVGWAVITDEYKVPSKKFKVLGNTDRHSIKKNLIGALLFDSGETAEATRLKRTARRRYTRRKNRICYLQEIFSNEMAKVDDSFFHRLEESFLVEEDKKHERHPIFGNIVDEVAYHEKYPTIYHLRKKLVDSTDKADLRLIYLALAHMIKFRGHFLIEGDLNPDNSDVDKLFIQLVQTYNQLFEENPINASGVDAKAILSARLSKSRRLENLIAQLPGEKKNGLFGNLIALSLGLTPNFKSNFDLAEDAKLQLSKDTYDDDLDNLLAQIGDQYADLFLAAKNLSDAILLSDILRVNTEITKAPLSASMIKRYDEHHQDLTLLKALVRQQLPEKYKEIFFDQSKNGYAGYIDGGASQEEFYKFIKPILEKMDGTEELLVKLNREDLLRKQRTFDNGSIPHQIHLGELHAILRRQEDFYPFLKDNREKIEKILTFRIPYYVGPLARGNSRFAWMTRKSEETITPWNFEEVVDKGASAQSFIERMTNFDKNLPNEKVLPKHSLLYEYFTVYNELTKVKYVTEGMRKPAFLSGEQKKAIVDLLFKTNRKVTVKQLKEDYFKKIECFDSVEISGVEDRFNASLGTYHDLLKIIKDKDFLDNEENEDILEDIVLTLTLFEDREMIEERLKTYAHLFDDKVMKQLKRRRYTGWGRLSRKLINGIRDKQSGKTILDFLKSDGFANRNFMQLIHDDSLTFKEDIQKAQVSGQGDSLHEHIANLAGSPAIKKGILQTVKVVDELVKVMGRHKPENIVIEMARENQTTQKGQKNSRERMKRIEEGIKELGSQILKEHPVENTQLQNEKLYLYYLQNGRDMYVDQELDINRLSDYDVDHIVPQSFLKDDSIDNKVLTRSDKARGKSDNVPSEEVVKKMKNYWRQLLNAKLITQRKFDNLTKAERGGLSELDKAGFIKRQLVETRQITKHVAQILDSRMNTKYDENDKLIREVKVITLKSKLVSDFRKDFQFYKVREINNYHHAHDAYLNAVVGTALIKKYPKLESEFVYGDYKVYDVRKMIAKSEQEIGKATAKYFFYSNIMNFFKTEITLANGEIRKRPLIETNGETGEIVWDKGRDFATVRKVLSMPQVNIVKKTEVQTGGFSKESILPKRNSDKLIARKKDWDPKKYGGFDSPTVAYSVLVVAKVEKGKSKKLKSVKELLGITIMERSSFEKNPIDFLEAKGYKEVKKDLIIKLPKYSLFELENGRKRMLASAGELQKGNELALPSKYVNFLYLASHYEKLKGSPEDNEQKQLFVEQHKHYLDEIIEQISEFSKRVILADANLDKVLSAYNKHRDKPIREQAENIIHLFTLTNLGAPAAFKYFDTTIDRKRYTSTKEVLDATLIHQSITGLYETRIDLSQLGGDGGGGSEAAAKGSSGGVPWILKKPLELTIKLDLEEQQGTLLNNSILSKKGKEELKQLFEKYSALWQSWENQVGHRRIRPHKIATGTVKPTPQKQYHINPKAKPDIQIVINDLLKQGVLIQKESTMNTPVYPVPKPNGRWRMVLDYRAVNKVTPLIAVQNQHSYGILGSLFKGRYKTTIDLSNGFWAHPIVPEDYWITAFTWQGKQYCWTVLPQGFLNSPGLFTGDVVDLLQGIPNVEVYVDDVYISHDSEKEHLEYLDILFNRLKEAGYIISLKKSNIANSIVDFLGFQITNEGRGLTDTFKEKLENITAPTTLKQLQSILGLLNFARNFIPDFTELIAPLYALIPKSTKNYVPWQIEHSTTLETLITKLNGAEYLQGRKGDKTLIMKVNASYTTGYIRYYNEGEKKPISYVSIVFSKTELKFTELEKLLTTVHKGLLKALDLSMGQNIHVYSPIVSMQNIQKTPQTAKKALASRWLSWLSYLEDPRIRFFYDPQMPALKDLPAVDTGKDNKKHPSNFQHIFYTDGSAITSPTKEGHLNAGMGIVYFINKDGNLQKQQEWSISLGNHTAQFAEIAAFEFALKKCLPLGGNILVVTDSNYVAKAYNEELDVWASNGFVNNRKKPLKHISKWKSVADLKRLRPDVVVTHEPGHQKLDSSPHAYGNNLADQLATQASFKVHAGKRTADGSEFEKRTADGSEFESPKKKAKVE

SEQ ID NO: 7056 - protein, 2176 aa, synthetic construct
MPAAKRVKLDGGDKKYSIGLDIGTNSVGWAVITDEYKVPSKKFKVLGNTDRHSIKKNLIGALLFDSGETAEATRLKRTARRRYTRRKNRICYLQEIFSNEMAKVDDSFFHRLEESFLVEEDKKHERHPIFGNIVDEVAYHEKYPTIYHLRKKLVDSTDKADLRLIYLALAHMIKFRGHFLIEGDLNPDNSDVDKLFIQLVQTYNQLFEENPINASGVDAKAILSARLSKSRRLENLIAQLPGEKKNGLFGNLIALSLGLTPNFKSNFDLAEDAKLQLSKDTYDDDLDNLLAQIGDQYADLFLAAKNLSDAILLSDILRVNTEITKAPLSASMIKRYDEHHQDLTLLKALVRQQLPEKYKEIFFDQSKNGYAGYIDGGASQEEFYKFIKPILEKMDGTEELLVKLNREDLLRKQRTFDNGSIPHQIHLGELHAILRRQEDFYPFLKDNREKIEKILTFRIPYYVGPLARGNSRFAWMTRKSEETITPWNFEEVVDKGASAQSFIERMTNFDKNLPNEKVLPKHSLLYEYFTVYNELTKVKYVTEGMRKPAFLSGEQKKAIVDLLFKTNRKVTVKQLKEDYFKKIECFDSVEISGVEDRFNASLGTYHDLLKIIKDKDFLDNEENEDILEDIVLTLTLFEDREMIEERLKTYAHLFDDKVMKQLKRRRYTGWGRLSRKLINGIRDKQSGKTILDFLKSDGFANRNFMQLIHDDSLTFKEDIQKAQVSGQGDSLHEHIANLAGSPAIKKGILQTVKVVDELVKVMGRHKPENIVIEMARENQTTQKGQKNSRERMKRIEEGIKELGSQILKEHPVENTQLQNEKLYLYYLQNGRDMYVDQELDINRLSDYDVDHIVPQSFLKDDSIDNKVLTRSDKARGKSDNVPSEEVVKKMKNYWRQLLNAKLITQRKFDNLTKAERGGLSELDKAGFIKRQLVETRQITKHVAQILDSRMNTKYDENDKLIREVKVITLKSKLVSDFRKDFQFYKVREINNYHHAHDAYLNAVVGTALIKKYPKLESEFVYGDYKVYDVRKMIAKSEQEIGKATAKYFFYSNIMNFFKTEITLANGEIRKRPLIETNGETGEIVWDKGRDFATVRKVLSMPQVNIVKKTEVQTGGFSKESILPKRNSDKLIARKKDWDPKKYGGFDSPTVAYSVLVVAKVEKGKSKKLKSVKELLGITIMERSSFEKNPIDFLEAKGYKEVKKDLIIKLPKYSLFELENGRKRMLASAGELQKGNELALPSKYVNFLYLASHYEKLKGSPEDNEQKQLFVEQHKHYLDEIIEQISEFSKRVILADANLDKVLSAYNKHRDKPIREQAENIIHLFTLTNLGAPAAFKYFDTTIDRKRYTSTKEVLDATLIHQSITGLYETRIDLSQLGGDGGGGSEAAAKGSSGGMNPLQLLQPLPAEIKGTKLLAHWNSGATITCIPESFLEDEQPIKKTLIKTIHGEKQQNVYYVTFKVKGRKVEAEVIASPYEYILLSPTDVPWLTQQPLQLTILVPLQEYQEKILSKTALPEDQKQQLKTLFVKYDNLWQHWENQVGHRKIRPHNIATGDYPPRPQKQYPINPKAKPSIQIVIDDLLKQGVLTPQNSTMNTPVYPVPKPDGRWRMVLDYREVNKTIPLTAAQNQHSAGILATIVRQKYKTTLDLANGFWAHPITPESYWLTAFTWQGKQYCWTRLPQGFLNSPALFNADVVDLLKEIPNVQVYVDDIYLSHDDPKEHVQQLEKVFQILLQAGYVVSLKKSEIGQKTVEFLGFNITKEGRGLTDTFKTKLLNITPPKDLKQLQSILGKLNFARNFIPNFAELVQPLYNLIAPAKGKYIEWSEENTKQLNMVIEALNTASNLEERLPEQRLVIKVNTSPSAGYVRYYNETGKKPIMYLNYVFSKAELKFSMLEKLLTTMHKALIKAMDLAMGQEILVYSPIVSMTKIQKTPLPERKALPIRWITWMTYLEDPRIQFHYDKTLPELKHIPDVYTSSQSPVKHPSQYEGVFYTDGSAIKSPDPTKSNNAGMGIVHATYKPEYQVLNQWSIPLGNHTAQMAEIAAVEFACKKALKIPGPVLVITDSFYVAESANKELPYWKSNGFVNNKKKPLKHISKWKSIAECLSMKPDITIQHEKGISLQIPVFILKGNALADKLATQGSYVVNAGKRTADGSEFEKRTADGSEFESPKKKAKVE

SEQ ID NO: 7057 - protein, 2218 aa, synthetic construct
MPAAKRVKLDGGDKKYSIGLDIGTNSVGWAVITDEYKVPSKKFKVLGNTDRHSIKKNLIGALLFDSGETAEATRLKRTARRRYTRRKNRICYLQEIFSNEMAKVDDSFFHRLEESFLVEEDKKHERHPIFGNIVDEVAYHEKYPTIYHLRKKLVDSTDKADLRLIYLALAHMIKFRGHFLIEGDLNPDNSDVDKLFIQLVQTYNQLFEENPINASGVDAKAILSARLSKSRRLENLIAQLPGEKKNGLFGNLIALSLGLTPNFKSNFDLAEDAKLQLSKDTYDDDLDNLLAQIGDQYADLFLAAKNLSDAILLSDILRVNTEITKAPLSASMIKRYDEHHQDLTLLKALVRQQLPEKYKEIFFDQSKNGYAGYIDGGASQEEFYKFIKPILEKMDGTEELLVKLNREDLLRKQRTFDNGSIPHQIHLGELHAILRRQEDFYPFLKDNREKIEKILTFRIPYYVGPLARGNSRFAWMTRKSEETITPWNFEEVVDKGASAQSFIERMTNFDKNLPNEKVLPKHSLLYEYFTVYNELTKVKYVTEGMRKPAFLSGEQKKAIVDLLFKTNRKVTVKQLKEDYFKKIECFDSVEISGVEDRFNASLGTYHDLLKIIKDKDFLDNEENEDILEDIVLTLTLFEDREMIEERLKTYAHLFDDKVMKQLKRRRYTGWGRLSRKLINGIRDKQSGKTILDFLKSDGFANRNFMQLIHDDSLTFKEDIQKAQVSGQGDSLHEHIANLAGSPAIKKGILQTVKVVDELVKVMGRHKPENIVIEMARENQTTQKGQKNSRERMKRIEEGIKELGSQILKEHPVENTQLQNEKLYLYYLQNGRDMYVDQELDINRLSDYDVDHIVPQSFLKDDSIDNKVLTRSDKARGKSDNVPSEEVVKKMKNYWRQLLNAKLITQRKFDNLTKAERGGLSELDKAGFIKRQLVETRQITKHVAQILDSRMNTKYDENDKLIREVKVITLKSKLVSDFRKDFQFYKVREINNYHHAHDAYLNAVVGTALIKKYPKLESEFVYGDYKVYDVRKMIAKSEQEIGKATAKYFFYSNIMNFFKTEITLANGEIRKRPLIETNGETGEIVWDKGRDFATVRKVLSMPQVNIVKKTEVQTGGFSKESILPKRNSDKLIARKKDWDPKKYGGFDSPTVAYSVLVVAKVEKGKSKKLKSVKELLGITIMERSSFEKNPIDFLEAKGYKEVKKDLIIKLPKYSLFELENGRKRMLASAGELQKGNELALPSKYVNFLYLASHYEKLKGSPEDNEQKQLFVEQHKHYLDEIIEQISEFSKRVILADANLDKVLSAYNKHRDKPIREQAENIIHLFTLTNLGAPAAFKYFDTTIDRKRYTSTKEVLDATLIHQSITGLYETRIDLSQLGGDGGGGSEAAAKGSSGGTLGDQGSRGSDPLPEPRVTLTVEGIPTEFLVNTGAEHSVLTKPMGKMGSKRTVVAGATGSKVYPWTTKRLLKIGQKQVTHSFLVIPECPAPLLGRDLLTKLKAQIQFSTEGPQVTWEDRPAMCLVLNLEEEYRLHEKPVPPSIDPSWLQLFPMVWAEKAGMGLANQVPPVVVELKSDASPVAVRQYPMSKEAREGIRPHIQRFLDLGILVPCQSPWNTPLLPVKKPGTNDYRPVQDLREVNKRVQDIHPTVPNPYNLLSSLPPSHTWYSVLDLKDAFFCLKLHPNSQPLFAFEWRDPEKGNTGQLTWTRLPQGFKNSPTLFDEALHRDLASFRALNPQVVMLQYVDDLLVAAPTYRDCKEGTRRLLQELSKLGYRVSAKKAQLCREEVTYLGYLLKGGKRWLTPARKATVMKIPTPTTPRQVREFLGTAGFCRLWIPGFASLAAPLYPLTREKVPFTWTEAHQEAFGRIKEALLSAPALALPDLTKPFALYVDEKEGVARGVLTQTLGPWRRPVAYLSKKLDPVASGWPTCLKAIAAVALLLKDADKLTLGQNVLVIAPHNLESIVRQPPDRWMTNARMTHYQSLLLNERVSFAPPAILNPATLLPVESDDTPIHICSEILAEETGTRPDLRDQPLPGVPAWYTDGSSFIMDGRRQAGAAIVDNKRTVWASNLPEGTSAQKAELIALTQALRLAEGKSINIYTDSRYAFATAHVHGAIYKQRGLLTSAGKDIKNKEEILALLEAIHLPKRVAIIHCPGHQRGTDPVATGNRKADEAAKQAAQSTRILTETTKNAGKRTADGSEFEKRTADGSEFESPKKKAKVE

SEQ ID NO: 7058 - protein, 2127 aa, synthetic construct
MPAAKRVKLDGGDKKYSIGLDIGTNSVGWAVITDEYKVPSKKFKVLGNTDRHSIKKNLIGALLFDSGETAEATRLKRTARRRYTRRKNRICYLQEIFSNEMAKVDDSFFHRLEESFLVEEDKKHERHPIFGNIVDEVAYHEKYPTIYHLRKKLVDSTDKADLRLIYLALAHMIKFRGHFLIEGDLNPDNSDVDKLFIQLVQTYNQLFEENPINASGVDAKAILSARLSKSRRLENLIAQLPGEKKNGLFGNLIALSLGLTPNFKSNFDLAEDAKLQLSKDTYDDDLDNLLAQIGDQYADLFLAAKNLSDAILLSDILRVNTEITKAPLSASMIKRYDEHHQDLTLLKALVRQQLPEKYKEIFFDQSKNGYAGYIDGGASQEEFYKFIKPILEKMDGTEELLVKLNREDLLRKQRTFDNGSIPHQIHLGELHAILRRQEDFYPFLKDNREKIEKILTFRIPYYVGPLARGNSRFAWMTRKSEETITPWNFEEVVDKGASAQSFIERMTNFDKNLPNEKVLPKHSLLYEYFTVYNELTKVKYVTEGMRKPAFLSGEQKKAIVDLLFKTNRKVTVKQLKEDYFKKIECFDSVEISGVEDRFNASLGTYHDLLKIIKDKDFLDNEENEDILEDIVLTLTLFEDREMIEERLKTYAHLFDDKVMKQLKRRRYTGWGRLSRKLINGIRDKQSGKTILDFLKSDGFANRNFMQLIHDDSLTFKEDIQKAQVSGQGDSLHEHIANLAGSPAIKKGILQTVKVVDELVKVMGRHKPENIVIEMARENQTTQKGQKNSRERMKRIEEGIKELGSQILKEHPVENTQLQNEKLYLYYLQNGRDMYVDQELDINRLSDYDVDHIVPQSFLKDDSIDNKVLTRSDKARGKSDNVPSEEVVKKMKNYWRQLLNAKLITQRKFDNLTKAERGGLSELDKAGFIKRQLVETRQITKHVAQILDSRMNTKYDENDKLIREVKVITLKSKLVSDFRKDFQFYKVREINNYHHAHDAYLNAVVGTALIKKYPKLESEFVYGDYKVYDVRKMIAKSEQEIGKATAKYFFYSNIMNFFKTEITLANGEIRKRPLIETNGETGEIVWDKGRDFATVRKVLSMPQVNIVKKTEVQTGGFSKESILPKRNSDKLIARKKDWDPKKYGGFDSPTVAYSVLVVAKVEKGKSKKLKSVKELLGITIMERSSFEKNPIDFLEAKGYKEVKKDLIIKLPKYSLFELENGRKRMLASAGELQKGNELALPSKYVNFLYLASHYEKLKGSPEDNEQKQLFVEQHKHYLDEIIEQISEFSKRVILADANLDKVLSAYNKHRDKPIREQAENIIHLFTLTNLGAPAAFKYFDTTIDRKRYTSTKEVLDATLIHQSITGLYETRIDLSQLGGDGGGGSEAAAKGSSGGLLGRDLLTKLKAQIQFSTEGPQVTWEDRPAMCLVLNLEEEYRLHEKPVPPSIDPSWLQLFPMVWAEKAGMGLANQVPPVVVELKSDASPVAVRQYPMSKEAREGIRPHIQRFLDLGILVPCQSPWNTPLLPVKKPGTNDYRPVQDLREVNKRVQDIHPTVPNPYNLLSSLPPSHTWYSVLDLKDAFFCLKLHPNSQPLFAFEWRDPEKGNTGQLTWTRLPQGFKNSPTLFNEALHRDLASFRALNPQVVMLQYVDDLLVAAPTYRDCKEGTRRLLQELSKLGYRVSAKKAQLCREEVTYLGYLLKGGKRWLTPARKATVMKIPTPTTPRQVREFLGTAGFCRLWIPGFASLAAPLYPLTRPKVPFTWTEAHQEAFGRIKEALLSAPALALPDLTKPFALYVDEKEGVARGVLTQTLGPWRRPVAYLSKKLDPVASGWPTCLKAIAAVALLLKDADKLTLGQNVLVIAPHNLESIVRQPPDRWMTNARMTHYQSLLLNERVSFAPPAILNPATLLPVESDDTPIHICSEILAEETGTRPDLRDQPLPGVPAWYTDGSSFIMDGRRQAGAAIVDNKRTVWASNLPEGTSAQKAELIALTQALRLAEGKSINIYTDSRYAFATAHVHGAIYKQRGWLTSAGKDIKNKEEILALLEAIHLPKRVAIIHCPGHQRGTDPVATGNRKADEAAKQAAQSTRILTETTKNAGKRTADGSEFEKRTADGSEFESPKKKAKVE

SEQ ID NO: 7059 - protein, 2096 aa, synthetic construct
MPAAKRVKLDGGDKKYSIGLDIGTNSVGWAVITDEYKVPSKKFKVLGNTDRHSIKKNLIGALLFDSGETAEATRLKRTARRRYTRRKNRICYLQEIFSNEMAKVDDSFFHRLEESFLVEEDKKHERHPIFGNIVDEVAYHEKYPTIYHLRKKLVDSTDKADLRLIYLALAHMIKFRGHFLIEGDLNPDNSDVDKLFIQLVQTYNQLFEENPINASGVDAKAILSARLSKSRRLENLIAQLPGEKKNGLFGNLIALSLGLTPNFKSNFDLAEDAKLQLSKDTYDDDLDNLLAQIGDQYADLFLAAKNLSDAILLSDILRVNTEITKAPLSASMIKRYDEHHQDLTLLKALVRQQLPEKYKEIFFDQSKNGYAGYIDGGASQEEFYKFIKPILEKMDGTEELLVKLNREDLLRKQRTFDNGSIPHQIHLGELHAILRRQEDFYPFLKDNREKIEKILTFRIPYYVGPLARGNSRFAWMTRKSEETITPWNFEEVVDKGASAQSFIERMTNFDKNLPNEKVLPKHSLLYEYFTVYNELTKVKYVTEGMRKPAFLSGEQKKAIVDLLFKTNRKVTVKQLKEDYFKKIECFDSVEISGVEDRFNASLGTYHDLLKIIKDKDFLDNEENEDILEDIVLTLTLFEDREMIEERLKTYAHLFDDKVMKQLKRRRYTGWGRLSRKLINGIRDKQSGKTILDFLKSDGFANRNFMQLIHDDSLTFKEDIQKAQVSGQGDSLHEHIANLAGSPAIKKGILQTVKVVDELVKVMGRHKPENIVIEMARENQTTQKGQKNSRERMKRIEEGIKELGSQILKEHPVENTQLQNEKLYLYYLQNGRDMYVDQELDINRLSDYDVDHIVPQSFLKDDSIDNKVLTRSDKARGKSDNVPSEEVVKKMKNYWRQLLNAKLITQRKFDNLTKAERGGLSELDKAGFIKRQLVETRQITKHVAQILDSRMNTKYDENDKLIREVKVITLKSKLVSDFRKDFQFYKVREINNYHHAHDAYLNAVVGTALIKKYPKLESEFVYGDYKVYDVRKMIAKSEQEIGKATAKYFFYSNIMNFFKTEITLANGEIRKRPLIETNGETGEIVWDKGRDFATVRKVLSMPQVNIVKKTEVQTGGFSKESILPKRNSDKLIARKKDWDPKKYGGFDSPTVAYSVLVVAKVEKGKSKKLKSVKELLGITIMERSSFEKNPIDFLEAKGYKEVKKDLIIKLPKYSLFELENGRKRMLASAGELQKGNELALPSKYVNFLYLASHYEKLKGSPEDNEQKQLFVEQHKHYLDEIIEQISEFSKRVILADANLDKVLSAYNKHRDKPIREQAENIIHLFTLTNLGAPAAFKYFDTTIDRKRYTSTKEVLDATLIHQSITGLYETRIDLSQLGGDGGGGSEAAAKGSSGGTLGIEDEYRLHETSTEPDVSLGSTWLSDFPQAWAETGGMGLAVRQAPLIIPLKATSTPVSIQQYPMSHEARLGIKPHIQRLLDQGILVPCQSPWNTPLLPVKKPGTNDYRPVQDLREVNKRVEDIHPTVPNPYNLLSGLPPSHQWYTVLDLKDAFFCLRLHPTSQPLFAFEWRDPGMGISGQLTWTRLPQGFKNSPTLFDEALHRDLADFRIQHPDLILLQYVDDILLAATSELDCQQGTRALLQTLGDLGYRASAKKAQICQKQVKYLGYLLREGQRWLTEARKETVMGQPVPKTPRQLREFLGTAGFCRLWIPGFAEMAAPLYPLTKTGTLFSWGPDQQKAYQEIKQALLTAPALGLPDLTKPFELFVDEKQGYAKGVLTQKLGPWRRPVAYLSKKLDPVAAGWPPCLRMVAAIAVLTKDAGKLTMGQPLVILAPHAVEALVKQPPDRWLSNARMTHYQAMLLDTDRVQFGPVVALNPATLLPLPEEGAPHDCLEILAETHGTRPDLTDQPIPDADHTWYTDGSSFLQEGQRKAGAAVTTETEVIWAGALPAGTSAQRAELIALTQALKMAEGKRLNVYTDSRYAFATAHIHGEIYRRRGLLTSEGREIKNKSEILALLKALFLPKRLSIIHCLGHQKGDSAEARGNRLADQAAREAAIKTPPDTSTLLAGKRTADGSEFEKRTADGSEFESPKKKAKVE

SEQ ID NO: 7060 - protein, 2096 aa, synthetic construct
MPAAKRVKLDGGDKKYSIGLDIGTNSVGWAVITDEYKVPSKKFKVLGNTDRHSIKKNLIGALLFDSGETAEATRLKRTARRRYTRRKNRICYLQEIFSNEMAKVDDSFFHRLEESFLVEEDKKHERHPIFGNIVDEVAYHEKYPTIYHLRKKLVDSTDKADLRLIYLALAHMIKFRGHFLIEGDLNPDNSDVDKLFIQLVQTYNQLFEENPINASGVDAKAILSARLSKSRRLENLIAQLPGEKKNGLFGNLIALSLGLTPNFKSNFDLAEDAKLQLSKDTYDDDLDNLLAQIGDQYADLFLAAKNLSDAILLSDILRVNTEITKAPLSASMIKRYDEHHQDLTLLKALVRQQLPEKYKEIFFDQSKNGYAGYIDGGASQEEFYKFIKPILEKMDGTEELLVKLNREDLLRKQRTFDNGSIPHQIHLGELHAILRRQEDFYPFLKDNREKIEKILTFRIPYYVGPLARGNSRFAWMTRKSEETITPWNFEEVVDKGASAQSFIERMTNFDKNLPNEKVLPKHSLLYEYFTVYNELTKVKYVTEGMRKPAFLSGEQKKAIVDLLFKTNRKVTVKQLKEDYFKKIECFDSVEISGVEDRFNASLGTYHDLLKIIKDKDFLDNEENEDILEDIVLTLTLFEDREMIEERLKTYAHLFDDKVMKQLKRRRYTGWGRLSRKLINGIRDKQSGKTILDFLKSDGFANRNFMQLIHDDSLTFKEDIQKAQVSGQGDSLHEHIANLAGSPAIKKGILQTVKVVDELVKVMGRHKPENIVIEMARENQTTQKGQKNSRERMKRIEEGIKELGSQILKEHPVENTQLQNEKLYLYYLQNGRDMYVDQELDINRLSDYDVDHIVPQSFLKDDSIDNKVLTRSDKARGKSDNVPSEEVVKKMKNYWRQLLNAKLITQRKFDNLTKAERGGLSELDKAGFIKRQLVETRQITKHVAQILDSRMNTKYDENDKLIREVKVITLKSKLVSDFRKDFQFYKVREINNYHHAHDAYLNAVVGTALIKKYPKLESEFVYGDYKVYDVRKMIAKSEQEIGKATAKYFFYSNIMNFFKTEITLANGEIRKRPLIETNGETGEIVWDKGRDFATVRKVLSMPQVNIVKKTEVQTGGFSKESILPKRNSDKLIARKKDWDPKKYGGFDSPTVAYSVLVVAKVEKGKSKKLKSVKELLGITIMERSSFEKNPIDFLEAKGYKEVKKDLIIKLPKYSLFELENGRKRMLASAGELQKGNELALPSKYVNFLYLASHYEKLKGSPEDNEQKQLFVEQHKHYLDEIIEQISEFSKRVILADANLDKVLSAYNKHRDKPIREQAENIIHLFTLTNLGAPAAFKYFDTTIDRKRYTSTKEVLDATLIHQSITGLYETRIDLSQLGGDGGGGSEAAAKGSSGGTLNIEDEYRLHETSKGPDVPLGSTWLSDFPQAWAETGGMGLAVRQAPLIIPLKATSTPVSIKQYPMSQEARLGIKPHIQRLLDQGILVPCQSPWNTPLLPVKKPGTNDYRPVQDLREVNKRVEDIHPTVPNPYNLLSGLPPSHQWYTVLDLKDAFFCLRLHPTSQSLFAFEWRDPEMGISGQLTWTRLPQGFKNSPTLFNEALHRDLADFRIQHPDLILLQYVDDLLLAATSELDCQQGTRALLQTLGDLGYRASAKKAQICQKQVKYLGYLLKEGQRWLTEARKETVMGQPTPKTPRQLREFLGTAGFCRLWIPGFAEMAAPLYPLTKPGTLFEWGPDQQKAYQEIKQALLTAPALGLPDLTKPFELFVDEKQGYAKGVLTQKLGPWRRPVAYLSKKLDPVAAGWPPCLRMVAAIAVLTKDAGKLTMGQPLVILAPHAVEALVKQPPDRWLSNARMTHYQALLLDTDRVQFGPIVALNPATLLPLPEEGLQHDCLDILAEAHGTRPDLTDQPLPDADHTWYTDGSSFLQEGQRKAGAAVTTETEVVWAKALPAGTSAQRAELIALTQALKMAEGKKLNVYTDSRYAFATAHIHGEIYRRRGWLTSEGKEIKNKDEILALLKALFLPKRLSIIHCPGHQKGNRAEARGNRMADQAAREVATRETPETSTLLAGKRTADGSEFEKRTADGSEFESPKKKAKVE

SEQ ID NO: 7061 - protein, 2116 aa, synthetic construct
MPAAKRVKLDGGDKKYSIGLDIGTNSVGWAVITDEYKVPSKKFKVLGNTDRHSIKKNLIGALLFDSGETAEATRLKRTARRRYTRRKNRICYLQEIFSNEMAKVDDSFFHRLEESFLVEEDKKHERHPIFGNIVDEVAYHEKYPTIYHLRKKLVDSTDKADLRLIYLALAHMIKFRGHFLIEGDLNPDNSDVDKLFIQLVQTYNQLFEENPINASGVDAKAILSARLSKSRRLENLIAQLPGEKKNGLFGNLIALSLGLTPNFKSNFDLAEDAKLQLSKDTYDDDLDNLLAQIGDQYADLFLAAKNLSDAILLSDILRVNTEITKAPLSASMIKRYDEHHQDLTLLKALVRQQLPEKYKEIFFDQSKNGYAGYIDGGASQEEFYKFIKPILEKMDGTEELLVKLNREDLLRKQRTFDNGSIPHQIHLGELHAILRRQEDFYPFLKDNREKIEKILTFRIPYYVGPLARGNSRFAWMTRKSEETITPWNFEEVVDKGASAQSFIERMTNFDKNLPNEKVLPKHSLLYEYFTVYNELTKVKYVTEGMRKPAFLSGEQKKAIVDLLFKTNRKVTVKQLKEDYFKKIECFDSVEISGVEDRFNASLGTYHDLLKIIKDKDFLDNEENEDILEDIVLTLTLFEDREMIEERLKTYAHLFDDKVMKQLKRRRYTGWGRLSRKLINGIRDKQSGKTILDFLKSDGFANRNFMQLIHDDSLTFKEDIQKAQVSGQGDSLHEHIANLAGSPAIKKGILQTVKVVDELVKVMGRHKPENIVIEMARENQTTQKGQKNSRERMKRIEEGIKELGSQILKEHPVENTQLQNEKLYLYYLQNGRDMYVDQELDINRLSDYDVDHIVPQSFLKDDSIDNKVLTRSDKARGKSDNVPSEEVVKKMKNYWRQLLNAKLITQRKFDNLTKAERGGLSELDKAGFIKRQLVETRQITKHVAQILDSRMNTKYDENDKLIREVKVITLKSKLVSDFRKDFQFYKVREINNYHHAHDAYLNAVVGTALIKKYPKLESEFVYGDYKVYDVRKMIAKSEQEIGKATAKYFFYSNIMNFFKTEITLANGEIRKRPLIETNGETGEIVWDKGRDFATVRKVLSMPQVNIVKKTEVQTGGFSKESILPKRNSDKLIARKKDWDPKKYGGFDSPTVAYSVLVVAKVEKGKSKKLKSVKELLGITIMERSSFEKNPIDFLEAKGYKEVKKDLIIKLPKYSLFELENGRKRMLASAGELQKGNELALPSKYVNFLYLASHYEKLKGSPEDNEQKQLFVEQHKHYLDEIIEQISEFSKRVILADANLDKVLSAYNKHRDKPIREQAENIIHLFTLTNLGAPAAFKYFDTTIDRKRYTSTKEVLDATLIHQSITGLYETRIDLSQLGGDGGGGSEAAAKGSSGGWVQEISDSRPMLHIYLNGRRFLGLLNTGADKTCIAGRDWPANWPIHQTESSLQGLGMACGVARSSQPLRWQHEDKSGIIHPFVIPTLPFTLWGRDIMKDIKVRLMTDSPDDSQDLMIGAIESNLFADQISWKSDQPVWLNQWPLKQEKLQALQQLVTEQLQLGHLEESNSPWNTPVFVIKKKSGKWRLLQDLRAVNATMHDMGALQPGLPSPVAVPKGWEIIIIDLQDCFFNIKLHPEDCKRFAFSVPSPNFKRPYQRFQWKVLPQGMKNSPTLCQKFVDKAILTVRDKYQDSYIVHYMDDILLAHPSRSIVDEILTSMIQALNKHGLVVSTEKIQKYDNLKYLGTHIQGDSVSYQKLQIRTDKLRTLNDFQKLLGNINWIRPFLKLTTGELKPLFEILNGDSNPISTRKLTPEACKALQLMNERLSTARVKRLDLSQPWSLCILKTEYTPTACLWQDGVVEWIHLPHISPKVITPYDIFCTQLIIKGRHRSKELFSKDPDYIVVPYTKVQFDLLLQEKEDWPISLLGFLGEVHFHLPKDPLLTFTLQTAIIFPHMTSTTPLEKGIVIFTDGSANGRSVTYIQGREPIIKENTQNTAQQAEIVAVITAFEEVSQPFNLYTDSKYVTGLFPEIETATLSPRTKIYTELKHLQRLIHKRQEKFYIGHIRGHTGLPGPLAQGNAYADSLTRILTAGKRTADGSEFEKRTADGSEFESPKKKAKVE

SEQ ID NO: 7062 - protein, 2090 aa, synthetic construct
MPAAKRVKLDGGDKKYSIGLDIGTNSVGWAVITDEYKVPSKKFKVLGNTDRHSIKKNLIGALLFDSGETAEATRLKRTARRRYTRRKNRICYLQEIFSNEMAKVDDSFFHRLEESFLVEEDKKHERHPIFGNIVDEVAYHEKYPTIYHLRKKLVDSTDKADLRLIYLALAHMIKFRGHFLIEGDLNPDNSDVDKLFIQLVQTYNQLFEENPINASGVDAKAILSARLSKSRRLENLIAQLPGEKKNGLFGNLIALSLGLTPNFKSNFDLAEDAKLQLSKDTYDDDLDNLLAQIGDQYADLFLAAKNLSDAILLSDILRVNTEITKAPLSASMIKRYDEHHQDLTLLKALVRQQLPEKYKEIFFDQSKNGYAGYIDGGASQEEFYKFIKPILEKMDGTEELLVKLNREDLLRKQRTFDNGSIPHQIHLGELHAILRRQEDFYPFLKDNREKIEKILTFRIPYYVGPLARGNSRFAWMTRKSEETITPWNFEEVVDKGASAQSFIERMTNFDKNLPNEKVLPKHSLLYEYFTVYNELTKVKYVTEGMRKPAFLSGEQKKAIVDLLFKTNRKVTVKQLKEDYFKKIECFDSVEISGVEDRFNASLGTYHDLLKIIKDKDFLDNEENEDILEDIVLTLTLFEDREMIEERLKTYAHLFDDKVMKQLKRRRYTGWGRLSRKLINGIRDKQSGKTILDFLKSDGFANRNFMQLIHDDSLTFKEDIQKAQVSGQGDSLHEHIANLAGSPAIKKGILQTVKVVDELVKVMGRHKPENIVIEMARENQTTQKGQKNSRERMKRIEEGIKELGSQILKEHPVENTQLQNEKLYLYYLQNGRDMYVDQELDINRLSDYDVDHIVPQSFLKDDSIDNKVLTRSDKARGKSDNVPSEEVVKKMKNYWRQLLNAKLITQRKFDNLTKAERGGLSELDKAGFIKRQLVETRQITKHVAQILDSRMNTKYDENDKLIREVKVITLKSKLVSDFRKDFQFYKVREINNYHHAHDAYLNAVVGTALIKKYPKLESEFVYGDYKVYDVRKMIAKSEQEIGKATAKYFFYSNIMNFFKTEITLANGEIRKRPLIETNGETGEIVWDKGRDFATVRKVLSMPQVNIVKKTEVQTGGFSKESILPKRNSDKLIARKKDWDPKKYGGFDSPTVAYSVLVVAKVEKGKSKKLKSVKELLGITIMERSSFEKNPIDFLEAKGYKEVKKDLIIKLPKYSLFELENGRKRMLASAGELQKGNELALPSKYVNFLYLASHYEKLKGSPEDNEQKQLFVEQHKHYLDEIIEQISEFSKRVILADANLDKVLSAYNKHRDKPIREQAENIIHLFTLTNLGAPAAFKYFDTTIDRKRYTSTKEVLDATLIHQSITGLYETRIDLSQLGGDGGGGSEAAAKGSSGGTLQLDDEYRLYSPLVKPDQNIQFWLEQFPQAWAETAGMGLAKQVPPQVIQLKASATPVSVRQYPLSKEAQEGIRPHVQRLIQQGILVPVQSPWNTPLLPVRKPGTNDYRPVQDLREVNKRVQDIHPTVPNPYNLLCALPPQRSWYTVLDLKDAFFCLRLHPTSQPLFAFEWRDPGTGRTGQLTWTRLPQGFKNSPTIFDEALHRDLANFRIQHPQVTLLQYVDDLLLAGATKQDCLEGTKALLLELSDLGYRASAKKAQICRREVTYLGYSLRDGQRWLTEARKKTVVQIPAPTTAKQVREFLGTAGFCRLWIPGFATLAAPLYPLTKEKGEFSWAPEHQKAFDAIKKALLSAPALALPDVTKPFTLYVDERKGVARGVLTQTLGPWRRPVAYLSKKLDPVASGWPVCLKAIAAVAILVKDADKLTLGQNITVIAPHALENIVRQPPDRWMTNARMTHYQSLLLTERVTFAPPAALNPATLLPEETDEPVTHDCHQLLIEETGVRKDLTDIPLTGEVLTWFTDGSSYVVEGKRMAGAAVVDGTRTIWASSLPEGTSAQKAELMALTQALRLAEGKSINIYTDSRYAFATAHVHGAIYKQRGLLTSAGREIKNKEEILSLLEALHLPKRLAIIHCPGHQKAKDPISRGNQMADRVAKQAAQGVNLLAGKRTADGSEFEKRTADGSEFESPKKKAKVE

SEQ ID NO: 7063 - protein, 2090 aa, synthetic construct; identical to SEQ ID NO: 7062

SEQ ID NO: 7064 - protein, 2094 aa, synthetic construct
MPAAKRVKLDGGDKKYSIGLDIGTNSVGWAVITDEYKVPSKKFKVLGNTDRHSIKKNLIGALLFDSGETAEATRLKRTARRRYTRRKNRICYLQEIFSNEMAKVDDSFFHRLEESFLVEEDKKHERHPIFGNIVDEVAYHEKYPTIYHLRKKLVDSTDKADLRLIYLALAHMIKFRGHFLIEGDLNPDNSDVDKLFIQLVQTYNQLFEENPINASGVDAKAILSARLSKSRRLENLIAQLPGEKKNGLFGNLIALSLGLTPNFKSNFDLAEDAKLQLSKDTYDDDLDNLLAQIGDQYADLFLAAKNLSDAILLSDILRVNTEITKAPLSASMIKRYDEHHQDLTLLKALVRQQLPEKYKEIFFDQSKNGYAGYIDGGASQEEFYKFIKPILEKMDGTEELLVKLNREDLLRKQRTFDNGSIPHQIHLGELHAILRRQEDFYPFLKDNREKIEKILTFRIPYYVGPLARGNSRFAWMTRKSEETITPWNFEEVVDKGASAQSFIERMTNFDKNLPNEKVLPKHSLLYEYFTVYNELTKVKYVTEGMRKPAFLSGEQKKAIVDLLFKTNRKVTVKQLKEDYFKKIECFDSVEISGVEDRFNASLGTYHDLLKIIKDKDFLDNEENEDILEDIVLTLTLFEDREMIEERLKTYAHLFDDKVMKQLKRRRYTGWGRLSRKLINGIRDKQSGKTILDFLKSDGFANRNFMQLIHDDSLTFKEDIQKAQVSGQGDSLHEHIANLAGSPAIKKGILQTVKVVDELVKVMGRHKPENIVIEMARENQTTQKGQKNSRERMKRIEEGIKELGSQILKEHPVENTQLQNEKLYLYYLQNGRDMYVDQELDINRLSDYDVDHIVPQSFLKDDSIDNKVLTRSDKARGKSDNVPSEEVVKKMKNYWRQLLNAKLITQRKFDNLTKAERGGLSELDKAGFIKRQLVETRQITKHVAQILDSRMNTKYDENDKLIREVKVITLKSKLVSDFRKDFQFYKVREINNYHHAHDAYLNAVVGTALIKKYPKLESEFVYGDYKVYDVRKMIAKSEQEIGKATAKYFFYSNIMNFFKTEITLANGEIRKRPLIETNGETGEIVWDKGRDFATVRKVLSMPQVNIVKKTEVQTGGFSKESILPKRNSDKLIARKKDWDPKKYGGFDSPTVAYSVLVVAKVEKGKSKKLKSVKELLGITIMERSSFEKNPIDFLEAKGYKEVKKDLIIKLPKYSLFELENGRKRMLASAGELQKGNELALPSKYVNFLYLASHYEKLKGSPEDNEQKQLFVEQHKHYLDEIIEQISEFSKRVILADANLDKVLSAYNKHRDKPIREQAENIIHLFTLTNLGAPAAFKYFDTTIDRKRYTSTKEVLDATLIHQSITGLYETRIDLSQLGGDGGGGSEAAAKGSSGGVLNLEEEYRLHEKPVPSSIDPSWLQLFPTVWAERAGMGLANQVPPVVVELRSGASPVAVRQYPMSKEAREGIRPHIQRFLDLGVLVPCQSPWNTPLLPVKKPGTNDYRPVQDLREINKRVQDIHPTVPNPYNLLSSLPPSHTWYSVLDLKDAFFCLKLHPNSQPLFAFEWRDPEKGNTGQLTWTRLPQGFKNSPTLFNEALHRDLAPFRALNPQVVLLQYVDDLLVAAPTYRDCKEGTQKLLQELSKLGYRVSAKKAQLCQKEVTYLGYLLKEGKRWLTPARKATVMKIPPPTTPRQVREFLGTAGFCRLWIPGFASLAAPLYPLTKPSIPFIWTEEHQKAFDRIKEALLSAPALALPDLTKPFTLYVDERAGVARGVLTQTLGPWRRPVAYLSKKLDPVASGWPTCLKAVAAVALLLKDADKLTLGQNVTVIASHSLESIVRQPPDRWMTNARMTHYQSLLLNERVSFAPPAVLNPATLLPVESEATPVHRCSEILAEETGTRRDLKDQPLPGVPAWYTDGSSFIAEGKRRAGAAIVDGKRTVWASSLPEGTSAQKAELVALTQALRLAEGKDINIYTDSRYAFATAHIHGAIYKQRGWLTSAGKDIKNKEEILALLEAIHLPKRVAIIHCPGHQKGNDPVATGNRRADEAAKQAALSTRVLAETTKPAGKRTADGSEFEKRTADGSEFESPKKKAKVE

SEQ ID NO: 7065 - protein, 2094 aa, synthetic construct
MPAAKRVKLDGGDKKYSIGLDIGTNSVGWAVITDEYKVPSKKFKVLGNTDRHSIKKNLIGALLFDSGETAEATRLKRTARRRYTRRKNRICYLQEIFSNEMAKVDDSFFHRLEESFLVEEDKKHERHPIFGNIVDEVAYHEKYPTIYHLRKKLVDSTDKADLRLIYLALAHMIKFRGHFLIEGDLNPDNSDVDKLFIQLVQTYNQLFEENPINASGVDAKAILSARLSKSRRLENLIAQLPGEKKNGLFGNLIALSLGLTPNFKSNFDLAEDAKLQLSKDTYDDDLDNLLAQIGDQYADLFLAAKNLSDAILLSDILRVNTEITKAPLSASMIKRYDEHHQDLTLLKALVRQQLPEKYKEIFFDQSKNGYAGYIDGGASQEEFYKFIKPILEKMDGTEELLVKLNREDLLRKQRTFDNGSIPHQIHLGELHAILRRQEDFYPFLKDNREKIEKILTFRIPYYVGPLARGNSRFAWMTRKSEETITPWNFEEVVDKGASAQSFIERMTNFDKNLPNEKVLPKHSLLYEYFTVYNELTKVKYVTEGMRKPAFLSGEQKKAIVDLLFKTNRKVTVKQLKEDYFKKIECFDSVEISGVEDRFNASLGTYHDLLKIIKDKDFLDNEENEDILEDIVLTLTLFEDREMIEERLKTYAHLFDDKVMKQLKRRRYTGWGRLSRKLINGIRDKQSGKTILDFLKSDGFANRNFMQLIHDDSLTFKEDIQKAQVSGQGDSLHEHIANLAGSPAIKKGILQTVKVVDELVKVMGRHKPENIVIEMARENQTTQKGQKNSRERMKRIEEGIKELGSQILKEHPVENTQLQNEKLYLYYLQNGRDMYVDQELDINRLSDYDVDHIVPQSFLKDDSIDNKVLTRSDKARGKSDNVPSEEVVKKMKNYWRQLLNAKLITQRKFDNLTKAERGGLSELDKAGFIKRQLVETRQITKHVAQILDSRMNTKYDENDKLIREVKVITLKSKLVSDFRKDFQFYKVREINNYHHAHDAYLNAVVGTALIKKYPKLESEFVYGDYKVYDVRKMIAKSEQEIGKATAKYFFYSNIMNFFKTEITLANGEIRKRPLIETNGETGEIVWDKGRDFATVRKVLSMPQVNIVKKTEVQTGGFSKESILPKRNSDKLIARKKDWDPKKYGGFDSPTVAYSVLVVAKVEKGKSKKLKSVKELLGITIMERSSFEKNPIDFLEAKGYKEVKKDLIIKLPKYSLFELENGRKRMLASAGELQKGNELALPSKYVNFLYLASHYEKLKGSPEDNEQKQLFVEQHKHYLDEIIEQISEFSKRVILADANLDKVLSAYNKHRDKPIREQAENIIHLFTLTNLGAPAAFKYFDTTIDRKRYTSTKEVLDATLIHQSITGLYETRIDLSQLGGDGGGGSEAAAKGSSGGVLNLEEEYRLHEKPVPSSIDPSWLQLFPTVWAERAGMGLANQVPPVVVELRSGASPVAVRQYPMSKEAREGIRPHIQRFLDLGVLVPCQSPWNTPLLPVKKPGTNDYRPVQDLREINKRVQDIHPTVPNPYNLLSSLPPSHTWYSVLDLKDAFFCLKLHPNSQPLFAFEWRDPEKGNTGQLTWTRLPQGFKNSPTLFNEALHRDLAPFRALNPQVVLLQYVDDLLVAAPTYRDCKEGTQKLLQELSKLGYRVSAKKAQLCQKEVTYLGYLLKEGKRWLTPARKATVMKIPPPTTPRQVREFLGKAGFCRLFIPGFASLAAPLYPLTKPSIPFIWTEEHQKAFDRIKEALLSAPALALPDLTKPFTLYVDERAGVARGVLTQTLGPWRRPVAYLSKKLDPVASGWPTCLKAVAAVALLLKDADKLTLGQNVTVIASHSLESIVRQPPDRWMTNARMTHYQSLLLNERVSFAPPAVLNPATLLPVESEATPVHRCSEILAEETGTRRDLKDQPLPGVPAWYTDGSSFIAEGKRRAGAAIVDGKRTVWASSLPEGTSAQKAELVALTQALRLAEGKDINIYTDSRYAFATAHIHGAIYKQRGWLTSAGKDIKNKEEILALLEAIHLPKRVAIIHCPGHQKGNDPVATGNRRADEAAKQAALSTRVLAETTKPAGKRTADGSEFEKRTADGSEFESPKKKAKVE

SEQ ID NO: 7066 - protein, 2096 aa, synthetic construct
MPAAKRVKLDGGDKKYSIGLDIGTNSVGWAVITDEYKVPSKKFKVLGNTDRHSIKKNLIGALLFDSGETAEATRLKRTARRRYTRRKNRICYLQEIFSNEMAKVDDSFFHRLEESFLVEEDKKHERHPIFGNIVDEVAYHEKYPTIYHLRKKLVDSTDKADLRLIYLALAHMIKFRGHFLIEGDLNPDNSDVDKLFIQLVQTYNQLFEENPINASGVDAKAILSARLSKSRRLENLIAQLPGEKKNGLFGNLIALSLGLTPNFKSNFDLAEDAKLQLSKDTYDDDLDNLLAQIGDQYADLFLAAKNLSDAILLSDILRVNTEITKAPLSASMIKRYDEHHQDLTLLKALVRQQLPEKYKEIFFDQSKNGYAGYIDGGASQEEFYKFIKPILEKMDGTEELLVKLNREDLLRKQRTFDNGSIPHQIHLGELHAILRRQEDFYPFLKDNREKIEKILTFRIPYYVGPLARGNSRFAWMTRKSEETITPWNFEEVVDKGASAQSFIERMTNFDKNLPNEKVLPKHSLLYEYFTVYNELTKVKYVTEGMRKPAFLSGEQKKAIVDLLFKTNRKVTVKQLKEDYFKKIECFDSVEISGVEDRFNASLGTYHDLLKIIKDKDFLDNEENEDILEDIVLTLTLFEDREMIEERLKTYAHLFDDKVMKQLKRRRYTGWGRLSRKLINGIRDKQSGKTILDFLKSDGFANRNFMQLIHDDSLTFKEDIQKAQVSGQGDSLHEHIANLAGSPAIKKGILQTVKVVDELVKVMGRHKPENIVIEMARENQTTQKGQKNSRERMKRIEEGIKELGSQILKEHPVENTQLQNEKLYLYYLQNGRDMYVDQELDINRLSDYDVDHIVPQSFLKDDSIDNKVLTRSDKARGKSDNVPSEEVVKKMKNYWRQLLNAKLITQRKFDNLTKAERGGLSELDKAGFIKRQLVETRQITKHVAQILDSRMNTKYDENDKLIREVKVITLKSKLVSDFRKDFQFYKVREINNYHHAHDAYLNAVVGTALIKKYPKLESEFVYGDYKVYDVRKMIAKSEQEIGKATAKYFFYSNIMNFFKTEITLANGEIRKRPLIETNGETGEIVWDKGRDFATVRKVLSMPQVNIVKKTEVQTGGFSKESILPKRNSDKLIARKKDWDPKKYGGFDSPTVAYSVLVVAKVEKGKSKKLKSVKELLGITIMERSSFEKNPIDFLEAKGYKEVKKDLIIKLPKYSLFELENGRKRMLASAGELQKGNELALPSKYVNFLYLASHYEKLKGSPEDNEQKQLFVEQHKHYLDEIIEQISEFSKRVILADANLDKVLSAYNKHRDKPIREQAENIIHLFTLTNLGAPAAFKYFDTTIDRKRYTSTKEVLDATLIHQSITGLYETRIDLSQLGGDGGGGSEAAAKGSSGGTLNIEDEYRLHETSKEPDVPLGSTWLSDFPQAWAETGGMGLAVRQAPLIIPLKATSTPVSIKQYPMSQEARLGIKPHIQRLLDQGILVPCQSPWNTPLLPVKKPGTNDYRPVQDLREVNKRVEDIHPTVPNPYNLLSGLPPSHQWYTVLDLKDAFFCLRLHPTSQPLFAFEWRDPEMGISGQLTWTRLPQGFKNSPTLFNEALHRDLADFRIQHPDLILLQYVDDLLLAATSEQDCQRGTRALLQTLGNLGYRASAKKAQICQKQVKYLGYLLKEGQRWLTEARKETVMGQPTPKTPRQLREFLGTAGFCRLWIPGFAEMAAPLYPLTKPGTLFNWGPDQQKAYQEIKQALLTAPALGLPDLTKPFELFVDEKQGYAKGVLTQKLGPWRRPVAYLSKKLDPVAAGWPPCLRMVAAIAVLTKDAGKLTMGQPLVILAPHAVEALVKQPPDRWLSNARMTHYQAMLLDTDRVQFGPVVALNPATLLPLPEKEAPHDCLEILAETHGTRPDLTDQPIPDADYTWYTDGSSFLQEGQRRAGAAVTTETEVIWARALPAGTSAQRAELIALTQALKMAEGKKLNVYTDSRYAFATAHVHGEIYRRRGWLTSEGREIKNKNEILALLKALFLPKRLSIIHCPGHQKGNSAEARGNRMADQAAREAAMKAVLETSTLLAGKRTADGSEFEKRTADGSEFESPKKKAKVE

SEQ ID NO: 7067 - protein, 2096 aa, synthetic construct; identical to SEQ ID NO: 4522

SEQ ID NO: 7068 - protein, 2098 aa, synthetic construct
MPAAKRVKLDGGDKKYSIGLDIGTNSVGWAVITDEYKVPSKKFKVLGNTDRHSIKKNLIGALLFDSGETAEATRLKRTARRRYTRRKNRICYLQEIFSNEMAKVDDSFFHRLEESFLVEEDKKHERHPIFGNIVDEVAYHEKYPTIYHLRKKLVDSTDKADLRLIYLALAHMIKFRGHFLIEGDLNPDNSDVDKLFIQLVQTYNQLFEENPINASGVDAKAILSARLSKSRRLENLIAQLPGEKKNGLFGNLIALSLGLTPNFKSNFDLAEDAKLQLSKDTYDDDLDNLLAQIGDQYADLFLAAKNLSDAILLSDILRVNTEITKAPLSASMIKRYDEHHQDLTLLKALVRQQLPEKYKEIFFDQSKNGYAGYIDGGASQEEFYKFIKPILEKMDGTEELLVKLNREDLLRKQRTFDNGSIPHQIHLGELHAILRRQEDFYPFLKDNREKIEKILTFRIPYYVGPLARGNSRFAWMTRKSEETITPWNFEEVVDKGASAQSFIERMTNFDKNLPNEKVLPKHSLLYEYFTVYNELTKVKYVTEGMRKPAFLSGEQKKAIVDLLFKTNRKVTVKQLKEDYFKKIECFDSVEISGVEDRFNASLGTYHDLLKIIKDKDFLDNEENEDILEDIVLTLTLFEDREMIEERLKTYAHLFDDKVMKQLKRRRYTGWGRLSRKLINGIRDKQSGKTILDFLKSDGFANRNFMQLIHDDSLTFKEDIQKAQVSGQGDSLHEHIANLAGSPAIKKGILQTVKVVDELVKVMGRHKPENIVIEMARENQTTQKGQKNSRERMKRIEEGIKELGSQILKEHPVENTQLQNEKLYLYYLQNGRDMYVDQELDINRLSDYDVDHIVPQSFLKDDSIDNKVLTRSDKARGKSDNVPSEEVVKKMKNYWRQLLNAKLITQRKFDNLTKAERGGLSELDKAGFIKRQLVETRQITKHVAQILDSRMNTKYDENDKLIREVKVITLKSKLVSDFRKDFQFYKVREINNYHHAHDAYLNAVVGTALIKKYPKLESEFVYGDYKVYDVRKMIAKSEQEIGKATAKYFFYSNIMNFFKTEITLANGEIRKRPLIETNGETGEIVWDKGRDFATVRKVLSMPQVNIVKKTEVQTGGFSKESILPKRNSDKLIARKKDWDPKKYGGFDSPTVAYSVLVVAKVEKGKSKKLKSVKELLGITIMERSSFEKNPIDFLEAKGYKEVKKDLIIKLPKYSLFELENGRKRMLASAGELQKGNELALPSKYVNFLYLASHYEKLKGSPEDNEQKQLFVEQHKHYLDEIIEQISEFSKRVILADANLDKVLSAYNKHRDKPIREQAENIIHLFTLTNLGAPAAFKYFDTTIDRKRYTSTKEVLDATLIHQSITGLYETRIDLSQLGGDGGGSSGGSEAAAKGGTAPLEEEYRLFLEAPIQNVTLLEQWKREIPKVWAEINPPGLASTQAPIHVQLLSTALPVRVRQYPITLEAKRSLRETIRKFRAAGILRPVHSPWNTPLLPVRKSGTSEYRMVQDLREVNKRVETIHPTVPNPYTLLSLLPPDRIWYSVLDLKDAFFCIPLAPESQLIFAFEWADAEEGESGQLTWTRLPQGFKNSPTLFNEALNRDLQGFRLDHPSVSLLQYVDDLLIAADTQAACLSATRDLLMTLAELGYRVSGKKAQLCQEEVTYLGFKIHKGSRSLSNSRTQAILQIPVPKTKRQVREFLGTIGYCRLWIPGFAELAQPLYAATRPGNDPLVWGEKEEEAFQSLKLALTQPPALALPSLDKPFQLFVEETSGAAKGVLTQALGPWKRPVAYLSKRLDPVAAGWPRCLRAIAAAALLTREASKLTFGQDIEITSSHNLESLLRSPPDKWLTNARITQYQVLLLDPPRVRFKQTAALNPATLLPETDDTLPIHHCLDTLDSLTSTRPDLTDQPLAQAEATLFTDGSSYIRDGKRYAGAAVVTLDSVIWAEPLPIGTSAQKAELIALTKALEWSKDKSVNIYTDSRYAFATLHVHGMIYRERGWLTAGGKAIKNAPEILALLTAVWLPKRVAVMHCKGHQKDDAPTSTGNRRADEVAREVAIRPLSTQATISAGKRTADGSEFEKRTADGSEFESPKKKAKVE

SEQ ID NO: 7069 - protein, 2098 aa, synthetic construct
MPAAKRVKLDGGDKKYSIGLDIGTNSVGWAVITDEYKVPSKKFKVLGNTDRHSIKKNLIGALLFDSGETAEATRLKRTARRRYTRRKNRICYLQEIFSNEMAKVDDSFFHRLEESFLVEEDKKHERHPIFGNIVDEVAYHEKYPTIYHLRKKLVDSTDKADLRLIYLALAHMIKFRGHFLIEGDLNPDNSDVDKLFIQLVQTYNQLFEENPINASGVDAKAILSARLSKSRRLENLIAQLPGEKKNGLFGNLIALSLGLTPNFKSNFDLAEDAKLQLSKDTYDDDLDNLLAQIGDQYADLFLAAKNLSDAILLSDILRVNTEITKAPLSASMIKRYDEHHQDLTLLKALVRQQLPEKYKEIFFDQSKNGYAGYIDGGASQEEFYKFIKPILEKMDGTEELLVKLNREDLLRKQRTFDNGSIPHQIHLGELHAILRRQEDFYPFLKDNREKIEKILTFRIPYYVGPLARGNSRFAWMTRKSEETITPWNFEEVVDKGASAQSFIERMTNFDKNLPNEKVLPKHSLLYEYFTVYNELTKVKYVTEGMRKPAFLSGEQKKAIVDLLFKTNRKVTVKQLKEDYFKKIECFDSVEISGVEDRFNASLGTYHDLLKIIKDKDFLDNEENEDILEDIVLTLTLFEDREMIEERLKTYAHLFDDKVMKQLKRRRYTGWGRLSRKLINGIRDKQSGKTILDFLKSDGFANRNFMQLIHDDSLTFKEDIQKAQVSGQGDSLHEHIANLAGSPAIKKGILQTVKVVDELVKVMGRHKPENIVIEMARENQTTQKGQKNSRERMKRIEEGIKELGSQILKEHPVENTQLQNEKLYLYYLQNGRDMYVDQELDINRLSDYDVDHIVPQSFLKDDSIDNKVLTRSDKARGKSDNVPSEEVVKKMKNYWRQLLNAKLITQRKFDNLTKAERGGLSELDKAGFIKRQLVETRQITKHVAQILDSRMNTKYDENDKLIREVKVITLKSKLVSDFRKDFQFYKVREINNYHHAHDAYLNAVVGTALIKKYPKLESEFVYGDYKVYDVRKMIAKSEQEIGKATAKYFFYSNIMNFFKTEITLANGEIRKRPLIETNGETGEIVWDKGRDFATVRKVLSMPQVNIVKKTEVQTGGFSKESILPKRNSDKLIARKKDWDPKKYGGFDSPTVAYSVLVVAKVEKGKSKKLKSVKELLGITIMERSSFEKNPIDFLEAKGYKEVKKDLIIKLPKYSLFELENGRKRMLASAGELQKGNELALPSKYVNFLYLASHYEKLKGSPEDNEQKQLFVEQHKHYLDEIIEQISEFSKRVILADANLDKVLSAYNKHRDKPIREQAENIIHLFTLTNLGAPAAFKYFDTTIDRKRYTSTKEVLDATLIHQSITGLYETRIDLSQLGGDGGGSSGGSEAAAKGGTAPLEEEYRLFLEAPIQNVTLLEQWKREIPKVWAEINPPGLASTQAPIHVQLLSTALPVRVRQYPITLEAKRSLRETIRKFRAAGILRPVHSPWNTPLLPVRKSGTSEYRMVQDLREVNKRVETIHPTVPNPYTLLSLLPPDRIWYSVLDLKDAFFCIPLAPESQLIFAFEWADAEEGESGQLTWTRLPQGFKNSPTLFNEALNRDLQGFRLDHPSVSLLQYVDDLLIAADTQAACLSATRDLLMTLAELGYRVSGKKAQLCQEEVTYLGFKIHKGSRSLSNSRTQAILQIPVPKTKRQVREFLGKIGYCRLFIPGFAELAQPLYAATRPGNDPLVWGEKEEEAFQSLKLALTQPPALALPSLDKPFQLFVEETSGAAKGVLTQALGPWKRPVAYLSKRLDPVAAGWPRCLRAIAAAALLTREASKLTFGQDIEITSSHNLESLLRSPPDKWLTNARITQYQVLLLDPPRVRFKQTAALNPATLLPETDDTLPIHHCLDTLDSLTSTRPDLTDQPLAQAEATLFTDGSSYIRDGKRYAGAAVVTLDSVIWAEPLPIGTSAQKAELIALTKALEWSKDKSVNIYTDSRYAFATLHVHGMIYRERGWLTAGGKAIKNAPEILALLTAVWLPKRVAVMHCKGHQKDDAPTSTGNRRADEVAREVAIRPLSTQATISAGKRTADGSEFEKRTADGSEFESPKKKAKVE

SEQ ID NO: 7070 - protein, 2095 aa, synthetic construct
MPAAKRVKLDGGDKKYSIGLDIGTNSVGWAVITDEYKVPSKKFKVLGNTDRHSIKKNLIGALLFDSGETAEATRLKRTARRRYTRRKNRICYLQEIFSNEMAKVDDSFFHRLEESFLVEEDKKHERHPIFGNIVDEVAYHEKYPTIYHLRKKLVDSTDKADLRLIYLALAHMIKFRGHFLIEGDLNPDNSDVDKLFIQLVQTYNQLFEENPINASGVDAKAILSARLSKSRRLENLIAQLPGEKKNGLFGNLIALSLGLTPNFKSNFDLAEDAKLQLSKDTYDDDLDNLLAQIGDQYADLFLAAKNLSDAILLSDILRVNTEITKAPLSASMIKRYDEHHQDLTLLKALVRQQLPEKYKEIFFDQSKNGYAGYIDGGASQEEFYKFIKPILEKMDGTEELLVKLNREDLLRKQRTFDNGSIPHQIHLGELHAILRRQEDFYPFLKDNREKIEKILTFRIPYYVGPLARGNSRFAWMTRKSEETITPWNFEEVVDKGASAQSFIERMTNFDKNLPNEKVLPKHSLLYEYFTVYNELTKVKYVTEGMRKPAFLSGEQKKAIVDLLFKTNRKVTVKQLKEDYFKKIECFDSVEISGVEDRFNASLGTYHDLLKIIKDKDFLDNEENEDILEDIVLTLTLFEDREMIEERLKTYAHLFDDKVMKQLKRRRYTGWGRLSRKLINGIRDKQSGKTILDFLKSDGFANRNFMQLIHDDSLTFKEDIQKAQVSGQGDSLHEHIANLAGSPAIKKGILQTVKVVDELVKVMGRHKPENIVIEMARENQTTQKGQKNSRERMKRIEEGIKELGSQILKEHPVENTQLQNEKLYLYYLQNGRDMYVDQELDINRLSDYDVDHIVPQSFLKDDSIDNKVLTRSDKARGKSDNVPSEEVVKKMKNYWRQLLNAKLITQRKFDNLTKAERGGLSELDKAGFIKRQLVETRQITKHVAQILDSRMNTKYDENDKLIREVKVITLKSKLVSDFRKDFQFYKVREINNYHHAHDAYLNAVVGTALIKKYPKLESEFVYGDYKVYDVRKMIAKSEQEIGKATAKYFFYSNIMNFFKTEITLANGEIRKRPLIETNGETGEIVWDKGRDFATVRKVLSMPQVNIVKKTEVQTGGFSKESILPKRNSDKLIARKKDWDPKKYGGFDSPTVAYSVLVVAKVEKGKSKKLKSVKELLGITIMERSSFEKNPIDFLEAKGYKEVKKDLIIKLPKYSLFELENGRKRMLASAGELQKGNELALPSKYVNFLYLASHYEKLKGSPEDNEQKQLFVEQHKHYLDEIIEQISEFSKRVILADANLDKVLSAYNKHRDKPIREQAENIIHLFTLTNLGAPAAFKYFDTTIDRKRYTSTKEVLDATLIHQSITGLYETRIDLSQLGGDGGGSSGGSEAAAKGGTLQLEEEYRLFEPESTQKQEMDIWLKNFPQAWAETGGMGTAHCQAPVLIQLKATATPISIRQYPMPHEAYQGIKPHIRRMLDQGILKPCQSPWNTPLLPVKKPGTEDYRPVQDLREVNKRVEDIHPTVPNPYNLLSTLPPSHPWYTVLDLKDAFFCLRLHSESQLLFAFEWRDPEIGLSGQLTWTRLPQGFKNSPTLFNEALHSDLADFRVRYPALVLLQYVDDLLLAAATRTECLEGTKALLETLGNKGYRASAKKAQICLQEVTYLGYSLKDGQRWLTKARKEAILSIPVPKNSRQVREFLGTAGYCRLWIPGFAELAAPLYPLTRPGTLFQWGTEQQLAFEDIKKALLSSPALGLPDITKPFELFIDENSGFAKGVLVQKLGPWKRPVAYLSKKLDTVASGWPPCLRMVAAIAILVKDAGKLTLGQPLTILTSHPVEALVRQPPNKWLSNARMTHYQAMLLDAERVHFGPTVSLNPATLLPLPSGGNHHDCLQILAETHGTRPDLTDQPLPDADLTWYTDGSSFIRNGEREAGAAVTTESEVIWAAPLPPGTSAQRAELIALTQALKMAEGKKLTVYTDSRYAFATTHVHGEIYRRRGWLTSEGKEIKNKNEILALLEALFLPKRLSIIHCPGHQKGDSPQAKGNRLADDTAKKAATETHSSLTVLPAGKRTADGSEFEKRTADGSEFESPKKKAKVE

SEQ ID NO: 7071 - protein, 2094 aa, synthetic construct
MPAAKRVKLDGGDKKYSIGLDIGTNSVGWAVITDEYKVPSKKFKVLGNTDRHSIKKNLIGALLFDSGETAEATRLKRTARRRYTRRKNRICYLQEIFSNEMAKVDDSFFHRLEESFLVEEDKKHERHPIFGNIVDEVAYHEKYPTIYHLRKKLVDSTDKADLRLIYLALAHMIKFRGHFLIEGDLNPDNSDVDKLFIQLVQTYNQLFEENPINASGVDAKAILSARLSKSRRLENLIAQLPGEKKNGLFGNLIALSLGLTPNFKSNFDLAEDAKLQLSKDTYDDDLDNLLAQIGDQYADLFLAAKNLSDAILLSDILRVNTEITKAPLSASMIKRYDEHHQDLTLLKALVRQQLPEKYKEIFFDQSKNGYAGYIDGGASQEEFYKFIKPILEKMDGTEELLVKLNREDLLRKQRTFDNGSIPHQIHLGELHAILRRQEDFYPFLKDNREKIEKILTFRIPYYVGPLARGNSRFAWMTRKSEETITPWNFEEVVDKGASAQSFIERMTNFDKNLPNEKVLPKHSLLYEYFTVYNELTKVKYVTEGMRKPAFLSGEQKKAIVDLLFKTNRKVTVKQLKEDYFKKIECFDSVEISGVEDRFNASLGTYHDLLKIIKDKDFLDNEENEDILEDIVLTLTLFEDREMIEERLKTYAHLFDDKVMKQLKRRRYTGWGRLSRKLINGIRDKQSGKTILDFLKSDGFANRNFMQLIHDDSLTFKEDIQKAQVSGQGDSLHEHIANLAGSPAIKKGILQTVKVVDELVKVMGRHKPENIVIEMARENQTTQKGQKNSRERMKRIEEGIKELGSQILKEHPVENTQLQNEKLYLYYLQNGRDMYVDQELDINRLSDYDVDHIVPQSFLKDDSIDNKVLTRSDKARGKSDNVPSEEVVKKMKNYWRQLLNAKLITQRKFDNLTKAERGGLSELDKAGFIKRQLVETRQITKHVAQILDSRMNTKYDENDKLIREVKVITLKSKLVSDFRKDFQFYKVREINNYHHAHDAYLNAVVGTALIKKYPKLESEFVYGDYKVYDVRKMIAKSEQEIGKATAKYFFYSNIMNFFKTEITLANGEIRKRPLIETNGETGEIVWDKGRDFATVRKVLSMPQVNIVKKTEVQTGGFSKESILPKRNSDKLIARKKDWDPKKYGGFDSPTVAYSVLVVAKVEKGKSKKLKSVKELLGITIMERSSFEKNPIDFLEAKGYKEVKKDLIIKLPKYSLFELENGRKRMLASAGELQKGNELALPSKYVNFLYLASHYEKLKGSPEDNEQKQLFVEQHKHYLDEIIEQISEFSKRVILADANLDKVLSAYNKHRDKPIREQAENIIHLFTLTNLGAPAAFKYFDTTIDRKRYTSTKEVLDATLIHQSITGLYETRIDLSQLGGDGGGSSGGSEAAAKGGVLNLEEEYRLHEKPVPSSIDPSWLQLFPTVWAERAGMGLANQVPPVVVELRSGASPVAVRQYPMSKEAREGIRPHIQKFLDLGVLVPCRSPWNTPLLPVKKPGTNDYRPVQDLREINKRVQDIHPTVPNPYNLLSSLPPSYTWYSVLDLKDAFFCLRLHPNSQPLFAFEWKDPEKGNTGQLTWTRLPQGFKNSPTLFNEALHRDLAPFRALNPQVVLLQYVDDLLVAAPTYEDCKKGTQKLLQELSKLGYRVSAKKAQLCQREVTYLGYLLKEGKRWLTPARKATVMKIPVPTTPRQVREFLGKAGFCRLFIPGFASLAAPLYPLTKPSIPFIWTEEHQQAFDHIKKALLSAPALALPDLTKPFTLYIDERAGVARGVLTQTLGPWRRPVAYLSKKLDPVASGWPTCLKAVAAVALLLKDADKLTLGQNVTVIASHSLESIVRQPPDRWMTNARMTHYQSLLLNERVSFAPPAVLNPATLLPVESEATPVHRCSEILAEETGTRRDLEDQPLPGVPTWYTDGSSFITEGKRRAGAPIVDGKRTVWASSLPEGTSAQKAELVALTQALRLAEGKNINIYTDSRYAFATAHIHGAIYKQRGWLTSAGKDIKNKEEILALLEAIHLPRRVAIIHCPGHQRGSNPVATGNRRADEAAKQAALSTRVLAGTTKPAGKRTADGSEFEKRTADGSEFESPKKKAKVE

SEQ ID NO: 7072 - protein, 2127 aa, synthetic construct
MPAAKRVKLDGGDKKYSIGLDIGTNSVGWAVITDEYKVPSKKFKVLGNTDRHSIKKNLIGALLFDSGETAEATRLKRTARRRYTRRKNRICYLQEIFSNEMAKVDDSFFHRLEESFLVEEDKKHERHPIFGNIVDEVAYHEKYPTIYHLRKKLVDSTDKADLRLIYLALAHMIKFRGHFLIEGDLNPDNSDVDKLFIQLVQTYNQLFEENPINASGVDAKAILSARLSKSRRLENLIAQLPGEKKNGLFGNLIALSLGLTPNFKSNFDLAEDAKLQLSKDTYDDDLDNLLAQIGDQYADLFLAAKNLSDAILLSDILRVNTEITKAPLSASMIKRYDEHHQDLTLLKALVRQQLPEKYKEIFFDQSKNGYAGYIDGGASQEEFYKFIKPILEKMDGTEELLVKLNREDLLRKQRTFDNGSIPHQIHLGELHAILRRQEDFYPFLKDNREKIEKILTFRIPYYVGPLARGNSRFAWMTRKSEETITPWNFEEVVDKGASAQSFIERMTNFDKNLPNEKVLPKHSLLYEYFTVYNELTKVKYVTEGMRKPAFLSGEQKKAIVDLLFKTNRKVTVKQLKEDYFKKIECFDSVEISGVEDRFNASLGTYHDLLKIIKDKDFLDNEENEDILEDIVLTLTLFEDREMIEERLKTYAHLFDDKVMKQLKRRRYTGWGRLSRKLINGIRDKQSGKTILDFLKSDGFANRNFMQLIHDDSLTFKEDIQKAQVSGQGDSLHEHIANLAGSPAIKKGILQTVKVVDELVKVMGRHKPENIVIEMARENQTTQKGQKNSRERMKRIEEGIKELGSQILKEHPVENTQLQNEKLYLYYLQNGRDMYVDQELDINRLSDYDVDHIVPQSFLKDDSIDNKVLTRSDKARGKSDNVPSEEVVKKMKNYWRQLLNAKLITQRKFDNLTKAERGGLSELDKAGFIKRQLVETRQITKHVAQILDSRMNTKYDENDKLIREVKVITLKSKLVSDFRKDFQFYKVREINNYHHAHDAYLNAVVGTALIKKYPKLESEFVYGDYKVYDVRKMIAKSEQEIGKATAKYFFYSNIMNFFKTEITLANGEIRKRPLIETNGETGEIVWDKGRDFATVRKVLSMPQVNIVKKTEVQTGGFSKESILPKRNSDKLIARKKDWDPKKYGGFDSPTVAYSVLVVAKVEKGKSKKLKSVKELLGITIMERSSFEKNPIDFLEAKGYKEVKKDLIIKLPKYSLFELENGRKRMLASAGELQKGNELALPSKYVNFLYLASHYEKLKGSPEDNEQKQLFVEQHKHYLDEIIEQISEFSKRVILADANLDKVLSAYNKHRDKPIREQAENIIHLFTLTNLGAPAAFKYFDTTIDRKRYTSTKEVLDATLIHQSITGLYETRIDLSQLGGDGGGSSGGSEAAAKGGLLGRDLLTKLKAQIQFSTEGPQVTWEDRPAMCLVLNLEEEYRLHEKPVPPSIDPSWLQLFPMVWAEKAGMGLANQVPPVVVELKSDASPVAVRQYPMSKEAREGIRPHIQRFLDLGILVPCQSPWNTPLLPVKKPGTNDYRPVQDLREVNKRVQDIHPTVPNPYNLLSSLPPSHTWYSVLDLKDAFFCLKLHPNSQPLFAFEWRDPEKGNTGQLTWTRLPQGFKNSPTLFNEALHRDLASFRALNPQVVMLQYVDDLLVAAPTYRDCKEGTRRLLQELSKLGYRVSAKKAQLCREEVTYLGYLLKGGKRWLTPARKATVMKIPTPTTPRQVREFLGTAGFCRLWIPGFASLAAPLYPLTRPKVPFTWTEAHQEAFGRIKEALLSAPALALPDLTKPFALYVDEKEGVARGVLTQTLGPWRRPVAYLSKKLDPVASGWPTCLKAIAAVALLLKDADKLTLGQNVLVIAPHNLESIVRQPPDRWMTNARMTHYQSLLLNERVSFAPPAILNPATLLPVESDDTPIHICSEILAEETGTRPDLRDQPLPGVPAWYTDGSSFIMDGRRQAGAAIVDNKRTVWASNLPEGTSAQKAELIALTQALRLAEGKSINIYTDSRYAFATAHVHGAIYKQRGWLTSAGKDIKNKEEILALLEAIHLPKRVAIIHCPGHQRGTDPVATGNRKADEAAKQAAQSTRILTETTKNAGKRTADGSEFEKRTADGSEFESPKKKAKVE

SEQ ID NO: 7073 - protein, 2218 aa, synthetic construct
MPAAKRVKLDGGDKKYSIGLDIGTNSVGWAVITDEYKVPSKKFKVLGNTDRHSIKKNLIGALLFDSGETAEATRLKRTARRRYTRRKNRICYLQEIFSNEMAKVDDSFFHRLEESFLVEEDKKHERHPIFGNIVDEVAYHEKYPTIYHLRKKLVDSTDKADLRLIYLALAHMIKFRGHFLIEGDLNPDNSDVDKLFIQLVQTYNQLFEENPINASGVDAKAILSARLSKSRRLENLIAQLPGEKKNGLFGNLIALSLGLTPNFKSNFDLAEDAKLQLSKDTYDDDLDNLLAQIGDQYADLFLAAKNLSDAILLSDILRVNTEITKAPLSASMIKRYDEHHQDLTLLKALVRQQLPEKYKEIFFDQSKNGYAGYIDGGASQEEFYKFIKPILEKMDGTEELLVKLNREDLLRKQRTFDNGSIPHQIHLGELHAILRRQEDFYPFLKDNREKIEKILTFRIPYYVGPLARGNSRFAWMTRKSEETITPWNFEEVVDKGASAQSFIERMTNFDKNLPNEKVLPKHSLLYEYFTVYNELTKVKYVTEGMRKPAFLSGEQKKAIVDLLFKTNRKVTVKQLKEDYFKKIECFDSVEISGVEDRFNASLGTYHDLLKIIKDKDFLDNEENEDILEDIVLTLTLFEDREMIEERLKTYAHLFDDKVMKQLKRRRYTGWGRLSRKLINGIRDKQSGKTILDFLKSDGFANRNFMQLIHDDSLTFKEDIQKAQVSGQGDSLHEHIANLAGSPAIKKGILQTVKVVDELVKVMGRHKPENIVIEMARENQTTQKGQKNSRERMKRIEEGIKELGSQILKEHPVENTQLQNEKLYLYYLQNGRDMYVDQELDINRLSDYDVDHIVPQSFLKDDSIDNKVLTRSDKARGKSDNVPSEEVVKKMKNYWRQLLNAKLITQRKFDNLTKAERGGLSELDKAGFIKRQLVETRQITKHVAQILDSRMNTKYDENDKLIREVKVITLKSKLVSDFRKDFQFYKVREINNYHHAHDAYLNAVVGTALIKKYPKLESEFVYGDYKVYDVRKMIAKSEQEIGKATAKYFFYSNIMNFFKTEITLANGEIRKRPLIETNGETGEIVWDKGRDFATVRKVLSMPQVNIVKKTEVQTGGFSKESILPKRNSDKLIARKKDWDPKKYGGFDSPTVAYSVLVVAKVEKGKSKKLKSVKELLGITIMERSSFEKNPIDFLEAKGYKEVKKDLIIKLPKYSLFELENGRKRMLASAGELQKGNELALPSKYVNFLYLASHYEKLKGSPEDNEQKQLFVEQHKHYLDEIIEQISEFSKRVILADANLDKVLSAYNKHRDKPIREQAENIIHLFTLTNLGAPAAFKYFDTTIDRKRYTSTKEVLDATLIHQSITGLYETRIDLSQLGGDGGGSSGGSEAAAKGGTLGDQGSRGSDPLPEPRVTLTVEGIPTEFLVNTGAEHSVLTKPMGKMGSKRTVVAGATGSKVYPWTTKRLLKIGQKQVTHSFLVIPECPAPLLGRDLLTKLKAQIQFSTEGPQVTWEDRPAMCLVLNLEEEYRLHEKPVPPSIDPSWLQLFPMVWAEKAGMGLANQVPPVVVELKSDASPVAVRQYPMSKEAREGIRPHIQRFLDLGILVPCQSPWNTPLLPVKKPGTNDYRPVQDLREVNKRVQDIHPTVPNPYNLLSSLPPSHTWYSVLDLKDAFFCLKLHPNSQPLFAFEWRDPEKGNTGQLTWTRLPQGFKNSPTLFNEALHRDLASFRALNPQVVMLQYVDDLLVAAPTYRDCKEGTRRLLQELSKLGYRVSAKKAQLCREEVTYLGYLLKGGKRWLTPARKATVMKIPTPTTPRQVREFLGTAGFCRLWIPGFASLAAPLYPLTRPKVPFTWTEAHQEAFGRIKEALLSAPALALPDLTKPFALYVDEKEGVARGVLTQTLGPWRRPVAYLSKKLDPVASGWPTCLKAIAAVALLLKDADKLTLGQNVLVIAPHNLESIVRQPPDRWMTNARMTHYQSLLLNERVSFAPPAILNPATLLPVESDDTPIHICSEILAEETGTRPDLRDQPLPGVPAWYTDGSSFIMDGRRQAGAAIVDNKRTVWASNLPEGTSAQKAELIALTQALRLAEGKSINIYTDSRYAFATAHVHGAIYKQRGWLTSAGKDIKNKEEILALLEAIHLPKRVAIIHCPGHQRGTDPVATGNRKADEAAKQAAQSTRILTETTKNAGKRTADGSEFEKRTADGSEFESPKKKAKVE

SEQ ID NO: 7074 - protein, 2090 aa, synthetic construct
MPAAKRVKLDGGDKKYSIGLDIGTNSVGWAVITDEYKVPSKKFKVLGNTDRHSIKKNLIGALLFDSGETAEATRLKRTARRRYTRRKNRICYLQEIFSNEMAKVDDSFFHRLEESFLVEEDKKHERHPIFGNIVDEVAYHEKYPTIYHLRKKLVDSTDKADLRLIYLALAHMIKFRGHFLIEGDLNPDNSDVDKLFIQLVQTYNQLFEENPINASGVDAKAILSARLSKSRRLENLIAQLPGEKKNGLFGNLIALSLGLTPNFKSNFDLAEDAKLQLSKDTYDDDLDNLLAQIGDQYADLFLAAKNLSDAILLSDILRVNTEITKAPLSASMIKRYDEHHQDLTLLKALVRQQLPEKYKEIFFDQSKNGYAGYIDGGASQEEFYKFIKPILEKMDGTEELLVKLNREDLLRKQRTFDNGSIPHQIHLGELHAILRRQEDFYPFLKDNREKIEKILTFRIPYYVGPLARGNSRFAWMTRKSEETITPWNFEEVVDKGASAQSFIERMTNFDKNLPNEKVLPKHSLLYEYFTVYNELTKVKYVTEGMRKPAFLSGEQKKAIVDLLFKTNRKVTVKQLKEDYFKKIECFDSVEISGVEDRFNASLGTYHDLLKIIKDKDFLDNEENEDILEDIVLTLTLFEDREMIEERLKTYAHLFDDKVMKQLKRRRYTGWGRLSRKLINGIRDKQSGKTILDFLKSDGFANRNFMQLIHDDSLTFKEDIQKAQVSGQGDSLHEHIANLAGSPAIKKGILQTVKVVDELVKVMGRHKPENIVIEMARENQTTQKGQKNSRERMKRIEEGIKELGSQILKEHPVENTQLQNEKLYLYYLQNGRDMYVDQELDINRLSDYDVDHIVPQSFLKDDSIDNKVLTRSDKARGKSDNVPSEEVVKKMKNYWRQLLNAKLITQRKFDNLTKAERGGLSELDKAGFIKRQLVETRQITKHVAQILDSRMNTKYDENDKLIREVKVITLKSKLVSDFRKDFQFYKVREINNYHHAHDAYLNAVVGTALIKKYPKLESEFVYGDYKVYDVRKMIAKSEQEIGKATAKYFFYSNIMNFFKTEITLANGEIRKRPLIETNGETGEIVWDKGRDFATVRKVLSMPQVNIVKKTEVQTGGFSKESILPKRNSDKLIARKKDWDPKKYGGFDSPTVAYSVLVVAKVEKGKSKKLKSVKELLGITIMERSSFEKNPIDFLEAKGYKEVKKDLIIKLPKYSLFELENGRKRMLASAGELQKGNELALPSKYVNFLYLASHYEKLKGSPEDNEQKQLFVEQHKHYLDEIIEQISEFSKRVILADANLDKVLSAYNKHRDKPIREQAENIIHLFTLTNLGAPAAFKYFDTTIDRKRYTSTKEVLDATLIHQSITGLYETRIDLSQLGGDGGGSSGGSEAAAKGGTLQLDDEYRLYSPLVKPDQNIQFWLEQFPQAWAETAGMGLAKQVPPQVIQLKASATPVSVRQYPLSKEAQEGIRPHVQRLIQQGILVPVQSPWNTPLLPVRKPGTNDYRPVQDLREVNKRVQDIHPTVPNPYNLLCALPPQRSWYTVLDLKDAFFCLRLHPTSQPLFAFEWRDPGTGRTGQLTWTRLPQGFKNSPTIFDEALHRDLANFRIQHPQVTLLQYVDDLLLAGATKQDCLEGTKALLLELSDLGYRASAKKAQICRREVTYLGYSLRDGQRWLTEARKKTVVQIPAPTTAKQVREFLGTAGFCRLWIPGFATLAAPLYPLTKEKGEFSWAPEHQKAFDAIKKALLSAPALALPDVTKPFTLYVDERKGVARGVLTQTLGPWRRPVAYLSKKLDPVASGWPVCLKAIAAVAILVKDADKLTLGQNITVIAPHALENIVRQPPDRWMTNARMTHYQSLLLTERVTFAPPAALNPATLLPEETDEPVTHDCHQLLIEETGVRKDLTDIPLTGEVLTWFTDGSSYVVEGKRMAGAAVVDGTRTIWASSLPEGTSAQKAELMALTQALRLAEGKSINIYTDSRYAFATAHVHGAIYKQRGLLTSAGREIKNKEEILSLLEALHLPKRLAIIHCPGHQKAKDPISRGNQMADRVAKQAAQGVNLLAGKRTADGSEFEKRTADGSEFESPKKKAKVE

SEQ ID NO: 7075 - protein, 2090 aa, synthetic construct; identical to SEQ ID NO: 7074

SEQ ID NO: 7076 - protein, 2176 aa, synthetic construct
MPAAKRVKLDGGDKKYSIGLDIGTNSVGWAVITDEYKVPSKKFKVLGNTDRHSIKKNLIGALLFDSGETAEATRLKRTARRRYTRRKNRICYLQEIFSNEMAKVDDSFFHRLEESFLVEEDKKHERHPIFGNIVDEVAYHEKYPTIYHLRKKLVDSTDKADLRLIYLALAHMIKFRGHFLIEGDLNPDNSDVDKLFIQLVQTYNQLFEENPINASGVDAKAILSARLSKSRRLENLIAQLPGEKKNGLFGNLIALSLGLTPNFKSNFDLAEDAKLQLSKDTYDDDLDNLLAQIGDQYADLFLAAKNLSDAILLSDILRVNTEITKAPLSASMIKRYDEHHQDLTLLKALVRQQLPEKYKEIFFDQSKNGYAGYIDGGASQEEFYKFIKPILEKMDGTEELLVKLNREDLLRKQRTFDNGSIPHQIHLGELHAILRRQEDFYPFLKDNREKIEKILTFRIPYYVGPLARGNSRFAWMTRKSEETITPWNFEEVVDKGASAQSFIERMTNFDKNLPNEKVLPKHSLLYEYFTVYNELTKVKYVTEGMRKPAFLSGEQKKAIVDLLFKTNRKVTVKQLKEDYFKKIECFDSVEISGVEDRFNASLGTYHDLLKIIKDKDFLDNEENEDILEDIVLTLTLFEDREMIEERLKTYAHLFDDKVMKQLKRRRYTGWGRLSRKLINGIRDKQSGKTILDFLKSDGFANRNFMQLIHDDSLTFKEDIQKAQVSGQGDSLHEHIANLAGSPAIKKGILQTVKVVDELVKVMGRHKPENIVIEMARENQTTQKGQKNSRERMKRIEEGIKELGSQILKEHPVENTQLQNEKLYLYYLQNGRDMYVDQELDINRLSDYDVDHIVPQSFLKDDSIDNKVLTRSDKARGKSDNVPSEEVVKKMKNYWRQLLNAKLITQRKFDNLTKAERGGLSELDKAGFIKRQLVETRQITKHVAQILDSRMNTKYDENDKLIREVKVITLKSKLVSDFRKDFQFYKVREINNYHHAHDAYLNAVVGTALIKKYPKLESEFVYGDYKVYDVRKMIAKSEQEIGKATAKYFFYSNIMNFFKTEITLANGEIRKRPLIETNGETGEIVWDKGRDFATVRKVLSMPQVNIVKKTEVQTGGFSKESILPKRNSDKLIARKKDWDPKKYGGFDSPTVAYSVLVVAKVEKGKSKKLKSVKELLGITIMERSSFEKNPIDFLEAKGYKEVKKDLIIKLPKYSLFELENGRKRMLASAGELQKGNELALPSKYVNFLYLASHYEKLKGSPEDNEQKQLFVEQHKHYLDEIIEQISEFSKRVILADANLDKVLSAYNKHRDKPIREQAENIIHLFTLTNLGAPAAFKYFDTTIDRKRYTSTKEVLDATLIHQSITGLYETRIDLSQLGGDGGGSSGGSEAAAKGGMDPLQLLQPLEAEIKGTKLKAHWNSGATITCVPEAFLEDERPIQTMLIKTIHGEKQQDVYYLTFKVQGRKVEAEVLASPYDYILLNPSDVPWLMKKPLQLTVLVPLHEYQERLLQQTALPKEQKELLQKLFLKYDALWQHWENQVGHRRIKPHNIATGTLAPRPQKQYPINPKAKPSIQIVIDDLLKQGVLIQQNSTMNTPVYPVPKPDGKWRMVLDYREVNKTIPLIAAQNQHSAGILSSIYRGKYKTTLDLTNGFWAHPITPESYWLTAFTWQGKQYCWTRLPQGFLNSPALFNADVVDLLKEIPNVQAYVDDIYISHDDPQEHLEQLEKIFSILLNAGYVVSLKKSEIAQREVEFLGFNITKEGRGLTDTFKQKLLNITPPKDLKQLQSILGLLNFARNFIPNYSELVKPLYTIVAPANGKFISWTEDNSNQLQHIISVLNQADNLEERNPETRLIIKVNSSPSAGYIRYYNEGSKRPIMYVNYIFSKAEAKFTQTEKLLTTMHKGLIKAMDLAMGQEILVYSPIVSMTKIQRTPLPERKALPVRWITWMTYLEDPRIQFHYDKSLPELQQIPNVTEDVIAKTKHPSEFAMVFYTDGSAIKHPDVNKSHSAGMGIAQVQFIPEYKIVHQWSIPLGDHTAQLAEIAAVEFACKKALKISGPVLIVTDSFYVAESANKELPYWKSNGFLNNKKKPLRHVSKWKSIAECLQLKPDIIIMHEKGHQQPMTTLHTEGNNLADKLATQGSYVVHAGKRTADGSEFEKRTADGSEFESPKKKAKVE

SEQ ID NO: 7077 - protein, 2176 aa, synthetic construct
MPAAKRVKLDGGDKKYSIGLDIGTNSVGWAVITDEYKVPSKKFKVLGNTDRHSIKKNLIGALLFDSGETAEATRLKRTARRRYTRRKNRICYLQEIFSNEMAKVDDSFFHRLEESFLVEEDKKHERHPIFGNIVDEVAYHEKYPTIYHLRKKLVDSTDKADLRLIYLALAHMIKFRGHFLIEGDLNPDNSDVDKLFIQLVQTYNQLFEENPINASGVDAKAILSARLSKSRRLENLIAQLPGEKKNGLFGNLIALSLGLTPNFKSNFDLAEDAKLQLSKDTYDDDLDNLLAQIGDQYADLFLAAKNLSDAILLSDILRVNTEITKAPLSASMIKRYDEHHQDLTLLKALVRQQLPEKYKEIFFDQSKNGYAGYIDGGASQEEFYKFIKPILEKMDGTEELLVKLNREDLLRKQRTFDNGSIPHQIHLGELHAILRRQEDFYPFLKDNREKIEKILTFRIPYYVGPLARGNSRFAWMTRKSEETITPWNFEEVVDKGASAQSFIERMTNFDKNLPNEKVLPKHSLLYEYFTVYNELTKVKYVTEGMRKPAFLSGEQKKAIVDLLFKTNRKVTVKQLKEDYFKKIECFDSVEISGVEDRFNASLGTYHDLLKIIKDKDFLDNEENEDILEDIVLTLTLFEDREMIEERLKTYAHLFDDKVMKQLKRRRYTGWGRLSRKLINGIRDKQSGKTILDFLKSDGFANRNFMQLIHDDSLTFKEDIQKAQVSGQGDSLHEHIANLAGSPAIKKGILQTVKVVDELVKVMGRHKPENIVIEMARENQTTQKGQKNSRERMKRIEEGIKELGSQILKEHPVENTQLQNEKLYLYYLQNGRDMYVDQELDINRLSDYDVDHIVPQSFLKDDSIDNKVLTRSDKARGKSDNVPSEEVVKKMKNYWRQLLNAKLITQRKFDNLTKAERGGLSELDKAGFIKRQLVETRQITKHVAQILDSRMNTKYDENDKLIREVKVITLKSKLVSDFRKDFQFYKVREINNYHHAHDAYLNAVVGTALIKKYPKLESEFVYGDYKVYDVRKMIAKSEQEIGKATAKYFFYSNIMNFFKTEITLANGEIRKRPLIETNGETGEIVWDKGRDFATVRKVLSMPQVNIVKKTEVQTGGFSKESILPKRNSDKLIARKKDWDPKKYGGFDSPTVAYSVLVVAKVEKGKSKKLKSVKELLGITIMERSSFEKNPIDFLEAKGYKEVKKDLIIKLPKYSLFELENGRKRMLASAGELQKGNELALPSKYVNFLYLASHYEKLKGSPEDNEQKQLFVEQHKHYLDEIIEQISEFSKRVILADANLDKVLSAYNKHRDKPIREQAENIIHLFTLTNLGAPAAFKYFDTTIDRKRYTSTKEVLDATLIHQSITGLYETRIDLSQLGGDGGGSSGGSEAAAKGGMDPLQLLQPLEAEIKGTKLKAHWNSGATITCVPQAFLEEEVPIKNIWIKTIHGEKEQPVYYLTFKIQGRKVEAEVISSPYDYILVSPSDIPWLMKKPLQLTTLVPLQEYEERLLKQTMLTGSYKEKLQSLFLKYDALWQHWENQVGHRRIKPHHIATGTVNPRPQKQYPINPKAKASIQTVINDLLKQGVLIQQNSIMNTPVYPVPKPDGKWRMVLDYREVNKTIPLIAAQNQHSAGILSSIFRGKYKTTLDLSNGFWAHSITPESYWLTAFTWLGQQYCWTRLPQGFLNSPALFNADVVDLLKEVPNVQVYVDDIYISHDDPREHLEQLEKVFSLLLNAGYVVSLKKSEIAQHEVEFLGFNITKEGRGLTETFKQKLLNITPPRDLKQLQSILGLLNFARNFIPNFSELVKPLYNIIATAPGKYITWTTDNSQQLQNIISMLNSAENLEERNPEVRLIMKVNTSPSAGYIRFYNEFAKRPIMYLNYVYTKAEVKFTNTEKLLTTIHKGLIKALDLGMGQEILVYSPIVSMTKIQKTPLPERKALPIRWITWMSYLEDPRIQFHYDKTLPELQQVPTVTDDIIAKIKHPSEFSMVFYTDGSAIKHPNVNKSHNAGMGIAQVQFKPEFTVINTWSIPLGDHTAQLAEVAAVEFACKKALKIDGPVLIVTDSFYVAESVNKELPYWQSNGFFNNKKKPLKHVSKWKSIADCIQLKPDIIIIHEKGHQPTASTFHTEGNNLADKLATQGSYVVNAGKRTADGSEFEKRTADGSEFESPKKKAKVE

SEQ ID NO: 7078 - protein, 2098 aa, synthetic construct
MPAAKRVKLDGGDKKYSIGLDIGTNSVGWAVITDEYKVPSKKFKVLGNTDRHSIKKNLIGALLFDSGETAEATRLKRTARRRYTRRKNRICYLQEIFSNEMAKVDDSFFHRLEESFLVEEDKKHERHPIFGNIVDEVAYHEKYPTIYHLRKKLVDSTDKADLRLIYLALAHMIKFRGHFLIEGDLNPDNSDVDKLFIQLVQTYNQLFEENPINASGVDAKAILSARLSKSRRLENLIAQLPGEKKNGLFGNLIALSLGLTPNFKSNFDLAEDAKLQLSKDTYDDDLDNLLAQIGDQYADLFLAAKNLSDAILLSDILRVNTEITKAPLSASMIKRYDEHHQDLTLLKALVRQQLPEKYKEIFFDQSKNGYAGYIDGGASQEEFYKFIKPILEKMDGTEELLVKLNREDLLRKQRTFDNGSIPHQIHLGELHAILRRQEDFYPFLKDNREKIEKILTFRIPYYVGPLARGNSRFAWMTRKSEETITPWNFEEVVDKGASAQSFIERMTNFDKNLPNEKVLPKHSLLYEYFTVYNELTKVKYVTEGMRKPAFLSGEQKKAIVDLLFKTNRKVTVKQLKEDYFKKIECFDSVEISGVEDRFNASLGTYHDLLKIIKDKDFLDNEENEDILEDIVLTLTLFEDREMIEERLKTYAHLFDDKVMKQLKRRRYTGWGRLSRKLINGIRDKQSGKTILDFLKSDGFANRNFMQLIHDDSLTFKEDIQKAQVSGQGDSLHEHIANLAGSPAIKKGILQTVKVVDELVKVMGRHKPENIVIEMARENQTTQKGQKNSRERMKRIEEGIKELGSQILKEHPVENTQLQNEKLYLYYLQNGRDMYVDQELDINRLSDYDVDHIVPQSFLKDDSIDNKVLTRSDKARGKSDNVPSEEVVKKMKNYWRQLLNAKLITQRKFDNLTKAERGGLSELDKAGFIKRQLVETRQITKHVAQILDSRMNTKYDENDKLIREVKVITLKSKLVSDFRKDFQFYKVREINNYHHAHDAYLNAVVGTALIKKYPKLESEFVYGDYKVYDVRKMIAKSEQEIGKATAKYFFYSNIMNFFKTEITLANGEIRKRPLIETNGETGEIVWDKGRDFATVRKVLSMPQVNIVKKTEVQTGGFSKESILPKRNSDKLIARKKDWDPKKYGGFDSPTVAYSVLVVAKVEKGKSKKLKSVKELLGITIMERSSFEKNPIDFLEAKGYKEVKKDLIIKLPKYSLFELENGRKRMLASAGELQKGNELALPSKYVNFLYLASHYEKLKGSPEDNEQKQLFVEQHKHYLDEIIEQISEFSKRVILADANLDKVLSAYNKHRDKPIREQAENIIHLFTLTNLGAPAAFKYFDTTIDRKRYTSTKEVLDATLIHQSITGLYETRIDLSQLGGDGGGSSEAAAKGGSGGTAPLEEEYRLFLEAPIQNVTLLEQWKREIPKVWAEINPPGLASTQAPIHVQLLSTALPVRVRQYPITLEAKRSLRETIRKFRAAGILRPVHSPWNTPLLPVRKSGTSEYRMVQDLREVNKRVETIHPTVPNPYTLLSLLPPDRIWYSVLDLKDAFFCIPLAPESQLIFAFEWADAEEGESGQLTWTRLPQGFKNSPTLFDEALNRDLQGFRLDHPSVSLLQYVDDLLIAADTQAACLSATRDLLMTLAELGYRVSGKKAQLCQEEVTYLGFKIHKGSRSLSNSRTQAILQIPVPKTKRQVREFLGTIGYCRLWIPGFAELAQPLYAATRGGNDPLVWGEKEEEAFQSLKLALTQPPALALPSLDKPFQLFVEETSGAAKGVLTQALGPWKRPVAYLSKRLDPVAAGWPRCLRAIAAAALLTREASKLTFGQDIEITSSHNLESLLRSPPDKWLTNARITQYQVLLLDPPRVRFKQTAALNPATLLPETDDTLPIHHCLDTLDSLTSTRPDLTDQPLAQAEATLFTDGSSYIRDGKRYAGAAVVTLDSVIWAEPLPIGTSAQKAELIALTKALEWSKDKSVNIYTDSRYAFATLHVHGMIYRERGLLTAGGKAIKNAPEILALLTAVWLPKRVAVMHCKGHQKDDAPTSTGNRRADEVAREVAIRPLSTQATISAGKRTADGSEFEKRTADGSEFESPKKKAKVE

SEQ ID NO: 7079 - protein, 2098 aa, synthetic construct
MPAAKRVKLDGGDKKYSIGLDIGTNSVGWAVITDEYKVPSKKFKVLGNTDRHSIKKNLIGALLFDSGETAEATRLKRTARRRYTRRKNRICYLQEIFSNEMAKVDDSFFHRLEESFLVEEDKKHERHPIFGNIVDEVAYHEKYPTIYHLRKKLVDSTDKADLRLIYLALAHMIKFRGHFLIEGDLNPDNSDVDKLFIQLVQTYNQLFEENPINASGVDAKAILSARLSKSRRLENLIAQLPGEKKNGLFGNLIALSLGLTPNFKSNFDLAEDAKLQLSKDTYDDDLDNLLAQIGDQYADLFLAAKNLSDAILLSDILRVNTEITKAPLSASMIKRYDEHHQDLTLLKALVRQQLPEKYKEIFFDQSKNGYAGYIDGGASQEEFYKFIKPILEKMDGTEELLVKLNREDLLRKQRTFDNGSIPHQIHLGELHAILRRQEDFYPFLKDNREKIEKILTFRIPYYVGPLARGNSRFAWMTRKSEETITPWNFEEVVDKGASAQSFIERMTNFDKNLPNEKVLPKHSLLYEYFTVYNELTKVKYVTEGMRKPAFLSGEQKKAIVDLLFKTNRKVTVKQLKEDYFKKIECFDSVEISGVEDRFNASLGTYHDLLKIIKDKDFLDNEENEDILEDIVLTLTLFEDREMIEERLKTYAHLFDDKVMKQLKRRRYTGWGRLSRKLINGIRDKQSGKTILDFLKSDGFANRNFMQLIHDDSLTFKEDIQKAQVSGQGDSLHEHIANLAGSPAIKKGILQTVKVVDELVKVMGRHKPENIVIEMARENQTTQKGQKNSRERMKRIEEGIKELGSQILKEHPVENTQLQNEKLYLYYLQNGRDMYVDQELDINRLSDYDVDHIVPQSFLKDDSIDNKVLTRSDKARGKSDNVPSEEVVKKMKNYWRQLLNAKLITQRKFDNLTKAERGGLSELDKAGFIKRQLVETRQITKHVAQILDSRMNTKYDENDKLIREVKVITLKSKLVSDFRKDFQFYKVREINNYHHAHDAYLNAVVGTALIKKYPKLESEFVYGDYKVYDVRKMIAKSEQEIGKATAKYFFYSNIMNFFKTEITLANGEIRKRPLIETNGETGEIVWDKGRDFATVRKVLSMPQVNIVKKTEVQTGGFSKESILPKRNSDKLIARKKDWDPKKYGGFDSPTVAYSVLVVAKVEKGKSKKLKSVKELLGITIMERSSFEKNPIDFLEAKGYKEVKKDLIIKLPKYSLFELENGRKRMLASAGELQKGNELALPSKYVNFLYLASHYEKLKGSPEDNEQKQLFVEQHKHYLDEIIEQISEFSKRVILADANLDKVLSAYNKHRDKPIREQAENIIHLFTLTNLGAPAAFKYFDTTIDRKRYTSTKEVLDATLIHQSITGLYETRIDLSQLGGDGGGSSEAAAKGGSGGTAPLEEEYRLFLEAPIQNVTLLEQWKREIPKVWAEINPPGLASTQAPIHVQLLSTALPVRVRQYPITLEAKRSLRETIRKFRAAGILRPVHSPWNTPLLPVRKSGTSEYRMVQDLREVNKRVETIHPTVPNPYTLLSLLPPDRIWYSVLDLKDAFFCIPLAPESQLIFAFEWADAEEGESGQLTWTRLPQGFKNSPTLFNEALNRDLQGFRLDHPSVSLLQYVDDLLIAADTQAACLSATRDLLMTLAELGYRVSGKKAQLCQEEVTYLGFKIHKGSRSLSNSRTQAILQIPVPKTKRQVREFLGTIGYCRLWIPGFAELAQPLYAATRPGNDPLVWGEKEEEAFQSLKLALTQPPALALPSLDKPFQLFVEETSGAAKGVLTQALGPWKRPVAYLSKRLDPVAAGWPRCLRAIAAAALLTREASKLTFGQDIEITSSHNLESLLRSPPDKWLTNARITQYQVLLLDPPRVRFKQTAALNPATLLPETDDTLPIHHCLDTLDSLTSTRPDLTDQPLAQAEATLFTDGSSYIRDGKRYAGAAVVTLDSVIWAEPLPIGTSAQKAELIALTKALEWSKDKSVNIYTDSRYAFATLHVHGMIYRERGWLTAGGKAIKNAPEILALLTAVWLPKRVAVMHCKGHQKDDAPTSTGNRRADEVAREVAIRPLSTQATISAGKRTADGSEFEKRTADGSEFESPKKKAKVE

SEQ ID NO: 7080 - protein, 2098 aa, synthetic construct
MPAAKRVKLDGGDKKYSIGLDIGTNSVGWAVITDEYKVPSKKFKVLGNTDRHSIKKNLIGALLFDSGETAEATRLKRTARRRYTRRKNRICYLQEIFSNEMAKVDDSFFHRLEESFLVEEDKKHERHPIFGNIVDEVAYHEKYPTIYHLRKKLVDSTDKADLRLIYLALAHMIKFRGHFLIEGDLNPDNSDVDKLFIQLVQTYNQLFEENPINASGVDAKAILSARLSKSRRLENLIAQLPGEKKNGLFGNLIALSLGLTPNFKSNFDLAEDAKLQLSKDTYDDDLDNLLAQIGDQYADLFLAAKNLSDAILLSDILRVNTEITKAPLSASMIKRYDEHHQDLTLLKALVRQQLPEKYKEIFFDQSKNGYAGYIDGGASQEEFYKFIKPILEKMDGTEELLVKLNREDLLRKQRTFDNGSIPHQIHLGELHAILRRQEDFYPFLKDNREKIEKILTFRIPYYVGPLARGNSRFAWMTRKSEETITPWNFEEVVDKGASAQSFIERMTNFDKNLPNEKVLPKHSLLYEYFTVYNELTKVKYVTEGMRKPAFLSGEQKKAIVDLLFKTNRKVTVKQLKEDYFKKIECFDSVEISGVEDRFNASLGTYHDLLKIIKDKDFLDNEENEDILEDIVLTLTLFEDREMIEERLKTYAHLFDDKVMKQLKRRRYTGWGRLSRKLINGIRDKQSGKTILDFLKSDGFANRNFMQLIHDDSLTFKEDIQKAQVSGQGDSLHEHIANLAGSPAIKKGILQTVKVVDELVKVMGRHKPENIVIEMARENQTTQKGQKNSRERMKRIEEGIKELGSQILKEHPVENTQLQNEKLYLYYLQNGRDMYVDQELDINRLSDYDVDHIVPQSFLKDDSIDNKVLTRSDKARGKSDNVPSEEVVKKMKNYWRQLLNAKLITQRKFDNLTKAERGGLSELDKAGFIKRQLVETRQITKHVAQILDSRMNTKYDENDKLIREVKVITLKSKLVSDFRKDFQFYKVREINNYHHAHDAYLNAVVGTALIKKYPKLESEFVYGDYKVYDVRKMIAKSEQEIGKATAKYFFYSNIMNFFKTEITLANGEIRKRPLIETNGETGEIVWDKGRDFATVRKVLSMPQVNIVKKTEVQTGGFSKESILPKRNSDKLIARKKDWDPKKYGGFDSPTVAYSVLVVAKVEKGKSKKLKSVKELLGITIMERSSFEKNPIDFLEAKGYKEVKKDLIIKLPKYSLFELENGRKRMLASAGELQKGNELALPSKYVNFLYLASHYEKLKGSPEDNEQKQLFVEQHKHYLDEIIEQISEFSKRVILADANLDKVLSAYNKHRDKPIREQAENIIHLFTLTNLGAPAAFKYFDTTIDRKRYTSTKEVLDATLIHQSITGLYETRIDLSQLGGDGGGSSEAAAKGGSGGTAPLEEEYRLFLEAPIQNVTLLEQWKREIPKVWAEINPPGLASTQAPIHVQLLSTALPVRVRQYPITLEAKRSLRETIRKFRAAGILRPVHSPWNTPLLPVRKSGTSEYRMVQDLREVNKRVETIHPTVPNPYTLLSLLPPDRIWYSVLDLKDAFFCIPLAPESQLIFAFEWADAEEGESGQLTWTRLPQGFKNSPTLFNEALNRDLQGFRLDHPSVSLLQYVDDLLIAADTQAACLSATRDLLMTLAELGYRVSGKKAQLCQEEVTYLGFKIHKGSRSLSNSRTQAILQIPVPKTKRQVREFLGKIGYCRLFIPGFAELAQPLYAATRPGNDPLVWGEKEEEAFQSLKLALTQPPALALPSLDKPFQLFVEETSGAAKGVLTQALGPWKRPVAYLSKRLDPVAAGWPRCLRAIAAAALLTREASKLTFGQDIEITSSHNLESLLRSPPDKWLTNARITQYQVLLLDPPRVRFKQTAALNPATLLPETDDTLPIHHCLDTLDSLTSTRPDLTDQPLAQAEATLFTDGSSYIRDGKRYAGAAVVTLDSVIWAEPLPIGTSAQKAELIALTKALEWSKDKSVNIYTDSRYAFATLHVHGMIYRERGWLTAGGKAIKNAPEILALLTAVWLPKRVAVMHCKGHQKDDAPTSTGNRRADEVAREVAIRPLSTQATISAGKRTADGSEFEKRTADGSEFESPKKKAKVE

SEQ ID NO: 7081 - protein, 2102 aa, synthetic construct
MPAAKRVKLDGGDKKYSIGLDIGTNSVGWAVITDEYKVPSKKFKVLGNTDRHSIKKNLIGALLFDSGETAEATRLKRTARRRYTRRKNRICYLQEIFSNEMAKVDDSFFHRLEESFLVEEDKKHERHPIFGNIVDEVAYHEKYPTIYHLRKKLVDSTDKADLRLIYLALAHMIKFRGHFLIEGDLNPDNSDVDKLFIQLVQTYNQLFEENPINASGVDAKAILSARLSKSRRLENLIAQLPGEKKNGLFGNLIALSLGLTPNFKSNFDLAEDAKLQLSKDTYDDDLDNLLAQIGDQYADLFLAAKNLSDAILLSDILRVNTEITKAPLSASMIKRYDEHHQDLTLLKALVRQQLPEKYKEIFFDQSKNGYAGYIDGGASQEEFYKFIKPILEKMDGTEELLVKLNREDLLRKQRTFDNGSIPHQIHLGELHAILRRQEDFYPFLKDNREKIEKILTFRIPYYVGPLARGNSRFAWMTRKSEETITPWNFEEVVDKGASAQSFIERMTNFDKNLPNEKVLPKHSLLYEYFTVYNELTKVKYVTEGMRKPAFLSGEQKKAIVDLLFKTNRKVTVKQLKEDYFKKIECFDSVEISGVEDRFNASLGTYHDLLKIIKDKDFLDNEENEDILEDIVLTLTLFEDREMIEERLKTYAHLFDDKVMKQLKRRRYTGWGRLSRKLINGIRDKQSGKTILDFLKSDGFANRNFMQLIHDDSLTFKEDIQKAQVSGQGDSLHEHIANLAGSPAIKKGILQTVKVVDELVKVMGRHKPENIVIEMARENQTTQKGQKNSRERMKRIEEGIKELGSQILKEHPVENTQLQNEKLYLYYLQNGRDMYVDQELDINRLSDYDVDHIVPQSFLKDDSIDNKVLTRSDKARGKSDNVPSEEVVKKMKNYWRQLLNAKLITQRKFDNLTKAERGGLSELDKAGFIKRQLVETRQITKHVAQILDSRMNTKYDENDKLIREVKVITLKSKLVSDFRKDFQFYKVREINNYHHAHDAYLNAVVGTALIKKYPKLESEFVYGDYKVYDVRKMIAKSEQEIGKATAKYFFYSNIMNFFKTEITLANGEIRKRPLIETNGETGEIVWDKGRDFATVRKVLSMPQVNIVKKTEVQTGGFSKESILPKRNSDKLIARKKDWDPKKYGGFDSPTVAYSVLVVAKVEKGKSKKLKSVKELLGITIMERSSFEKNPIDFLEAKGYKEVKKDLIIKLPKYSLFELENGRKRMLASAGELQKGNELALPSKYVNFLYLASHYEKLKGSPEDNEQKQLFVEQHKHYLDEIIEQISEFSKRVILADANLDKVLSAYNKHRDKPIREQAENIIHLFTLTNLGAPAAFKYFDTTIDRKRYTSTKEVLDATLIHQSITGLYETRIDLSQLGGDGGGSSEAAAKGGSGGTVSLQDEHRLFDIPVTTSLPDVWLQDFPQAWAETGGLGRAKCQAPIIIDLKPTAVPVSIKQYPMSLEAHMGIRQHIIKFLELGVLRPCRSPWNTPLLPVKKPGTQDYRPVQDLREINKRTVDIHPTVPNPYNLLSTLKPDYSWYTVLDLKDAFFCLPLAPQSQELFAFEWKDPERGISGQLTWTRLPQGFKNSPTLFNEALHRDLTDFRTQHPEVTLLQYVDDLLLAAPTKKACTQGTRHLLQELGEKGYRASAKKAQICQTKVTYLGYILSEGKRWLTPGRIETVARIPPPRNPREVREFLGTAGFCRLWIPGFAELAAPLYALTKPSTPFTWQTEHQLAFEALKKALLSAPALGLPDTSKPFTLFLDERQGIAKGVLTQKLGPWKRPVAYLSKKLDPVAAGWPPCLRIMAATAMLVKDSAKLTLGQPLTVITPHTLEAIVRQPPDRWITNARLTHYQALLLDTDRVQFGPPVTLNPATLLPVPENQPSPHDCRQVLAETHGTREDLKDQELPDADHTWYTDGSSYLDSGTRRAGAAVVDGHNTIWAQSLPPGTSAQKAELIALTKALELSKGKKANIYTDSRYAFATAHTHGSIYERRGWLTSEGKEIKNKAEIIALLKALFLPQEVAIIHCPGHQKGQDPVAVGNRQADRVARQAAMAEVLTLATEPDNTSHITAGKRTADGSEFEKRTADGSEFESPKKKAKVE

SEQ ID NO: 7082 - protein, 2095 aa, synthetic construct
MPAAKRVKLDGGDKKYSIGLDIGTNSVGWAVITDEYKVPSKKFKVLGNTDRHSIKKNLIGALLFDSGETAEATRLKRTARRRYTRRKNRICYLQEIFSNEMAKVDDSFFHRLEESFLVEEDKKHERHPIFGNIVDEVAYHEKYPTIYHLRKKLVDSTDKADLRLIYLALAHMIKFRGHFLIEGDLNPDNSDVDKLFIQLVQTYNQLFEENPINASGVDAKAILSARLSKSRRLENLIAQLPGEKKNGLFGNLIALSLGLTPNFKSNFDLAEDAKLQLSKDTYDDDLDNLLAQIGDQYADLFLAAKNLSDAILLSDILRVNTEITKAPLSASMIKRYDEHHQDLTLLKALVRQQLPEKYKEIFFDQSKNGYAGYIDGGASQEEFYKFIKPILEKMDGTEELLVKLNREDLLRKQRTFDNGSIPHQIHLGELHAILRRQEDFYPFLKDNREKIEKILTFRIPYYVGPLARGNSRFAWMTRKSEETITPWNFEEVVDKGASAQSFIERMTNFDKNLPNEKVLPKHSLLYEYFTVYNELTKVKYVTEGMRKPAFLSGEQKKAIVDLLFKTNRKVTVKQLKEDYFKKIECFDSVEISGVEDRFNASLGTYHDLLKIIKDKDFLDNEENEDILEDIVLTLTLFEDREMIEERLKTYAHLFDDKVMKQLKRRRYTGWGRLSRKLINGIRDKQSGKTILDFLKSDGFANRNFMQLIHDDSLTFKEDIQKAQVSGQGDSLHEHIANLAGSPAIKKGILQTVKVVDELVKVMGRHKPENIVIEMARENQTTQKGQKNSRERMKRIEEGIKELGSQILKEHPVENTQLQNEKLYLYYLQNGRDMYVDQELDINRLSDYDVDHIVPQSFLKDDSIDNKVLTRSDKARGKSDNVPSEEVVKKMKNYWRQLLNAKLITQRKFDNLTKAERGGLSELDKAGFIKRQLVETRQITKHVAQILDSRMNTKYDENDKLIREVKVITLKSKLVSDFRKDFQFYKVREINNYHHAHDAYLNAVVGTALIKKYPKLESEFVYGDYKVYDVRKMIAKSEQEIGKATAKYFFYSNIMNFFKTEITLANGEIRKRPLIETNGETGEIVWDKGRDFATVRKVLSMPQVNIVKKTEVQTGGFSKESILPKRNSDKLIARKKDWDPKKYGGFDSPTVAYSVLVVAKVEKGKSKKLKSVKELLGITIMERSSFEKNPIDFLEAKGYKEVKKDLIIKLPKYSLFELENGRKRMLASAGELQKGNELALPSKYVNFLYLASHYEKLKGSPEDNEQKQLFVEQHKHYLDEIIEQISEFSKRVILADANLDKVLSAYNKHRDKPIREQAENIIHLFTLTNLGAPAAFKYFDTTIDRKRYTSTKEVLDATLIHQSITGLYETRIDLSQLGGDGGGSSEAAAKGGSGGTLQLEEEYRLFEPESTQKQEMDIWLKNFPQAWAETGGMGTAHCQAPVLIQLKATATPISIRQYPMPHEAYQGIKPHIRRMLDQGILKPCQSPWNTPLLPVKKPGTEDYRPVQDLREVNKRVEDIHPTVPNPYNLLSTLPPSHPWYTVLDLKDAFFCLRLHSESQLLFAFEWRDPEIGLSGQLTWTRLPQGFKNSPTLFNEALHSDLADFRVRYPALVLLQYVDDLLLAAATRTECLEGTKALLETLGNKGYRASAKKAQICLQEVTYLGYSLKDGQRWLTKARKEAILSIPVPKNSRQVREFLGTAGYCRLWIPGFAELAAPLYPLTRPGTLFQWGTEQQLAFEDIKKALLSSPALGLPDITKPFELFIDENSGFAKGVLVQKLGPWKRPVAYLSKKLDTVASGWPPCLRMVAAIAILVKDAGKLTLGQPLTILTSHPVEALVRQPPNKWLSNARMTHYQAMLLDAERVHFGPTVSLNPATLLPLPSGGNHHDCLQILAETHGTRPDLTDQPLPDADLTWYTDGSSFIRNGEREAGAAVTTESEVIWAAPLPPGTSAQRAELIALTQALKMAEGKKLTVYTDSRYAFATTHVHGEIYRRRGWLTSEGKEIKNKNEILALLEALFLPKRLSIIHCPGHQKGDSPQAKGNRLADDTAKKAATETHSSLTVLPAGKRTADGSEFEKRTADGSEFESPKKKAKVE

SEQ ID NO: 7083 - protein, 2176 aa, synthetic construct
MPAAKRVKLDGGDKKYSIGLDIGTNSVGWAVITDEYKVPSKKFKVLGNTDRHSIKKNLIGALLFDSGETAEATRLKRTARRRYTRRKNRICYLQEIFSNEMAKVDDSFFHRLEESFLVEEDKKHERHPIFGNIVDEVAYHEKYPTIYHLRKKLVDSTDKADLRLIYLALAHMIKFRGHFLIEGDLNPDNSDVDKLFIQLVQTYNQLFEENPINASGVDAKAILSARLSKSRRLENLIAQLPGEKKNGLFGNLIALSLGLTPNFKSNFDLAEDAKLQLSKDTYDDDLDNLLAQIGDQYADLFLAAKNLSDAILLSDILRVNTEITKAPLSASMIKRYDEHHQDLTLLKALVRQQLPEKYKEIFFDQSKNGYAGYIDGGASQEEFYKFIKPILEKMDGTEELLVKLNREDLLRKQRTFDNGSIPHQIHLGELHAILRRQEDFYPFLKDNREKIEKILTFRIPYYVGPLARGNSRFAWMTRKSEETITPWNFEEVVDKGASAQSFIERMTNFDKNLPNEKVLPKHSLLYEYFTVYNELTKVKYVTEGMRKPAFLSGEQKKAIVDLLFKTNRKVTVKQLKEDYFKKIECFDSVEISGVEDRFNASLGTYHDLLKIIKDKDFLDNEENEDILEDIVLTLTLFEDREMIEERLKTYAHLFDDKVMKQLKRRRYTGWGRLSRKLINGIRDKQSGKTILDFLKSDGFANRNFMQLIHDDSLTFKEDIQKAQVSGQGDSLHEHIANLAGSPAIKKGILQTVKVVDELVKVMGRHKPENIVIEMARENQTTQKGQKNSRERMKRIEEGIKELGSQILKEHPVENTQLQNEKLYLYYLQNGRDMYVDQELDINRLSDYDVDHIVPQSFLKDDSIDNKVLTRSDKARGKSDNVPSEEVVKKMKNYWRQLLNAKLITQRKFDNLTKAERGGLSELDKAGFIKRQLVETRQITKHVAQILDSRMNTKYDENDKLIREVKVITLKSKLVSDFRKDFQFYKVREINNYHHAHDAYLNAVVGTALIKKYPKLESEFVYGDYKVYDVRKMIAKSEQEIGKATAKYFFYSNIMNFFKTEITLANGEIRKRPLIETNGETGEIVWDKGRDFATVRKVLSMPQVNIVKKTEVQTGGFSKESILPKRNSDKLIARKKDWDPKKYGGFDSPTVAYSVLVVAKVEKGKSKKLKSVKELLGITIMERSSFEKNPIDFLEAKGYKEVKKDLIIKLPKYSLFELENGRKRMLASAGELQKGNELALPSKYVNFLYLASHYEKLKGSPEDNEQKQLFVEQHKHYLDEIIEQISEFSKRVILADANLDKVLSAYNKHRDKPIREQAENIIHLFTLTNLGAPAAFKYFDTTIDRKRYTSTKEVLDATLIHQSITGLYETRIDLSQLGGDGGGSSEAAAKGGSGGMNPLQLLQPLPAEIKGTKLLAHWNSGATITCIPESFLEDEQPIKKTLIKTIHGEKQQNVYYVTFKVKGRKVEAEVIASPYEYILLSPTDVPWLTQQPLQLTILVPLQEYQEKILSKTALPEDQKQQLKTLFVKYDNLWQHWENQVGHRKIRPHNIATGDYPPRPQKQYPINPKAKPSIQIVIDDLLKQGVLTPQNSTMNTPVYPVPKPDGRWRMVLDYREVNKTIPLTAAQNQHSAGILATIVRQKYKTTLDLANGFWAHPITPESYWLTAFTWQGKQYCWTRLPQGFLNSPALFTADVVDLLKEIPNVQVYVDDIYLSHDDPKEHVQQLEKVFQILLQAGYVVSLKKSEIGQKTVEFLGFNITKEGRGLTDTFKTKLLNITPPKDLKQLQSILGLLNFARNFIPNFAELVQPLYNLIASAKGKYIEWSEENTKQLNMVIEALNTASNLEERLPEQRLVIKVNTSPSAGYVRYYNETGKKPIMYLNYVFSKAELKFSMLEKLLTTMHKALIKAMDLAMGQEILVYSPIVSMTKIQKTPLPERKALPIRWITWMTYLEDPRIQFHYDKTLPELKHIPDVYTSSQSPVKHPSQYEGVFYTDGSAIKSPDPTKSNNAGMGIVHATYKPEYQVLNQWSIPLGNHTAQMAEIAAVEFACKKALKIPGPVLVITDSFYVAESANKELPYWKSNGFVNNKKKPLKHISKWKSIAECLSMKPDITIQHEKGISLQIPVFILKGNALADKLATQGSYVVNAGKRTADGSEFEKRTADGSEFESPKKKAKVE

SEQ ID NO: 7084 - protein, 2218 aa, synthetic construct
MPAAKRVKLDGGDKKYSIGLDIGTNSVGWAVITDEYKVPSKKFKVLGNTDRHSIKKNLIGALLFDSGETAEATRLKRTARRRYTRRKNRICYLQEIFSNEMAKVDDSFFHRLEESFLVEEDKKHERHPIFGNIVDEVAYHEKYPTIYHLRKKLVDSTDKADLRLIYLALAHMIKFRGHFLIEGDLNPDNSDVDKLFIQLVQTYNQLFEENPINASGVDAKAILSARLSKSRRLENLIAQLPGEKKNGLFGNLIALSLGLTPNFKSNFDLAEDAKLQLSKDTYDDDLDNLLAQIGDQYADLFLAAKNLSDAILLSDILRVNTEITKAPLSASMIKRYDEHHQDLTLLKALVRQQLPEKYKEIFFDQSKNGYAGYIDGGASQEEFYKFIKPILEKMDGTEELLVKLNREDLLRKQRTFDNGSIPHQIHLGELHAILRRQEDFYPFLKDNREKIEKILTFRIPYYVGPLARGNSRFAWMTRKSEETITPWNFEEVVDKGASAQSFIERMTNFDKNLPNEKVLPKHSLLYEYFTVYNELTKVKYVTEGMRKPAFLSGEQKKAIVDLLFKTNRKVTVKQLKEDYFKKIECFDSVEISGVEDRFNASLGTYHDLLKIIKDKDFLDNEENEDILEDIVLTLTLFEDREMIEERLKTYAHLFDDKVMKQLKRRRYTGWGRLSRKLINGIRDKQSGKTILDFLKSDGFANRNFMQLIHDDSLTFKEDIQKAQVSGQGDSLHEHIANLAGSPAIKKGILQTVKVVDELVKVMGRHKPENIVIEMARENQTTQKGQKNSRERMKRIEEGIKELGSQILKEHPVENTQLQNEKLYLYYLQNGRDMYVDQELDINRLSDYDVDHIVPQSFLKDDSIDNKVLTRSDKARGKSDNVPSEEVVKKMKNYWRQLLNAKLITQRKFDNLTKAERGGLSELDKAGFIKRQLVETRQITKHVAQILDSRMNTKYDENDKLIREVKVITLKSKLVSDFRKDFQFYKVREINNYHHAHDAYLNAVVGTALIKKYPKLESEFVYGDYKVYDVRKMIAKSEQEIGKATAKYFFYSNIMNFFKTEITLANGEIRKRPLIETNGETGEIVWDKGRDFATVRKVLSMPQVNIVKKTEVQTGGFSKESILPKRNSDKLIARKKDWDPKKYGGFDSPTVAYSVLVVAKVEKGKSKKLKSVKELLGITIMERSSFEKNPIDFLEAKGYKEVKKDLIIKLPKYSLFELENGRKRMLASAGELQKGNELALPSKYVNFLYLASHYEKLKGSPEDNEQKQLFVEQHKHYLDEIIEQISEFSKRVILADANLDKVLSAYNKHRDKPIREQAENIIHLFTLTNLGAPAAFKYFDTTIDRKRYTSTKEVLDATLIHQSITGLYETRIDLSQLGGDGGGSSEAAAKGGSGGTLGDQGSRGSDPLPEPRVTLTVEGIPTEFLVNTGAEHSVLTKPMGKMGSKRTVVAGATGSKVYPWTTKRLLKIGQKQVTHSFLVIPECPAPLLGRDLLTKLKAQIQFSTEGPQVTWEDRPAMCLVLNLEEEYRLHEKPVPPSIDPSWLQLFPMVWAEKAGMGLANQVPPVVVELKSDASPVAVRQYPMSKEAREGIRPHIQRFLDLGILVPCQSPWNTPLLPVKKPGTNDYRPVQDLREVNKRVQDIHPTVPNPYNLLSSLPPSHTWYSVLDLKDAFFCLKLHPNSQPLFAFEWRDPEKGNTGQLTWTRLPQGFKNSPTLFNEALHRDLASFRALNPQVVMLQYVDDLLVAAPTYRDCKEGTRRLLQELSKLGYRVSAKKAQLCREEVTYLGYLLKGGKRWLTPARKATVMKIPTPTTPRQVREFLGTAGFCRLWIPGFASLAAPLYPLTRPKVPFTWTEAHQEAFGRIKEALLSAPALALPDLTKPFALYVDEKEGVARGVLTQTLGPWRRPVAYLSKKLDPVASGWPTCLKAIAAVALLLKDADKLTLGQNVLVIAPHNLESIVRQPPDRWMTNARMTHYQSLLLNERVSFAPPAILNPATLLPVESDDTPIHICSEILAEETGTRPDLRDQPLPGVPAWYTDGSSFIMDGRRQAGAAIVDNKRTVWASNLPEGTSAQKAELIALTQALRLAEGKSINIYTDSRYAFATAHVHGAIYKQRGWLTSAGKDIKNKEEILALLEAIHLPKRVAIIHCPGHQRGTDPVATGNRKADEAAKQAAQSTRILTETTKNAGKRTADGSEFEKRTADGSEFESPKKKAKVE

SEQ ID NO: 7085 - protein, 2096 aa, synthetic construct
MPAAKRVKLDGGDKKYSIGLDIGTNSVGWAVITDEYKVPSKKFKVLGNTDRHSIKKNLIGALLFDSGETAEATRLKRTARRRYTRRKNRICYLQEIFSNEMAKVDDSFFHRLEESFLVEEDKKHERHPIFGNIVDEVAYHEKYPTIYHLRKKLVDSTDKADLRLIYLALAHMIKFRGHFLIEGDLNPDNSDVDKLFIQLVQTYNQLFEENPINASGVDAKAILSARLSKSRRLENLIAQLPGEKKNGLFGNLIALSLGLTPNFKSNFDLAEDAKLQLSKDTYDDDLDNLLAQIGDQYADLFLAAKNLSDAILLSDILRVNTEITKAPLSASMIKRYDEHHQDLTLLKALVRQQLPEKYKEIFFDQSKNGYAGYIDGGASQEEFYKFIKPILEKMDGTEELLVKLNREDLLRKQRTFDNGSIPHQIHLGELHAILRRQEDFYPFLKDNREKIEKILTFRIPYYVGPLARGNSRFAWMTRKSEETITPWNFEEVVDKGASAQSFIERMTNFDKNLPNEKVLPKHSLLYEYFTVYNELTKVKYVTEGMRKPAFLSGEQKKAIVDLLFKTNRKVTVKQLKEDYFKKIECFDSVEISGVEDRFNASLGTYHDLLKIIKDKDFLDNEENEDILEDIVLTLTLFEDREMIEERLKTYAHLFDDKVMKQLKRRRYTGWGRLSRKLINGIRDKQSGKTILDFLKSDGFANRNFMQLIHDDSLTFKEDIQKAQVSGQGDSLHEHIANLAGSPAIKKGILQTVKVVDELVKVMGRHKPENIVIEMARENQTTQKGQKNSRERMKRIEEGIKELGSQILKEHPVENTQLQNEKLYLYYLQNGRDMYVDQELDINRLSDYDVDHIVPQSFLKDDSIDNKVLTRSDKARGKSDNVPSEEVVKKMKNYWRQLLNAKLITQRKFDNLTKAERGGLSELDKAGFIKRQLVETRQITKHVAQILDSRMNTKYDENDKLIREVKVITLKSKLVSDFRKDFQFYKVREINNYHHAHDAYLNAVVGTALIKKYPKLESEFVYGDYKVYDVRKMIAKSEQEIGKATAKYFFYSNIMNFFKTEITLANGEIRKRPLIETNGETGEIVWDKGRDFATVRKVLSMPQVNIVKKTEVQTGGFSKESILPKRNSDKLIARKKDWDPKKYGGFDSPTVAYSVLVVAKVEKGKSKKLKSVKELLGITIMERSSFEKNPIDFLEAKGYKEVKKDLIIKLPKYSLFELENGRKRMLASAGELQKGNELALPSKYVNFLYLASHYEKLKGSPEDNEQKQLFVEQHKHYLDEIIEQISEFSKRVILADANLDKVLSAYNKHRDKPIREQAENIIHLFTLTNLGAPAAFKYFDTTIDRKRYTSTKEVLDATLIHQSITGLYETRIDLSQLGGDGGGSSEAAAKGGSGGTLNLEDEYRLYETSAEPEVSPGSTWLSDFPQAWAETGGMGLAVRQAPLIIPLKATSTPVSIKQYPMSQEAKLGIKPHIQRLLDQGILVPCQSPWNTPLLPVKKPGTNDYRPVQDLREVNKRVEDIHPTVPNPYNLLSGLPPSHRWYTVLDLKDAFFCLRLHPTSQPLFAFEWRDPGMGISGQLTWTRLPQGFKNSPTLFNEALHRDLADFRIQHPDLILLQYVDDILLAATSELDCQQGTRALLLTLGNLGYRASAKKAQLCQKQVKYLGYLLKEGQRWLTEARKETVMGQPTPKTPRQLREFLGTAGFCRLWIPGFAEMAAPLYPLTKPGTLFNWGPDQQKAYQEIKQALLTAPALGLPDLTKPFELFVDEKQGYAKGVLTQKLGPWRRPVAYLSKKLDPVAAGWPPCLRMVAAIAVLRKDAGKLTMGQPLVILAPHAVEALVKQPPDRWLSNARMTHYQAMLLDTDRVQFGPVVALNPATLLPLPEEGAPHDCLEILAETHGTRPDLTDQPIPDADHTWYTDGSSFLQEGQRKAGAAVTTETEVIWARALPAGTSAQRAELIALTQALKMAEGKRLNVYTDSRYAFATAHIHGEIYRRRGWLTSEGREIKNKSEILALLKALFLPKRLSIIHCLGHQKGDSAEARGNRLADQAAREAAIKTPPDTSTLLAGKRTADGSEFEKRTADGSEFESPKKKAKVE

SEQ ID NO: 7086 - protein, 2096 aa, synthetic construct
MPAAKRVKLDGGDKKYSIGLDIGTNSVGWAVITDEYKVPSKKFKVLGNTDRHSIKKNLIGALLFDSGETAEATRLKRTARRRYTRRKNRICYLQEIFSNEMAKVDDSFFHRLEESFLVEEDKKHERHPIFGNIVDEVAYHEKYPTIYHLRKKLVDSTDKADLRLIYLALAHMIKFRGHFLIEGDLNPDNSDVDKLFIQLVQTYNQLFEENPINASGVDAKAILSARLSKSRRLENLIAQLPGEKKNGLFGNLIALSLGLTPNFKSNFDLAEDAKLQLSKDTYDDDLDNLLAQIGDQYADLFLAAKNLSDAILLSDILRVNTEITKAPLSASMIKRYDEHHQDLTLLKALVRQQLPEKYKEIFFDQSKNGYAGYIDGGASQEEFYKFIKPILEKMDGTEELLVKLNREDLLRKQRTFDNGSIPHQIHLGELHAILRRQEDFYPFLKDNREKIEKILTFRIPYYVGPLARGNSRFAWMTRKSEETITPWNFEEVVDKGASAQSFIERMTNFDKNLPNEKVLPKHSLLYEYFTVYNELTKVKYVTEGMRKPAFLSGEQKKAIVDLLFKTNRKVTVKQLKEDYFKKIECFDSVEISGVEDRFNASLGTYHDLLKIIKDKDFLDNEENEDILEDIVLTLTLFEDREMIEERLKTYAHLFDDKVMKQLKRRRYTGWGRLSRKLINGIRDKQSGKTILDFLKSDGFANRNFMQLIHDDSLTFKEDIQKAQVSGQGDSLHEHIANLAGSPAIKKGILQTVKVVDELVKVMGRHKPENIVIEMARENQTTQKGQKNSRERMKRIEEGIKELGSQILKEHPVENTQLQNEKLYLYYLQNGRDMYVDQELDINRLSDYDVDHIVPQSFLKDDSIDNKVLTRSDKARGKSDNVPSEEVVKKMKNYWRQLLNAKLITQRKFDNLTKAERGGLSELDKAGFIKRQLVETRQITKHVAQILDSRMNTKYDENDKLIREVKVITLKSKLVSDFRKDFQFYKVREINNYHHAHDAYLNAVVGTALIKKYPKLESEFVYGDYKVYDVRKMIAKSEQEIGKATAKYFFYSNIMNFFKTEITLANGEIRKRPLIETNGETGEIVWDKGRDFATVRKVLSMPQVNIVKKTEVQTGGFSKESILPKRNSDKLIARKKDWDPKKYGGFDSPTVAYSVLVVAKVEKGKSKKLKSVKELLGITIMERSSFEKNPIDFLEAKGYKEVKKDLIIKLPKYSLFELENGRKRMLASAGELQKGNELALPSKYVNFLYLASHYEKLKGSPEDNEQKQLFVEQHKHYLDEIIEQISEFSKRVILADANLDKVLSAYNKHRDKPIREQAENIIHLFTLTNLGAPAAFKYFDTTIDRKRYTSTKEVLDATLIHQSITGLYETRIDLSQLGGDGGGSSEAAAKGGSGGTLGIEDEYRLHETSTEPDVSLGSTWLSDFPQAWAETGGMGLAVRQAPLIIPLKATSTPVSIQQYPMSHEARLGIKPHIQRLLDQGILVPCQSPWNTPLLPVKKPGTNDYRPVQDLREVNKRVEDIHPTVPNPYNLLSGLPPSHQWYTVLDLKDAFFCLRLHPTSQPLFAFEWRDPGMGISGQLTWTRLPQGFKNSPTLFNEALHRDLADFRIQHPDLILLQYVDDILLAATSELDCQQGTRALLQTLGDLGYRASAKKAQICQKQVKYLGYLLREGQRWLTEARKETVMGQPVPKTPRQLREFLGTAGFCRLWIPGFAEMAAPLYPLTKPGTLFSWGPDQQKAYQEIKQALLTAPALGLPDLTKPFELFVDEKQGYAKGVLTQKLGPWRRPVAYLSKKLDPVAAGWPPCLRMVAAIAVLTKDAGKLTMGQPLVILAPHAVEALVKQPPDRWLSNARMTHYQAMLLDTDRVQFGPVVALNPATLLPLPEEGAPHDCLEILAETHGTRPDLTDQPIPDADHTWYTDGSSFLQEGQRKAGAAVTTETEVIWAGALPAGTSAQRAELIALTQALKMAEGKRLNVYTDSRYAFATAHIHGEIYRRRGWLTSEGREIKNKSEILALLKALFLPKRLSIIHCLGHQKGDSAEARGNRLADQAAREAAIKTPPDTSTLLAGKRTADGSEFEKRTADGSEFESPKKKAKVE

SEQ ID NO: 7087 - protein, 2096 aa, synthetic construct
MPAAKRVKLDGGDKKYSIGLDIGTNSVGWAVITDEYKVPSKKFKVLGNTDRHSIKKNLIGALLFDSGETAEATRLKRTARRRYTRRKNRICYLQEIFSNEMAKVDDSFFHRLEESFLVEEDKKHERHPIFGNIVDEVAYHEKYPTIYHLRKKLVDSTDKADLRLIYLALAHMIKFRGHFLIEGDLNPDNSDVDKLFIQLVQTYNQLFEENPINASGVDAKAILSARLSKSRRLENLIAQLPGEKKNGLFGNLIALSLGLTPNFKSNFDLAEDAKLQLSKDTYDDDLDNLLAQIGDQYADLFLAAKNLSDAILLSDILRVNTEITKAPLSASMIKRYDEHHQDLTLLKALVRQQLPEKYKEIFFDQSKNGYAGYIDGGASQEEFYKFIKPILEKMDGTEELLVKLNREDLLRKQRTFDNGSIPHQIHLGELHAILRRQEDFYPFLKDNREKIEKILTFRIPYYVGPLARGNSRFAWMTRKSEETITPWNFEEVVDKGASAQSFIERMTNFDKNLPNEKVLPKHSLLYEYFTVYNELTKVKYVTEGMRKPAFLSGEQKKAIVDLLFKTNRKVTVKQLKEDYFKKIECFDSVEISGVEDRFNASLGTYHDLLKIIKDKDFLDNEENEDILEDIVLTLTLFEDREMIEERLKTYAHLFDDKVMKQLKRRRYTGWGRLSRKLINGIRDKQSGKTILDFLKSDGFANRNFMQLIHDDSLTFKEDIQKAQVSGQGDSLHEHIANLAGSPAIKKGILQTVKVVDELVKVMGRHKPENIVIEMARENQTTQKGQKNSRERMKRIEEGIKELGSQILKEHPVENTQLQNEKLYLYYLQNGRDMYVDQELDINRLSDYDVDHIVPQSFLKDDSIDNKVLTRSDKARGKSDNVPSEEVVKKMKNYWRQLLNAKLITQRKFDNLTKAERGGLSELDKAGFIKRQLVETRQITKHVAQILDSRMNTKYDENDKLIREVKVITLKSKLVSDFRKDFQFYKVREINNYHHAHDAYLNAVVGTALIKKYPKLESEFVYGDYKVYDVRKMIAKSEQEIGKATAKYFFYSNIMNFFKTEITLANGEIRKRPLIETNGETGEIVWDKGRDFATVRKVLSMPQVNIVKKTEVQTGGFSKESILPKRNSDKLIARKKDWDPKKYGGFDSPTVAYSVLVVAKVEKGKSKKLKSVKELLGITIMERSSFEKNPIDFLEAKGYKEVKKDLIIKLPKYSLFELENGRKRMLASAGELQKGNELALPSKYVNFLYLASHYEKLKGSPEDNEQKQLFVEQHKHYLDEIIEQISEFSKRVILADANLDKVLSAYNKHRDKPIREQAENIIHLFTLTNLGAPAAFKYFDTTIDRKRYTSTKEVLDATLIHQSITGLYETRIDLSQLGGDGGGSSEAAAKGGSGGTLNIEDEYRLHETSKGPDVPLGSTWLSDFPQAWAETGGMGLAVRQAPLIIPLKATSTPVSIKQYPMSQEARLGIKPHIQRLLDQGILVPCQSPWNTPLLPVKKPGTNDYRPVQDLREVNKRVEDIHPTVPNPYNLLSGLPPSHQWYTVLDLKDAFFCLRLHPTSQSLFAFEWRDPEMGISGQLTWTRLPQGFKNSPTLFNEALHRDLADFRIQHPDLILLQYVDDLLLAATSELDCQQGTRALLQTLGDLGYRASAKKAQICQKQVKYLGYLLKEGQRWLTEARKETVMGQPTPKTPRQLREFLGTAGFCRLWIPGFAEMAAPLYPLTKPGTLFEWGPDQQKAYQEIKQALLTAPALGLPDLTKPFELFVDEKQGYAKGVLTQKLGPWRRPVAYLSKKLDPVAAGWPPCLRMVAAIAVLTKDAGKLTMGQPLVILAPHAVEALVKQPPDRWLSNARMTHYQALLLDTDRVQFGPIVALNPATLLPLPEEGLQHDCLDILAEAHGTRPDLTDQPLPDADHTWYTDGSSFLQEGQRKAGAAVTTETEVVWAKALPAGTSAQRAELIALTQALKMAEGKKLNVYTDSRYAFATAHIHGEIYRRRGWLTSEGKEIKNKDEILALLKALFLPKRLSIIHCPGHQKGNRAEARGNRMADQAAREVATRETPETSTLLAGKRTADGSEFEKRTADGSEFESPKKKAKVE

SEQ ID NO: 7088 - protein, 2096 aa, synthetic construct
MPAAKRVKLDGGDKKYSIGLDIGTNSVGWAVITDEYKVPSKKFKVLGNTDRHSIKKNLIGALLFDSGETAEATRLKRTARRRYTRRKNRICYLQEIFSNEMAKVDDSFFHRLEESFLVEEDKKHERHPIFGNIVDEVAYHEKYPTIYHLRKKLVDSTDKADLRLIYLALAHMIKFRGHFLIEGDLNPDNSDVDKLFIQLVQTYNQLFEENPINASGVDAKAILSARLSKSRRLENLIAQLPGEKKNGLFGNLIALSLGLTPNFKSNFDLAEDAKLQLSKDTYDDDLDNLLAQIGDQYADLFLAAKNLSDAILLSDILRVNTEITKAPLSASMIKRYDEHHQDLTLLKALVRQQLPEKYKEIFFDQSKNGYAGYIDGGASQEEFYKFIKPILEKMDGTEELLVKLNREDLLRKQRTFDNGSIPHQIHLGELHAILRRQEDFYPFLKDNREKIEKILTFRIPYYVGPLARGNSRFAWMTRKSEETITPWNFEEVVDKGASAQSFIERMTNFDKNLPNEKVLPKHSLLYEYFTVYNELTKVKYVTEGMRKPAFLSGEQKKAIVDLLFKTNRKVTVKQLKEDYFKKIECFDSVEISGVEDRFNASLGTYHDLLKIIKDKDFLDNEENEDILEDIVLTLTLFEDREMIEERLKTYAHLFDDKVMKQLKRRRYTGWGRLSRKLINGIRDKQSGKTILDFLKSDGFANRNFMQLIHDDSLTFKEDIQKAQVSGQGDSLHEHIANLAGSPAIKKGILQTVKVVDELVKVMGRHKPENIVIEMARENQTTQKGQKNSRERMKRIEEGIKELGSQILKEHPVENTQLQNEKLYLYYLQNGRDMYVDQELDINRLSDYDVDHIVPQSFLKDDSIDNKVLTRSDKARGKSDNVPSEEVVKKMKNYWRQLLNAKLITQRKFDNLTKAERGGLSELDKAGFIKRQLVETRQITKHVAQILDSRMNTKYDENDKLIREVKVITLKSKLVSDFRKDFQFYKVREINNYHHAHDAYLNAVVGTALIKKYPKLESEFVYGDYKVYDVRKMIAKSEQEIGKATAKYFFYSNIMNFFKTEITLANGEIRKRPLIETNGETGEIVWDKGRDFATVRKVLSMPQVNIVKKTEVQTGGFSKESILPKRNSDKLIARKKDWDPKKYGGFDSPTVAYSVLVVAKVEKGKSKKLKSVKELLGITIMERSSFEKNPIDFLEAKGYKEVKKDLIIKLPKYSLFELENGRKRMLASAGELQKGNELALPSKYVNFLYLASHYEKLKGSPEDNEQKQLFVEQHKHYLDEIIEQISEFSKRVILADANLDKVLSAYNKHRDKPIREQAENIIHLFTLTNLGAPAAFKYFDTTIDRKRYTSTKEVLDATLIHQSITGLYETRIDLSQLGGDGGGSSEAAAKGGSGGTLNIEDEHRLHETSKEPDVSLGSTWLSDFPQAWAETGGMGLAVRQAPLIIPLKATSTPVSIKQYPMSQEARLGIKPHIQRLLDQGILVPCQSPWNTPLLPVKKPGTNDYRPVQDLREVNKRVEDIHPTVPNPYNLLSGLPPSHQWYTVLDLKDAFFCLRLHPTSQPLFAFEWRDPEMGISGQLTWTRLPQGFKNSPTLFDEALHRDLADFRIQHPDLILLQYVDDLLLAATSELDCQQGTRALLQTLGNLGYRASAKKAQICQKQVKYLGYLLKEGQRWLTEARKETVMGQPTPKTPRQLREFLGTAGFCRLWIPGFAEMAAPLYPLTKTGTLFNWGPDQQKAYQEIKQALLTAPALGLPDLTKPFELFVDEKQGYAKGVLTQKLGPWRRPVAYLSKKLDPVAAGWPPCLRMVAAIAVLTKDAGKLTMGQPLVILAPHAVEALVKQPPDRWLSNARMTHYQALLLDTDRVQFGPVVALNPATLLPLPEEGLQHNCLDILAEAHGTRPDLTDQPLPDADHTWYTDGSSLLQEGQRKAGAAVTTETEVIWAKALPAGTSAQRAELIALTQALKMAEGKKLNVYTDSRYAFATAHIHGEIYRRRGLLTSEGKEIKNKDEILALLKALFLPKRLSIIHCPGHQKGHSAEARGNRMADQAARKAAITETPDTSTLLAGKRTADGSEFEKRTADGSEFESPKKKAKVE

SEQ ID NO: 7089 - protein, 2096 aa, synthetic construct
MPAAKRVKLDGGDKKYSIGLDIGTNSVGWAVITDEYKVPSKKFKVLGNTDRHSIKKNLIGALLFDSGETAEATRLKRTARRRYTRRKNRICYLQEIFSNEMAKVDDSFFHRLEESFLVEEDKKHERHPIFGNIVDEVAYHEKYPTIYHLRKKLVDSTDKADLRLIYLALAHMIKFRGHFLIEGDLNPDNSDVDKLFIQLVQTYNQLFEENPINASGVDAKAILSARLSKSRRLENLIAQLPGEKKNGLFGNLIALSLGLTPNFKSNFDLAEDAKLQLSKDTYDDDLDNLLAQIGDQYADLFLAAKNLSDAILLSDILRVNTEITKAPLSASMIKRYDEHHQDLTLLKALVRQQLPEKYKEIFFDQSKNGYAGYIDGGASQEEFYKFIKPILEKMDGTEELLVKLNREDLLRKQRTFDNGSIPHQIHLGELHAILRRQEDFYPFLKDNREKIEKILTFRIPYYVGPLARGNSRFAWMTRKSEETITPWNFEEVVDKGASAQSFIERMTNFDKNLPNEKVLPKHSLLYEYFTVYNELTKVKYVTEGMRKPAFLSGEQKKAIVDLLFKTNRKVTVKQLKEDYFKKIECFDSVEISGVEDRFNASLGTYHDLLKIIKDKDFLDNEENEDILEDIVLTLTLFEDREMIEERLKTYAHLFDDKVMKQLKRRRYTGWGRLSRKLINGIRDKQSGKTILDFLKSDGFANRNFMQLIHDDSLTFKEDIQKAQVSGQGDSLHEHIANLAGSPAIKKGILQTVKVVDELVKVMGRHKPENIVIEMARENQTTQKGQKNSRERMKRIEEGIKELGSQILKEHPVENTQLQNEKLYLYYLQNGRDMYVDQELDINRLSDYDVDHIVPQSFLKDDSIDNKVLTRSDKARGKSDNVPSEEVVKKMKNYWRQLLNAKLITQRKFDNLTKAERGGLSELDKAGFIKRQLVETRQITKHVAQILDSRMNTKYDENDKLIREVKVITLKSKLVSDFRKDFQFYKVREINNYHHAHDAYLNAVVGTALIKKYPKLESEFVYGDYKVYDVRKMIAKSEQEIGKATAKYFFYSNIMNFFKTEITLANGEIRKRPLIETNGETGEIVWDKGRDFATVRKVLSMPQVNIVKKTEVQTGGFSKESILPKRNSDKLIARKKDWDPKKYGGFDSPTVAYSVLVVAKVEKGKSKKLKSVKELLGITIMERSSFEKNPIDFLEAKGYKEVKKDLIIKLPKYSLFELENGRKRMLASAGELQKGNELALPSKYVNFLYLASHYEKLKGSPEDNEQKQLFVEQHKHYLDEIIEQISEFSKRVILADANLDKVLSAYNKHRDKPIREQAENIIHLFTLTNLGAPAAFKYFDTTIDRKRYTSTKEVLDATLIHQSITGLYETRIDLSQLGGDGGGSSEAAAKGGSGGTLNIEDEHRLHETSKEPDVSLGSTWLSDFPQAWAETGGMGLAVRQAPLIIPLKATSTPVSIKQYPMSQEARLGIKPHIQRLLDQGILVPCQSPWNTPLLPVKKPGTNDYRPVQDLREVNKRVEDIHPTVPNPYNLLSGLPPSHQWYTVLDLKDAFFCLRLHPTSQPLFAFEWRDPEMGISGQLTWTRLPQGFKNSPTLFNEALHRDLADFRIQHPDLILLQYVDDLLLAATSELDCQQGTRALLQTLGNLGYRASAKKAQICQKQVKYLGYLLKEGQRWLTEARKETVMGQPTPKTPRQLREFLGTAGFCRLWIPGFAEMAAPLYPLTKPGTLFNWGPDQQKAYQEIKQALLTAPALGLPDLTKPFELFVDEKQGYAKGVLTQKLGPWRRPVAYLSKKLDPVAAGWPPCLRMVAAIAVLTKDAGKLTMGQPLVILAPHAVEALVKQPPDRWLSNARMTHYQALLLDTDRVQFGPVVALNPATLLPLPEEGLQHNCLDILAEAHGTRPDLTDQPLPDADHTWYTDGSSLLQEGQRKAGAAVTTETEVIWAKALPAGTSAQRAELIALTQALKMAEGKKLNVYTDSRYAFATAHIHGEIYRRRGWLTSEGKEIKNKDEILALLKALFLPKRLSIIHCPGHQKGHSAEARGNRMADQAARKAAITETPDTSTLLAGKRTADGSEFEKRTADGSEFESPKKKAKVE

SEQ ID NO: 7090 - protein, 2087 aa, synthetic construct
MPAAKRVKLDGGDKKYSIGLDIGTNSVGWAVITDEYKVPSKKFKVLGNTDRHSIKKNLIGALLFDSGETAEATRLKRTARRRYTRRKNRICYLQEIFSNEMAKVDDSFFHRLEESFLVEEDKKHERHPIFGNIVDEVAYHEKYPTIYHLRKKLVDSTDKADLRLIYLALAHMIKFRGHFLIEGDLNPDNSDVDKLFIQLVQTYNQLFEENPINASGVDAKAILSARLSKSRRLENLIAQLPGEKKNGLFGNLIALSLGLTPNFKSNFDLAEDAKLQLSKDTYDDDLDNLLAQIGDQYADLFLAAKNLSDAILLSDILRVNTEITKAPLSASMIKRYDEHHQDLTLLKALVRQQLPEKYKEIFFDQSKNGYAGYIDGGASQEEFYKFIKPILEKMDGTEELLVKLNREDLLRKQRTFDNGSIPHQIHLGELHAILRRQEDFYPFLKDNREKIEKILTFRIPYYVGPLARGNSRFAWMTRKSEETITPWNFEEVVDKGASAQSFIERMTNFDKNLPNEKVLPKHSLLYEYFTVYNELTKVKYVTEGMRKPAFLSGEQKKAIVDLLFKTNRKVTVKQLKEDYFKKIECFDSVEISGVEDRFNASLGTYHDLLKIIKDKDFLDNEENEDILEDIVLTLTLFEDREMIEERLKTYAHLFDDKVMKQLKRRRYTGWGRLSRKLINGIRDKQSGKTILDFLKSDGFANRNFMQLIHDDSLTFKEDIQKAQVSGQGDSLHEHIANLAGSPAIKKGILQTVKVVDELVKVMGRHKPENIVIEMARENQTTQKGQKNSRERMKRIEEGIKELGSQILKEHPVENTQLQNEKLYLYYLQNGRDMYVDQELDINRLSDYDVDHIVPQSFLKDDSIDNKVLTRSDKARGKSDNVPSEEVVKKMKNYWRQLLNAKLITQRKFDNLTKAERGGLSELDKAGFIKRQLVETRQITKHVAQILDSRMNTKYDENDKLIREVKVITLKSKLVSDFRKDFQFYKVREINNYHHAHDAYLNAVVGTALIKKYPKLESEFVYGDYKVYDVRKMIAKSEQEIGKATAKYFFYSNIMNFFKTEITLANGEIRKRPLIETNGETGEIVWDKGRDFATVRKVLSMPQVNIVKKTEVQTGGFSKESILPKRNSDKLIARKKDWDPKKYGGFDSPTVAYSVLVVAKVEKGKSKKLKSVKELLGITIMERSSFEKNPIDFLEAKGYKEVKKDLIIKLPKYSLFELENGRKRMLASAGELQKGNELALPSKYVNFLYLASHYEKLKGSPEDNEQKQLFVEQHKHYLDEIIEQISEFSKRVILADANLDKVLSAYNKHRDKPIREQAENIIHLFTLTNLGAPAAFKYFDTTIDRKRYTSTKEVLDATLIHQSITGLYETRIDLSQLGGDGGGSSEAAAKGGSGGVPWLMKKPLQLTVLVPLHEYQERLLQQTALPKEQKELLQKLFLKYDALWQHWENQVGHRRIKPHNIATGTLAPRPQKQYPINPKAKPSIQIVIDDLLKQGVLIQQNSTMNTPVYPVPKPDGKWRMVLDYREVNKTIPLIAAQNQHSAGILSSIYRGKYKTTLDLTNGFWAHPITPESYWLTAFTWQGKQYCWTRLPQGFLNSPALFTADVVDLLKEIPNVQAYVDDIYISHDDPQEHLEQLEKIFSILLNAGYVVSLKKSEIAQREVEFLGFNITKEGRGLTDTFKQKLLNITPPKDLKQLQSILGLLNFARNFIPNYSELVKPLYTIVANANGKFISWTEDNSNQLQHIISVLNQADNLEERNPETRLIIKVNSSPSAGYIRYYNEGSKRPIMYVNYIFSKAEAKFTQTEKLLTTMHKGLIKAMDLAMGQEILVYSPIVSMTKIQRTPLPERKALPVRWITWMTYLEDPRIQFHYDKSLPELQQIPNVTEDVIAKTKHPSEFAMVFYTDGSAIKHPDVNKSHSAGMGIAQVQFIPEYKIVHQWSIPLGDHTAQLAEIAAVEFACKKALKISGPVLIVTDSFYVAESANKELPYWKSNGFLNNKKKPLRHVSKWKSIAECLQLKPDIIIMHEKGHQQPMTTLHTEGNNLADKLATQGSYVVHAGKRTADGSEFEKRTADGSEFESPKKKAKVE

SEQ ID NO: 7091 - protein, 2087 aa, synthetic construct
MPAAKRVKLDGGDKKYSIGLDIGTNSVGWAVITDEYKVPSKKFKVLGNTDRHSIKKNLIGALLFDSGETAEATRLKRTARRRYTRRKNRICYLQEIFSNEMAKVDDSFFHRLEESFLVEEDKKHERHPIFGNIVDEVAYHEKYPTIYHLRKKLVDSTDKADLRLIYLALAHMIKFRGHFLIEGDLNPDNSDVDKLFIQLVQTYNQLFEENPINASGVDAKAILSARLSKSRRLENLIAQLPGEKKNGLFGNLIALSLGLTPNFKSNFDLAEDAKLQLSKDTYDDDLDNLLAQIGDQYADLFLAAKNLSDAILLSDILRVNTEITKAPLSASMIKRYDEHHQDLTLLKALVRQQLPEKYKEIFFDQSKNGYAGYIDGGASQEEFYKFIKPILEKMDGTEELLVKLNREDLLRKQRTFDNGSIPHQIHLGELHAILRRQEDFYPFLKDNREKIEKILTFRIPYYVGPLARGNSRFAWMTRKSEETITPWNFEEVVDKGASAQSFIERMTNFDKNLPNEKVLPKHSLLYEYFTVYNELTKVKYVTEGMRKPAFLSGEQKKAIVDLLFKTNRKVTVKQLKEDYFKKIECFDSVEISGVEDRFNASLGTYHDLLKIIKDKDFLDNEENEDILEDIVLTLTLFEDREMIEERLKTYAHLFDDKVMKQLKRRRYTGWGRLSRKLINGIRDKQSGKTILDFLKSDGFANRNFMQLIHDDSLTFKEDIQKAQVSGQGDSLHEHIANLAGSPAIKKGILQTVKVVDELVKVMGRHKPENIVIEMARENQTTQKGQKNSRERMKRIEEGIKELGSQILKEHPVENTQLQNEKLYLYYLQNGRDMYVDQELDINRLSDYDVDHIVPQSFLKDDSIDNKVLTRSDKARGKSDNVPSEEVVKKMKNYWRQLLNAKLITQRKFDNLTKAERGGLSELDKAGFIKRQLVETRQITKHVAQILDSRMNTKYDENDKLIREVKVITLKSKLVSDFRKDFQFYKVREINNYHHAHDAYLNAVVGTALIKKYPKLESEFVYGDYKVYDVRKMIAKSEQEIGKATAKYFFYSNIMNFFKTEITLANGEIRKRPLIETNGETGEIVWDKGRDFATVRKVLSMPQVNIVKKTEVQTGGFSKESILPKRNSDKLIARKKDWDPKKYGGFDSPTVAYSVLVVAKVEKGKSKKLKSVKELLGITIMERSSFEKNPIDFLEAKGYKEVKKDLIIKLPKYSLFELENGRKRMLASAGELQKGNELALPSKYVNFLYLASHYEKLKGSPEDNEQKQLFVEQHKHYLDEIIEQISEFSKRVILADANLDKVLSAYNKHRDKPIREQAENIIHLFTLTNLGAPAAFKYFDTTIDRKRYTSTKEVLDATLIHQSITGLYETRIDLSQLGGDGGGSSEAAAKGGSGGIPWLMKKPLQLTTLVPLQEYEERLLKQTMLTGSYKEKLQSLFLKYDALWQHWENQVGHRRIKPHHIATGTVNPRPQKQYPINPKAKASIQTVINDLLKQGVLIQQNSIMNTPVYPVPKPDGKWRMVLDYREVNKTIPLIAAQNQHSAGILSSIFRGKYKTTLDLSNGFWAHSITPESYWLTAFTWLGQQYCWTRLPQGFLNSPALFNADVVDLLKEVPNVQVYVDDIYISHDDPREHLEQLEKVFSLLLNAGYVVSLKKSEIAQHEVEFLGFNITKEGRGLTETFKQKLLNITPPRDLKQLQSILGLLNFARNFIPNFSELVKPLYNIIATAPGKYITWTTDNSQQLQNIISMLNSAENLEERNPEVRLIMKVNTSPSAGYIRFYNEFAKRPIMYLNYVYTKAEVKFTNTEKLLTTIHKGLIKALDLGMGQEILVYSPIVSMTKIQKTPLPERKALPIRWITWMSYLEDPRIQFHYDKTLPELQQVPTVTDDIIAKIKHPSEFSMVFYTDGSAIKHPNVNKSHNAGMGIAQVQFKPEFTVINTWSIPLGDHTAQLAEVAAVEFACKKALKIDGPVLIVTDSFYVAESVNKELPYWQSNGFFNNKKKPLKHVSKWKSIADCIQLKPDIIIIHEKGHQPTASTFHTEGNNLADKLATQGSYVVNAGKRTADGSEFEKRTADGSEFESPKKKAKVE

SEQ ID NO: 7092 - protein, 2087 aa, synthetic construct
MPAAKRVKLDGGDKKYSIGLDIGTNSVGWAVITDEYKVPSKKFKVLGNTDRHSIKKNLIGALLFDSGETAEATRLKRTARRRYTRRKNRICYLQEIFSNEMAKVDDSFFHRLEESFLVEEDKKHERHPIFGNIVDEVAYHEKYPTIYHLRKKLVDSTDKADLRLIYLALAHMIKFRGHFLIEGDLNPDNSDVDKLFIQLVQTYNQLFEENPINASGVDAKAILSARLSKSRRLENLIAQLPGEKKNGLFGNLIALSLGLTPNFKSNFDLAEDAKLQLSKDTYDDDLDNLLAQIGDQYADLFLAAKNLSDAILLSDILRVNTEITKAPLSASMIKRYDEHHQDLTLLKALVRQQLPEKYKEIFFDQSKNGYAGYIDGGASQEEFYKFIKPILEKMDGTEELLVKLNREDLLRKQRTFDNGSIPHQIHLGELHAILRRQEDFYPFLKDNREKIEKILTFRIPYYVGPLARGNSRFAWMTRKSEETITPWNFEEVVDKGASAQSFIERMTNFDKNLPNEKVLPKHSLLYEYFTVYNELTKVKYVTEGMRKPAFLSGEQKKAIVDLLFKTNRKVTVKQLKEDYFKKIECFDSVEISGVEDRFNASLGTYHDLLKIIKDKDFLDNEENEDILEDIVLTLTLFEDREMIEERLKTYAHLFDDKVMKQLKRRRYTGWGRLSRKLINGIRDKQSGKTILDFLKSDGFANRNFMQLIHDDSLTFKEDIQKAQVSGQGDSLHEHIANLAGSPAIKKGILQTVKVVDELVKVMGRHKPENIVIEMARENQTTQKGQKNSRERMKRIEEGIKELGSQILKEHPVENTQLQNEKLYLYYLQNGRDMYVDQELDINRLSDYDVDHIVPQSFLKDDSIDNKVLTRSDKARGKSDNVPSEEVVKKMKNYWRQLLNAKLITQRKFDNLTKAERGGLSELDKAGFIKRQLVETRQITKHVAQILDSRMNTKYDENDKLIREVKVITLKSKLVSDFRKDFQFYKVREINNYHHAHDAYLNAVVGTALIKKYPKLESEFVYGDYKVYDVRKMIAKSEQEIGKATAKYFFYSNIMNFFKTEITLANGEIRKRPLIETNGETGEIVWDKGRDFATVRKVLSMPQVNIVKKTEVQTGGFSKESILPKRNSDKLIARKKDWDPKKYGGFDSPTVAYSVLVVAKVEKGKSKKLKSVKELLGITIMERSSFEKNPIDFLEAKGYKEVKKDLIIKLPKYSLFELENGRKRMLASAGELQKGNELALPSKYVNFLYLASHYEKLKGSPEDNEQKQLFVEQHKHYLDEIIEQISEFSKRVILADANLDKVLSAYNKHRDKPIREQAENIIHLFTLTNLGAPAAFKYFDTTIDRKRYTSTKEVLDATLIHQSITGLYETRIDLSQLGGDGGGSSEAAAKGGSGGIPWLMKKPLQLTTLVPLQEYEERLLKQTMLTGSYKEKLQSLFLKYDALWQHWENQVGHRRIKPHHIATGTVNPRPQKQYPINPKAKASIQTVINDLLKQGVLIQQNSIMNTPVYPVPKPDGKWRMVLDYREVNKTIPLIAAQNQHSAGILSSIFRGKYKTTLDLSNGFWAHSITPESYWLTAFTWLGQQYCWTRLPQGFLNSPALFNADVVDLLKEVPNVQVYVDDIYISHDDPREHLEQLEKVFSLLLNAGYVVSLKKSEIAQHEVEFLGFNITKEGRGLTETFKQKLLNITPPRDLKQLQSILGKLNFARNFIPNFSELVKPLYNIIATAPGKYITWTTDNSQQLQNIISMLNSAENLEERNPEVRLIMKVNTSPSAGYIRFYNEFAKRPIMYLNYVYTKAEVKFTNTEKLLTTIHKGLIKALDLGMGQEILVYSPIVSMTKIQKTPLPERKALPIRWITWMSYLEDPRIQFHYDKTLPELQQVPTVTDDIIAKIKHPSEFSMVFYTDGSAIKHPNVNKSHNAGMGIAQVQFKPEFTVINTWSIPLGDHTAQLAEVAAVEFACKKALKIDGPVLIVTDSFYVAESVNKELPYWQSNGFFNNKKKPLKHVSKWKSIADCIQLKPDIIIIHEKGHQPTASTFHTEGNNLADKLATQGSYVVNAGKRTADGSEFEKRTADGSEFESPKKKAKVE

SEQ ID NO: 7093 - protein, 2094 aa, synthetic construct
MPAAKRVKLDGGDKKYSIGLDIGTNSVGWAVITDEYKVPSKKFKVLGNTDRHSIKKNLIGALLFDSGETAEATRLKRTARRRYTRRKNRICYLQEIFSNEMAKVDDSFFHRLEESFLVEEDKKHERHPIFGNIVDEVAYHEKYPTIYHLRKKLVDSTDKADLRLIYLALAHMIKFRGHFLIEGDLNPDNSDVDKLFIQLVQTYNQLFEENPINASGVDAKAILSARLSKSRRLENLIAQLPGEKKNGLFGNLIALSLGLTPNFKSNFDLAEDAKLQLSKDTYDDDLDNLLAQIGDQYADLFLAAKNLSDAILLSDILRVNTEITKAPLSASMIKRYDEHHQDLTLLKALVRQQLPEKYKEIFFDQSKNGYAGYIDGGASQEEFYKFIKPILEKMDGTEELLVKLNREDLLRKQRTFDNGSIPHQIHLGELHAILRRQEDFYPFLKDNREKIEKILTFRIPYYVGPLARGNSRFAWMTRKSEETITPWNFEEVVDKGASAQSFIERMTNFDKNLPNEKVLPKHSLLYEYFTVYNELTKVKYVTEGMRKPAFLSGEQKKAIVDLLFKTNRKVTVKQLKEDYFKKIECFDSVEISGVEDRFNASLGTYHDLLKIIKDKDFLDNEENEDILEDIVLTLTLFEDREMIEERLKTYAHLFDDKVMKQLKRRRYTGWGRLSRKLINGIRDKQSGKTILDFLKSDGFANRNFMQLIHDDSLTFKEDIQKAQVSGQGDSLHEHIANLAGSPAIKKGILQTVKVVDELVKVMGRHKPENIVIEMARENQTTQKGQKNSRERMKRIEEGIKELGSQILKEHPVENTQLQNEKLYLYYLQNGRDMYVDQELDINRLSDYDVDHIVPQSFLKDDSIDNKVLTRSDKARGKSDNVPSEEVVKKMKNYWRQLLNAKLITQRKFDNLTKAERGGLSELDKAGFIKRQLVETRQITKHVAQILDSRMNTKYDENDKLIREVKVITLKSKLVSDFRKDFQFYKVREINNYHHAHDAYLNAVVGTALIKKYPKLESEFVYGDYKVYDVRKMIAKSEQEIGKATAKYFFYSNIMNFFKTEITLANGEIRKRPLIETNGETGEIVWDKGRDFATVRKVLSMPQVNIVKKTEVQTGGFSKESILPKRNSDKLIARKKDWDPKKYGGFDSPTVAYSVLVVAKVEKGKSKKLKSVKELLGITIMERSSFEKNPIDFLEAKGYKEVKKDLIIKLPKYSLFELENGRKRMLASAGELQKGNELALPSKYVNFLYLASHYEKLKGSPEDNEQKQLFVEQHKHYLDEIIEQISEFSKRVILADANLDKVLSAYNKHRDKPIREQAENIIHLFTLTNLGAPAAFKYFDTTIDRKRYTSTKEVLDATLIHQSITGLYETRIDLSQLGGDGGGSSEAAAKGGSGGVLNLEEEYRLHEKPVPSSIDPSWLQLFPTVWAERAGMGLANQVPPVVVELRSGASPVAVRQYPMSKEAREGIRPHIQRFLDLGVLVPCQSPWNTPLLPVKKPGTNDYRPVQDLREINKRVQDIHPTVPNPYNLLSSLPPSHTWYSVLDLKDAFFCLKLHPNSQPLFAFEWRDPEKGNTGQLTWTRLPQGFKNSPTLFNEALHRDLAPFRALNPQVVLLQYVDDLLVAAPTYRDCKEGTQKLLQELSKLGYRVSAKKAQLCQKEVTYLGYLLKEGKRWLTPARKATVMKIPPPTTPRQVREFLGKAGFCRLFIPGFASLAAPLYPLTKPSIPFIWTEEHQKAFDRIKEALLSAPALALPDLTKPFTLYVDERAGVARGVLTQTLGPWRRPVAYLSKKLDPVASGWPTCLKAVAAVALLLKDADKLTLGQNVTVIASHSLESIVRQPPDRWMTNARMTHYQSLLLNERVSFAPPAVLNPATLLPVESEATPVHRCSEILAEETGTRRDLKDQPLPGVPAWYTDGSSFIAEGKRRAGAAIVDGKRTVWASSLPEGTSAQKAELVALTQALRLAEGKDINIYTDSRYAFATAHIHGAIYKQRGWLTSAGKDIKNKEEILALLEAIHLPKRVAIIHCPGHQKGNDPVATGNRRADEAAKQAALSTRVLAETTKPAGKRTADGSEFEKRTADGSEFESPKKKAKVE

SEQ ID NO: 7094 - protein, 2096 aa, synthetic construct
MPAAKRVKLDGGDKKYSIGLDIGTNSVGWAVITDEYKVPSKKFKVLGNTDRHSIKKNLIGALLFDSGETAEATRLKRTARRRYTRRKNRICYLQEIFSNEMAKVDDSFFHRLEESFLVEEDKKHERHPIFGNIVDEVAYHEKYPTIYHLRKKLVDSTDKADLRLIYLALAHMIKFRGHFLIEGDLNPDNSDVDKLFIQLVQTYNQLFEENPINASGVDAKAILSARLSKSRRLENLIAQLPGEKKNGLFGNLIALSLGLTPNFKSNFDLAEDAKLQLSKDTYDDDLDNLLAQIGDQYADLFLAAKNLSDAILLSDILRVNTEITKAPLSASMIKRYDEHHQDLTLLKALVRQQLPEKYKEIFFDQSKNGYAGYIDGGASQEEFYKFIKPILEKMDGTEELLVKLNREDLLRKQRTFDNGSIPHQIHLGELHAILRRQEDFYPFLKDNREKIEKILTFRIPYYVGPLARGNSRFAWMTRKSEETITPWNFEEVVDKGASAQSFIERMTNFDKNLPNEKVLPKHSLLYEYFTVYNELTKVKYVTEGMRKPAFLSGEQKKAIVDLLFKTNRKVTVKQLKEDYFKKIECFDSVEISGVEDRFNASLGTYHDLLKIIKDKDFLDNEENEDILEDIVLTLTLFEDREMIEERLKTYAHLFDDKVMKQLKRRRYTGWGRLSRKLINGIRDKQSGKTILDFLKSDGFANRNFMQLIHDDSLTFKEDIQKAQVSGQGDSLHEHIANLAGSPAIKKGILQTVKVVDELVKVMGRHKPENIVIEMARENQTTQKGQKNSRERMKRIEEGIKELGSQILKEHPVENTQLQNEKLYLYYLQNGRDMYVDQELDINRLSDYDVDHIVPQSFLKDDSIDNKVLTRSDKARGKSDNVPSEEVVKKMKNYWRQLLNAKLITQRKFDNLTKAERGGLSELDKAGFIKRQLVETRQITKHVAQILDSRMNTKYDENDKLIREVKVITLKSKLVSDFRKDFQFYKVREINNYHHAHDAYLNAVVGTALIKKYPKLESEFVYGDYKVYDVRKMIAKSEQEIGKATAKYFFYSNIMNFFKTEITLANGEIRKRPLIETNGETGEIVWDKGRDFATVRKVLSMPQVNIVKKTEVQTGGFSKESILPKRNSDKLIARKKDWDPKKYGGFDSPTVAYSVLVVAKVEKGKSKKLKSVKELLGITIMERSSFEKNPIDFLEAKGYKEVKKDLIIKLPKYSLFELENGRKRMLASAGELQKGNELALPSKYVNFLYLASHYEKLKGSPEDNEQKQLFVEQHKHYLDEIIEQISEFSKRVILADANLDKVLSAYNKHRDKPIREQAENIIHLFTLTNLGAPAAFKYFDTTIDRKRYTSTKEVLDATLIHQSITGLYETRIDLSQLGGDGGGSSEAAAKGGSGGTLNIEDEYRLHETSKEPDVPLGSTWLSDFPQAWAETGGMGLAVRQAPLIIPLKATSTPVSIKQYPMSQEARLGIKPHIQRLLDQGILVPCQSPWNTPLLPVKKPGTNDYRPVQDLREVNKRVEDIHPTVPNPYNLLSGLPPSHQWYTVLDLKDAFFCLRLHPTSQPLFAFEWRDPEMGISGQLTWTRLPQGFKNSPTLFDEALHRDLADFRIQHPDLILLQYVDDLLLAATSEQDCQRGTRALLQTLGNLGYRASAKKAQICQKQVKYLGYLLKEGQRWLTEARKETVMGQPTPKTPRQLREFLGTAGFCRLWIPGFAEMAAPLYPLTKTGTLFNWGPDQQKAYQEIKQALLTAPALGLPDLTKPFELFVDEKQGYAKGVLTQKLGPWRRPVAYLSKKLDPVAAGWPPCLRMVAAIAVLTKDAGKLTMGQPLVILAPHAVEALVKQPPDRWLSNARMTHYQAMLLDTDRVQFGPVVALNPATLLPLPEKEAPHDCLEILAETHGTRPDLTDQPIPDADYTWYTDGSSFLQEGQRRAGAAVTTETEVIWARALPAGTSAQRAELIALTQALKMAEGKKLNVYTDSRYAFATAHVHGEIYRRRGLLTSEGREIKNKNEILALLKALFLPKRLSIIHCPGHQKGNSAEARGNRMADQAAREAAMKAVLETSTLLAGKRTADGSEFEKRTADGSEFESPKKKAKVE

SEQ ID NO: 7095 - protein, 2096 aa, synthetic construct
MPAAKRVKLDGGDKKYSIGLDIGTNSVGWAVITDEYKVPSKKFKVLGNTDRHSIKKNLIGALLFDSGETAEATRLKRTARRRYTRRKNRICYLQEIFSNEMAKVDDSFFHRLEESFLVEEDKKHERHPIFGNIVDEVAYHEKYPTIYHLRKKLVDSTDKADLRLIYLALAHMIKFRGHFLIEGDLNPDNSDVDKLFIQLVQTYNQLFEENPINASGVDAKAILSARLSKSRRLENLIAQLPGEKKNGLFGNLIALSLGLTPNFKSNFDLAEDAKLQLSKDTYDDDLDNLLAQIGDQYADLFLAAKNLSDAILLSDILRVNTEITKAPLSASMIKRYDEHHQDLTLLKALVRQQLPEKYKEIFFDQSKNGYAGYIDGGASQEEFYKFIKPILEKMDGTEELLVKLNREDLLRKQRTFDNGSIPHQIHLGELHAILRRQEDFYPFLKDNREKIEKILTFRIPYYVGPLARGNSRFAWMTRKSEETITPWNFEEVVDKGASAQSFIERMTNFDKNLPNEKVLPKHSLLYEYFTVYNELTKVKYVTEGMRKPAFLSGEQKKAIVDLLFKTNRKVTVKQLKEDYFKKIECFDSVEISGVEDRFNASLGTYHDLLKIIKDKDFLDNEENEDILEDIVLTLTLFEDREMIEERLKTYAHLFDDKVMKQLKRRRYTGWGRLSRKLINGIRDKQSGKTILDFLKSDGFANRNFMQLIHDDSLTFKEDIQKAQVSGQGDSLHEHIANLAGSPAIKKGILQTVKVVDELVKVMGRHKPENIVIEMARENQTTQKGQKNSRERMKRIEEGIKELGSQILKEHPVENTQLQNEKLYLYYLQNGRDMYVDQELDINRLSDYDVDHIVPQSFLKDDSIDNKVLTRSDKARGKSDNVPSEEVVKKMKNYWRQLLNAKLITQRKFDNLTKAERGGLSELDKAGFIKRQLVETRQITKHVAQILDSRMNTKYDENDKLIREVKVITLKSKLVSDFRKDFQFYKVREINNYHHAHDAYLNAVVGTALIKKYPKLESEFVYGDYKVYDVRKMIAKSEQEIGKATAKYFFYSNIMNFFKTEITLANGEIRKRPLIETNGETGEIVWDKGRDFATVRKVLSMPQVNIVKKTEVQTGGFSKESILPKRNSDKLIARKKDWDPKKYGGFDSPTVAYSVLVVAKVEKGKSKKLKSVKELLGITIMERSSFEKNPIDFLEAKGYKEVKKDLIIKLPKYSLFELENGRKRMLASAGELQKGNELALPSKYVNFLYLASHYEKLKGSPEDNEQKQLFVEQHKHYLDEIIEQISEFSKRVILADANLDKVLSAYNKHRDKPIREQAENIIHLFTLTNLGAPAAFKYFDTTIDRKRYTSTKEVLDATLIHQSITGLYETRIDLSQLGGDGGGSSEAAAKGGSGGTLNIEDEYRLHETSKEPDVPLGSTWLSDFPQAWAETGGMGLAVRQAPLIIPLKATSTPVSIKQYPMSQEARLGIKPHIQRLLDQGILVPCQSPWNTPLLPVKKPGTNDYRPVQDLREVNKRVEDIHPTVPNPYNLLSGLPPSHQWYTVLDLKDAFFCLRLHPTSQPLFAFEWRDPEMGISGQLTWTRLPQGFKNSPTLFNEALHRDLADFRIQHPDLILLQYVDDLLLAATSEQDCQRGTRALLQTLGNLGYRASAKKAQICQKQVKYLGYLLKEGQRWLTEARKETVMGQPTPKTPRQLREFLGTAGFCRLWIPGFAEMAAPLYPLTKPGTLFNWGPDQQKAYQEIKQALLTAPALGLPDLTKPFELFVDEKQGYAKGVLTQKLGPWRRPVAYLSKKLDPVAAGWPPCLRMVAAIAVLTKDAGKLTMGQPLVILAPHAVEALVKQPPDRWLSNARMTHYQAMLLDTDRVQFGPVVALNPATLLPLPEKEAPHDCLEILAETHGTRPDLTDQPIPDADYTWYTDGSSFLQEGQRRAGAAVTTETEVIWARALPAGTSAQRAELIALTQALKMAEGKKLNVYTDSRYAFATAHVHGEIYRRRGWLTSEGREIKNKNEILALLKALFLPKRLSIIHCPGHQKGNSAEARGNRMADQAAREAAMKAVLETSTLLAGKRTADGSEFEKRTADGSEFESPKKKAKVE

SEQ ID NO: 7096 - protein, 2098 aa, synthetic construct
MPAAKRVKLDGGDKKYSIGLDIGTNSVGWAVITDEYKVPSKKFKVLGNTDRHSIKKNLIGALLFDSGETAEATRLKRTARRRYTRRKNRICYLQEIFSNEMAKVDDSFFHRLEESFLVEEDKKHERHPIFGNIVDEVAYHEKYPTIYHLRKKLVDSTDKADLRLIYLALAHMIKFRGHFLIEGDLNPDNSDVDKLFIQLVQTYNQLFEENPINASGVDAKAILSARLSKSRRLENLIAQLPGEKKNGLFGNLIALSLGLTPNFKSNFDLAEDAKLQLSKDTYDDDLDNLLAQIGDQYADLFLAAKNLSDAILLSDILRVNTEITKAPLSASMIKRYDEHHQDLTLLKALVRQQLPEKYKEIFFDQSKNGYAGYIDGGASQEEFYKFIKPILEKMDGTEELLVKLNREDLLRKQRTFDNGSIPHQIHLGELHAILRRQEDFYPFLKDNREKIEKILTFRIPYYVGPLARGNSRFAWMTRKSEETITPWNFEEVVDKGASAQSFIERMTNFDKNLPNEKVLPKHSLLYEYFTVYNELTKVKYVTEGMRKPAFLSGEQKKAIVDLLFKTNRKVTVKQLKEDYFKKIECFDSVEISGVEDRFNASLGTYHDLLKIIKDKDFLDNEENEDILEDIVLTLTLFEDREMIEERLKTYAHLFDDKVMKQLKRRRYTGWGRLSRKLINGIRDKQSGKTILDFLKSDGFANRNFMQLIHDDSLTFKEDIQKAQVSGQGDSLHEHIANLAGSPAIKKGILQTVKVVDELVKVMGRHKPENIVIEMARENQTTQKGQKNSRERMKRIEEGIKELGSQILKEHPVENTQLQNEKLYLYYLQNGRDMYVDQELDINRLSDYDVDHIVPQSFLKDDSIDNKVLTRSDKARGKSDNVPSEEVVKKMKNYWRQLLNAKLITQRKFDNLTKAERGGLSELDKAGFIKRQLVETRQITKHVAQILDSRMNTKYDENDKLIREVKVITLKSKLVSDFRKDFQFYKVREINNYHHAHDAYLNAVVGTALIKKYPKLESEFVYGDYKVYDVRKMIAKSEQEIGKATAKYFFYSNIMNFFKTEITLANGEIRKRPLIETNGETGEIVWDKGRDFATVRKVLSMPQVNIVKKTEVQTGGFSKESILPKRNSDKLIARKKDWDPKKYGGFDSPTVAYSVLVVAKVEKGKSKKLKSVKELLGITIMERSSFEKNPIDFLEAKGYKEVKKDLIIKLPKYSLFELENGRKRMLASAGELQKGNELALPSKYVNFLYLASHYEKLKGSPEDNEQKQLFVEQHKHYLDEIIEQISEFSKRVILADANLDKVLSAYNKHRDKPIREQAENIIHLFTLTNLGAPAAFKYFDTTIDRKRYTSTKEVLDATLIHQSITGLYETRIDLSQLGGDGGEAAAKGGSGSSGGTAPLEEEYRLFLEAPIQNVTLLEQWKREIPKVWAEINPPGLASTQAPIHVQLLSTALPVRVRQYPITLEAKRSLRETIRKFRAAGILRPVHSPWNTPLLPVRKSGTSEYRMVQDLREVNKRVETIHPTVPNPYTLLSLLPPDRIWYSVLDLKDAFFCIPLAPESQLIFAFEWADAEEGESGQLTWTRLPQGFKNSPTLFNEALNRDLQGFRLDHPSVSLLQYVDDLLIAADTQAACLSATRDLLMTLAELGYRVSGKKAQLCQEEVTYLGFKIHKGSRSLSNSRTQAILQIPVPKTKRQVREFLGTIGYCRLWIPGFAELAQPLYAATRPGNDPLVWGEKEEEAFQSLKLALTQPPALALPSLDKPFQLFVEETSGAAKGVLTQALGPWKRPVAYLSKRLDPVAAGWPRCLRAIAAAALLTREASKLTFGQDIEITSSHNLESLLRSPPDKWLTNARITQYQVLLLDPPRVRFKQTAALNPATLLPETDDTLPIHHCLDTLDSLTSTRPDLTDQPLAQAEATLFTDGSSYIRDGKRYAGAAVVTLDSVIWAEPLPIGTSAQKAELIALTKALEWSKDKSVNIYTDSRYAFATLHVHGMIYRERGWLTAGGKAIKNAPEILALLTAVWLPKRVAVMHCKGHQKDDAPTSTGNRRADEVAREVAIRPLSTQATISAGKRTADGSEFEKRTADGSEFESPKKKAKVE

SEQ ID NO: 7097 - protein, 2102 aa, synthetic construct
MPAAKRVKLDGGDKKYSIGLDIGTNSVGWAVITDEYKVPSKKFKVLGNTDRHSIKKNLIGALLFDSGETAEATRLKRTARRRYTRRKNRICYLQEIFSNEMAKVDDSFFHRLEESFLVEEDKKHERHPIFGNIVDEVAYHEKYPTIYHLRKKLVDSTDKADLRLIYLALAHMIKFRGHFLIEGDLNPDNSDVDKLFIQLVQTYNQLFEENPINASGVDAKAILSARLSKSRRLENLIAQLPGEKKNGLFGNLIALSLGLTPNFKSNFDLAEDAKLQLSKDTYDDDLDNLLAQIGDQYADLFLAAKNLSDAILLSDILRVNTEITKAPLSASMIKRYDEHHQDLTLLKALVRQQLPEKYKEIFFDQSKNGYAGYIDGGASQEEFYKFIKPILEKMDGTEELLVKLNREDLLRKQRTFDNGSIPHQIHLGELHAILRRQEDFYPFLKDNREKIEKILTFRIPYYVGPLARGNSRFAWMTRKSEETITPWNFEEVVDKGASAQSFIERMTNFDKNLPNEKVLPKHSLLYEYFTVYNELTKVKYVTEGMRKPAFLSGEQKKAIVDLLFKTNRKVTVKQLKEDYFKKIECFDSVEISGVEDRFNASLGTYHDLLKIIKDKDFLDNEENEDILEDIVLTLTLFEDREMIEERLKTYAHLFDDKVMKQLKRRRYTGWGRLSRKLINGIRDKQSGKTILDFLKSDGFANRNFMQLIHDDSLTFKEDIQKAQVSGQGDSLHEHIANLAGSPAIKKGILQTVKVVDELVKVMGRHKPENIVIEMARENQTTQKGQKNSRERMKRIEEGIKELGSQILKEHPVENTQLQNEKLYLYYLQNGRDMYVDQELDINRLSDYDVDHIVPQSFLKDDSIDNKVLTRSDKARGKSDNVPSEEVVKKMKNYWRQLLNAKLITQRKFDNLTKAERGGLSELDKAGFIKRQLVETRQITKHVAQILDSRMNTKYDENDKLIREVKVITLKSKLVSDFRKDFQFYKVREINNYHHAHDAYLNAVVGTALIKKYPKLESEFVYGDYKVYDVRKMIAKSEQEIGKATAKYFFYSNIMNFFKTEITLANGEIRKRPLIETNGETGEIVWDKGRDFATVRKVLSMPQVNIVKKTEVQTGGFSKESILPKRNSDKLIARKKDWDPKKYGGFDSPTVAYSVLVVAKVEKGKSKKLKSVKELLGITIMERSSFEKNPIDFLEAKGYKEVKKDLIIKLPKYSLFELENGRKRMLASAGELQKGNELALPSKYVNFLYLASHYEKLKGSPEDNEQKQLFVEQHKHYLDEIIEQISEFSKRVILADANLDKVLSAYNKHRDKPIREQAENIIHLFTLTNLGAPAAFKYFDTTIDRKRYTSTKEVLDATLIHQSITGLYETRIDLSQLGGDGGEAAAKGGSGSSGGTVSLQDEHRLFDIPVTTSLPDVWLQDFPQAWAETGGLGRAKCQAPIIIDLKPTAVPVSIKQYPMSLEAHMGIRQHIIKFLELGVLRPCRSPWNTPLLPVKKPGTQDYRPVQDLREINKRTVDIHPTVPNPYNLLSTLKPDYSWYTVLDLKDAFFCLPLAPQSQELFAFEWKDPERGISGQLTWTRLPQGFKNSPTLFNEALHRDLTDFRTQHPEVTLLQYVDDLLLAAPTKKACTQGTRHLLQELGEKGYRASAKKAQICQTKVTYLGYILSEGKRWLTPGRIETVARIPPPRNPREVREFLGTAGFCRLWIPGFAELAAPLYALTKPSTPFTWQTEHQLAFEALKKALLSAPALGLPDTSKPFTLFLDERQGIAKGVLTQKLGPWKRPVAYLSKKLDPVAAGWPPCLRIMAATAMLVKDSAKLTLGQPLTVITPHTLEAIVRQPPDRWITNARLTHYQALLLDTDRVQFGPPVTLNPATLLPVPENQPSPHDCRQVLAETHGTREDLKDQELPDADHTWYTDGSSYLDSGTRRAGAAVVDGHNTIWAQSLPPGTSAQKAELIALTKALELSKGKKANIYTDSRYAFATAHTHGSIYERRGWLTSEGKEIKNKAEIIALLKALFLPQEVAIIHCPGHQKGQDPVAVGNRQADRVARQAAMAEVLTLATEPDNTSHITAGKRTADGSEFEKRTADGSEFESPKKKAKVE

SEQ ID NO: 7098 - protein, 2218 aa, synthetic construct
MPAAKRVKLDGGDKKYSIGLDIGTNSVGWAVITDEYKVPSKKFKVLGNTDRHSIKKNLIGALLFDSGETAEATRLKRTARRRYTRRKNRICYLQEIFSNEMAKVDDSFFHRLEESFLVEEDKKHERHPIFGNIVDEVAYHEKYPTIYHLRKKLVDSTDKADLRLIYLALAHMIKFRGHFLIEGDLNPDNSDVDKLFIQLVQTYNQLFEENPINASGVDAKAILSARLSKSRRLENLIAQLPGEKKNGLFGNLIALSLGLTPNFKSNFDLAEDAKLQLSKDTYDDDLDNLLAQIGDQYADLFLAAKNLSDAILLSDILRVNTEITKAPLSASMIKRYDEHHQDLTLLKALVRQQLPEKYKEIFFDQSKNGYAGYIDGGASQEEFYKFIKPILEKMDGTEELLVKLNREDLLRKQRTFDNGSIPHQIHLGELHAILRRQEDFYPFLKDNREKIEKILTFRIPYYVGPLARGNSRFAWMTRKSEETITPWNFEEVVDKGASAQSFIERMTNFDKNLPNEKVLPKHSLLYEYFTVYNELTKVKYVTEGMRKPAFLSGEQKKAIVDLLFKTNRKVTVKQLKEDYFKKIECFDSVEISGVEDRFNASLGTYHDLLKIIKDKDFLDNEENEDILEDIVLTLTLFEDREMIEERLKTYAHLFDDKVMKQLKRRRYTGWGRLSRKLINGIRDKQSGKTILDFLKSDGFANRNFMQLIHDDSLTFKEDIQKAQVSGQGDSLHEHIANLAGSPAIKKGILQTVKVVDELVKVMGRHKPENIVIEMARENQTTQKGQKNSRERMKRIEEGIKELGSQILKEHPVENTQLQNEKLYLYYLQNGRDMYVDQELDINRLSDYDVDHIVPQSFLKDDSIDNKVLTRSDKARGKSDNVPSEEVVKKMKNYWRQLLNAKLITQRKFDNLTKAERGGLSELDKAGFIKRQLVETRQITKHVAQILDSRMNTKYDENDKLIREVKVITLKSKLVSDFRKDFQFYKVREINNYHHAHDAYLNAVVGTALIKKYPKLESEFVYGDYKVYDVRKMIAKSEQEIGKATAKYFFYSNIMNFFKTEITLANGEIRKRPLIETNGETGEIVWDKGRDFATVRKVLSMPQVNIVKKTEVQTGGFSKESILPKRNSDKLIARKKDWDPKKYGGFDSPTVAYSVLVVAKVEKGKSKKLKSVKELLGITIMERSSFEKNPIDFLEAKGYKEVKKDLIIKLPKYSLFELENGRKRMLASAGELQKGNELALPSKYVNFLYLASHYEKLKGSPEDNEQKQLFVEQHKHYLDEIIEQISEFSKRVILADANLDKVLSAYNKHRDKPIREQAENIIHLFTLTNLGAPAAFKYFDTTIDRKRYTSTKEVLDATLIHQSITGLYETRIDLSQLGGDGGEAAAKGGSGSSGGTLGDQGSRGSDPLPEPRVTLTVEGIPTEFLVNTGAEHSVLTKPMGKMGSKRTVVAGATGSKVYPWTTKRLLKIGQKQVTHSFLVIPECPAPLLGRDLLTKLKAQIQFSTEGPQVTWEDRPAMCLVLNLEEEYRLHEKPVPPSIDPSWLQLFPMVWAEKAGMGLANQVPPVVVELKSDASPVAVRQYPMSKEAREGIRPHIQRFLDLGILVPCQSPWNTPLLPVKKPGTNDYRPVQDLREVNKRVQDIHPTVPNPYNLLSSLPPSHTWYSVLDLKDAFFCLKLHPNSQPLFAFEWRDPEKGNTGQLTWTRLPQGFKNSPTLFNEALHRDLASFRALNPQVVMLQYVDDLLVAAPTYRDCKEGTRRLLQELSKLGYRVSAKKAQLCREEVTYLGYLLKGGKRWLTPARKATVMKIPTPTTPRQVREFLGTAGFCRLWIPGFASLAAPLYPLTRPKVPFTWTEAHQEAFGRIKEALLSAPALALPDLTKPFALYVDEKEGVARGVLTQTLGPWRRPVAYLSKKLDPVASGWPTCLKAIAAVALLLKDADKLTLGQNVLVIAPHNLESIVRQPPDRWMTNARMTHYQSLLLNERVSFAPPAILNPATLLPVESDDTPIHICSEILAEETGTRPDLRDQPLPGVPAWYTDGSSFIMDGRRQAGAAIVDNKRTVWASNLPEGTSAQKAELIALTQALRLAEGKSINIYTDSRYAFATAHVHGAIYKQRGWLTSAGKDIKNKEEILALLEAIHLPKRVAIIHCPGHQRGTDPVATGNRKADEAAKQAAQSTRILTETTKNAGKRTADGSEFEKRTADGSEFESPKKKAKVE

SEQ ID NO: 7099 - protein, 2218 aa, synthetic construct
MPAAKRVKLDGGDKKYSIGLDIGTNSVGWAVITDEYKVPSKKFKVLGNTDRHSIKKNLIGALLFDSGETAEATRLKRTARRRYTRRKNRICYLQEIFSNEMAKVDDSFFHRLEESFLVEEDKKHERHPIFGNIVDEVAYHEKYPTIYHLRKKLVDSTDKADLRLIYLALAHMIKFRGHFLIEGDLNPDNSDVDKLFIQLVQTYNQLFEENPINASGVDAKAILSARLSKSRRLENLIAQLPGEKKNGLFGNLIALSLGLTPNFKSNFDLAEDAKLQLSKDTYDDDLDNLLAQIGDQYADLFLAAKNLSDAILLSDILRVNTEITKAPLSASMIKRYDEHHQDLTLLKALVRQQLPEKYKEIFFDQSKNGYAGYIDGGASQEEFYKFIKPILEKMDGTEELLVKLNREDLLRKQRTFDNGSIPHQIHLGELHAILRRQEDFYPFLKDNREKIEKILTFRIPYYVGPLARGNSRFAWMTRKSEETITPWNFEEVVDKGASAQSFIERMTNFDKNLPNEKVLPKHSLLYEYFTVYNELTKVKYVTEGMRKPAFLSGEQKKAIVDLLFKTNRKVTVKQLKEDYFKKIECFDSVEISGVEDRFNASLGTYHDLLKIIKDKDFLDNEENEDILEDIVLTLTLFEDREMIEERLKTYAHLFDDKVMKQLKRRRYTGWGRLSRKLINGIRDKQSGKTILDFLKSDGFANRNFMQLIHDDSLTFKEDIQKAQVSGQGDSLHEHIANLAGSPAIKKGILQTVKVVDELVKVMGRHKPENIVIEMARENQTTQKGQKNSRERMKRIEEGIKELGSQILKEHPVENTQLQNEKLYLYYLQNGRDMYVDQELDINRLSDYDVDHIVPQSFLKDDSIDNKVLTRSDKARGKSDNVPSEEVVKKMKNYWRQLLNAKLITQRKFDNLTKAERGGLSELDKAGFIKRQLVETRQITKHVAQILDSRMNTKYDENDKLIREVKVITLKSKLVSDFRKDFQFYKVREINNYHHAHDAYLNAVVGTALIKKYPKLESEFVYGDYKVYDVRKMIAKSEQEIGKATAKYFFYSNIMNFFKTEITLANGEIRKRPLIETNGETGEIVWDKGRDFATVRKVLSMPQVNIVKKTEVQTGGFSKESILPKRNSDKLIARKKDWDPKKYGGFDSPTVAYSVLVVAKVEKGKSKKLKSVKELLGITIMERSSFEKNPIDFLEAKGYKEVKKDLIIKLPKYSLFELENGRKRMLASAGELQKGNELALPSKYVNFLYLASHYEKLKGSPEDNEQKQLFVEQHKHYLDEIIEQISEFSKRVILADANLDKVLSAYNKHRDKPIREQAENIIHLFTLTNLGAPAAFKYFDTTIDRKRYTSTKEVLDATLIHQSITGLYETRIDLSQLGGDGGEAAAKGGSGSSGGTLGDQGSRGSDPLPEPRVTLTVEGIPTEFLVNTGAEHSVLTKPMGKMGSKRTVVAGATGSKVYPWTTKRLLKIGQKQVTHSFLVIPECPAPLLGRDLLTKLKAQIQFSTEGPQVTWEDRPAMCLVLNLEEEYRLHEKPVPPSIDPSWLQLFPMVWAEKAGMGLANQVPPVVVELKSDASPVAVRQYPMSKEAREGIRPHIQRFLDLGILVPCQSPWNTPLLPVKKPGTNDYRPVQDLREVNKRVQDIHPTVPNPYNLLSSLPPSHTWYSVLDLKDAFFCLKLHPNSQPLFAFEWRDPEKGNTGQLTWTRLPQGFKNSPTLFNEALHRDLASFRALNPQVVMLQYVDDLLVAAPTYRDCKEGTRRLLQELSKLGYRVSAKKAQLCREEVTYLGYLLKGGKRWLTPARKATVMKIPTPTTPRQVREFLGKAGFCRLFIPGFASLAAPLYPLTRPKVPFTWTEAHQEAFGRIKEALLSAPALALPDLTKPFALYVDEKEGVARGVLTQTLGPWRRPVAYLSKKLDPVASGWPTCLKAIAAVALLLKDADKLTLGQNVLVIAPHNLESIVRQPPDRWMTNARMTHYQSLLLNERVSFAPPAILNPATLLPVESDDTPIHICSEILAEETGTRPDLRDQPLPGVPAWYTDGSSFIMDGRRQAGAAIVDNKRTVWASNLPEGTSAQKAELIALTQALRLAEGKSINIYTDSRYAFATAHVHGAIYKQRGWLTSAGKDIKNKEEILALLEAIHLPKRVAIIHCPGHQRGTDPVATGNRKADEAAKQAAQSTRILTETTKNAGKRTADGSEFEKRTADGSEFESPKKKAKVE

SEQ ID NO: 7100 - protein, 2096 aa, synthetic construct
MPAAKRVKLDGGDKKYSIGLDIGTNSVGWAVITDEYKVPSKKFKVLGNTDRHSIKKNLIGALLFDSGETAEATRLKRTARRRYTRRKNRICYLQEIFSNEMAKVDDSFFHRLEESFLVEEDKKHERHPIFGNIVDEVAYHEKYPTIYHLRKKLVDSTDKADLRLIYLALAHMIKFRGHFLIEGDLNPDNSDVDKLFIQLVQTYNQLFEENPINASGVDAKAILSARLSKSRRLENLIAQLPGEKKNGLFGNLIALSLGLTPNFKSNFDLAEDAKLQLSKDTYDDDLDNLLAQIGDQYADLFLAAKNLSDAILLSDILRVNTEITKAPLSASMIKRYDEHHQDLTLLKALVRQQLPEKYKEIFFDQSKNGYAGYIDGGASQEEFYKFIKPILEKMDGTEELLVKLNREDLLRKQRTFDNGSIPHQIHLGELHAILRRQEDFYPFLKDNREKIEKILTFRIPYYVGPLARGNSRFAWMTRKSEETITPWNFEEVVDKGASAQSFIERMTNFDKNLPNEKVLPKHSLLYEYFTVYNELTKVKYVTEGMRKPAFLSGEQKKAIVDLLFKTNRKVTVKQLKEDYFKKIECFDSVEISGVEDRFNASLGTYHDLLKIIKDKDFLDNEENEDILEDIVLTLTLFEDREMIEERLKTYAHLFDDKVMKQLKRRRYTGWGRLSRKLINGIRDKQSGKTILDFLKSDGFANRNFMQLIHDDSLTFKEDIQKAQVSGQGDSLHEHIANLAGSPAIKKGILQTVKVVDELVKVMGRHKPENIVIEMARENQTTQKGQKNSRERMKRIEEGIKELGSQILKEHPVENTQLQNEKLYLYYLQNGRDMYVDQELDINRLSDYDVDHIVPQSFLKDDSIDNKVLTRSDKARGKSDNVPSEEVVKKMKNYWRQLLNAKLITQRKFDNLTKAERGGLSELDKAGFIKRQLVETRQITKHVAQILDSRMNTKYDENDKLIREVKVITLKSKLVSDFRKDFQFYKVREINNYHHAHDAYLNAVVGTALIKKYPKLESEFVYGDYKVYDVRKMIAKSEQEIGKATAKYFFYSNIMNFFKTEITLANGEIRKRPLIETNGETGEIVWDKGRDFATVRKVLSMPQVNIVKKTEVQTGGFSKESILPKRNSDKLIARKKDWDPKKYGGFDSPTVAYSVLVVAKVEKGKSKKLKSVKELLGITIMERSSFEKNPIDFLEAKGYKEVKKDLIIKLPKYSLFELENGRKRMLASAGELQKGNELALPSKYVNFLYLASHYEKLKGSPEDNEQKQLFVEQHKHYLDEIIEQISEFSKRVILADANLDKVLSAYNKHRDKPIREQAENIIHLFTLTNLGAPAAFKYFDTTIDRKRYTSTKEVLDATLIHQSITGLYETRIDLSQLGGDGGEAAAKGGSGSSGGTLNLEDEYRLYETSAEPEVSPGSTWLSDFPQAWAETGGMGLAVRQAPLIIPLKATSTPVSIKQYPMSQEAKLGIKPHIQRLLDQGILVPCQSPWNTPLLPVKKPGTNDYRPVQDLREVNKRVEDIHPTVPNPYNLLSGLPPSHRWYTVLDLKDAFFCLRLHPTSQPLFAFEWRDPGMGISGQLTWTRLPQGFKNSPTLFNEALHRDLADFRIQHPDLILLQYVDDILLAATSELDCQQGTRALLLTLGNLGYRASAKKAQLCQKQVKYLGYLLKEGQRWLTEARKETVMGQPTPKTPRQLREFLGKAGFCRLFIPGFAEMAAPLYPLTKPGTLFNWGPDQQKAYQEIKQALLTAPALGLPDLTKPFELFVDEKQGYAKGVLTQKLGPWRRPVAYLSKKLDPVAAGWPPCLRMVAAIAVLRKDAGKLTMGQPLVILAPHAVEALVKQPPDRWLSNARMTHYQAMLLDTDRVQFGPVVALNPATLLPLPEEGAPHDCLEILAETHGTRPDLTDQPIPDADHTWYTDGSSFLQEGQRKAGAAVTTETEVIWARALPAGTSAQRAELIALTQALKMAEGKRLNVYTDSRYAFATAHIHGEIYRRRGWLTSEGREIKNKSEILALLKALFLPKRLSIIHCLGHQKGDSAEARGNRLADQAAREAAIKTPPDTSTLLAGKRTADGSEFEKRTADGSEFESPKKKAKVE

SEQ ID NO: 7101 - protein, 2096 aa, synthetic construct
MPAAKRVKLDGGDKKYSIGLDIGTNSVGWAVITDEYKVPSKKFKVLGNTDRHSIKKNLIGALLFDSGETAEATRLKRTARRRYTRRKNRICYLQEIFSNEMAKVDDSFFHRLEESFLVEEDKKHERHPIFGNIVDEVAYHEKYPTIYHLRKKLVDSTDKADLRLIYLALAHMIKFRGHFLIEGDLNPDNSDVDKLFIQLVQTYNQLFEENPINASGVDAKAILSARLSKSRRLENLIAQLPGEKKNGLFGNLIALSLGLTPNFKSNFDLAEDAKLQLSKDTYDDDLDNLLAQIGDQYADLFLAAKNLSDAILLSDILRVNTEITKAPLSASMIKRYDEHHQDLTLLKALVRQQLPEKYKEIFFDQSKNGYAGYIDGGASQEEFYKFIKPILEKMDGTEELLVKLNREDLLRKQRTFDNGSIPHQIHLGELHAILRRQEDFYPFLKDNREKIEKILTFRIPYYVGPLARGNSRFAWMTRKSEETITPWNFEEVVDKGASAQSFIERMTNFDKNLPNEKVLPKHSLLYEYFTVYNELTKVKYVTEGMRKPAFLSGEQKKAIVDLLFKTNRKVTVKQLKEDYFKKIECFDSVEISGVEDRFNASLGTYHDLLKIIKDKDFLDNEENEDILEDIVLTLTLFEDREMIEERLKTYAHLFDDKVMKQLKRRRYTGWGRLSRKLINGIRDKQSGKTILDFLKSDGFANRNFMQLIHDDSLTFKEDIQKAQVSGQGDSLHEHIANLAGSPAIKKGILQTVKVVDELVKVMGRHKPENIVIEMARENQTTQKGQKNSRERMKRIEEGIKELGSQILKEHPVENTQLQNEKLYLYYLQNGRDMYVDQELDINRLSDYDVDHIVPQSFLKDDSIDNKVLTRSDKARGKSDNVPSEEVVKKMKNYWRQLLNAKLITQRKFDNLTKAERGGLSELDKAGFIKRQLVETRQITKHVAQILDSRMNTKYDENDKLIREVKVITLKSKLVSDFRKDFQFYKVREINNYHHAHDAYLNAVVGTALIKKYPKLESEFVYGDYKVYDVRKMIAKSEQEIGKATAKYFFYSNIMNFFKTEITLANGEIRKRPLIETNGETGEIVWDKGRDFATVRKVLSMPQVNIVKKTEVQTGGFSKESILPKRNSDKLIARKKDWDPKKYGGFDSPTVAYSVLVVAKVEKGKSKKLKSVKELLGITIMERSSFEKNPIDFLEAKGYKEVKKDLIIKLPKYSLFELENGRKRMLASAGELQKGNELALPSKYVNFLYLASHYEKLKGSPEDNEQKQLFVEQHKHYLDEIIEQISEFSKRVILADANLDKVLSAYNKHRDKPIREQAENIIHLFTLTNLGAPAAFKYFDTTIDRKRYTSTKEVLDATLIHQSITGLYETRIDLSQLGGDGGEAAAKGGSGSSGGTLNIEDEYRLHETSKGPDVPLGSTWLSDFPQAWAETGGMGLAVRQAPLIIPLKATSTPVSIKQYPMSQEARLGIKPHIQRLLDQGILVPCQSPWNTPLLPVKKPGTNDYRPVQDLREVNKRVEDIHPTVPNPYNLLSGLPPSHQWYTVLDLKDAFFCLRLHPTSQSLFAFEWRDPEMGISGQLTWTRLPQGFKNSPTLFDEALHRDLADFRIQHPDLILLQYVDDLLLAATSELDCQQGTRALLQTLGDLGYRASAKKAQICQKQVKYLGYLLKEGQRWLTEARKETVMGQPTPKTPRQLREFLGTAGFCRLWIPGFAEMAAPLYPLTKTGTLFEWGPDQQKAYQEIKQALLTAPALGLPDLTKPFELFVDEKQGYAKGVLTQKLGPWRRPVAYLSKKLDPVAAGWPPCLRMVAAIAVLTKDAGKLTMGQPLVILAPHAVEALVKQPPDRWLSNARMTHYQALLLDTDRVQFGPIVALNPATLLPLPEEGLQHDCLDILAEAHGTRPDLTDQPLPDADHTWYTDGSSFLQEGQRKAGAAVTTETEVVWAKALPAGTSAQRAELIALTQALKMAEGKKLNVYTDSRYAFATAHIHGEIYRRRGLLTSEGKEIKNKDEILALLKALFLPKRLSIIHCPGHQKGNRAEARGNRMADQAAREVATRETPETSTLLAGKRTADGSEFEKRTADGSEFESPKKKAKVE

SEQ ID NO: 7102 - protein, 2087 aa, synthetic construct
MPAAKRVKLDGGDKKYSIGLDIGTNSVGWAVITDEYKVPSKKFKVLGNTDRHSIKKNLIGALLFDSGETAEATRLKRTARRRYTRRKNRICYLQEIFSNEMAKVDDSFFHRLEESFLVEEDKKHERHPIFGNIVDEVAYHEKYPTIYHLRKKLVDSTDKADLRLIYLALAHMIKFRGHFLIEGDLNPDNSDVDKLFIQLVQTYNQLFEENPINASGVDAKAILSARLSKSRRLENLIAQLPGEKKNGLFGNLIALSLGLTPNFKSNFDLAEDAKLQLSKDTYDDDLDNLLAQIGDQYADLFLAAKNLSDAILLSDILRVNTEITKAPLSASMIKRYDEHHQDLTLLKALVRQQLPEKYKEIFFDQSKNGYAGYIDGGASQEEFYKFIKPILEKMDGTEELLVKLNREDLLRKQRTFDNGSIPHQIHLGELHAILRRQEDFYPFLKDNREKIEKILTFRIPYYVGPLARGNSRFAWMTRKSEETITPWNFEEVVDKGASAQSFIERMTNFDKNLPNEKVLPKHSLLYEYFTVYNELTKVKYVTEGMRKPAFLSGEQKKAIVDLLFKTNRKVTVKQLKEDYFKKIECFDSVEISGVEDRFNASLGTYHDLLKIIKDKDFLDNEENEDILEDIVLTLTLFEDREMIEERLKTYAHLFDDKVMKQLKRRRYTGWGRLSRKLINGIRDKQSGKTILDFLKSDGFANRNFMQLIHDDSLTFKEDIQKAQVSGQGDSLHEHIANLAGSPAIKKGILQTVKVVDELVKVMGRHKPENIVIEMARENQTTQKGQKNSRERMKRIEEGIKELGSQILKEHPVENTQLQNEKLYLYYLQNGRDMYVDQELDINRLSDYDVDHIVPQSFLKDDSIDNKVLTRSDKARGKSDNVPSEEVVKKMKNYWRQLLNAKLITQRKFDNLTKAERGGLSELDKAGFIKRQLVETRQITKHVAQILDSRMNTKYDENDKLIREVKVITLKSKLVSDFRKDFQFYKVREINNYHHAHDAYLNAVVGTALIKKYPKLESEFVYGDYKVYDVRKMIAKSEQEIGKATAKYFFYSNIMNFFKTEITLANGEIRKRPLIETNGETGEIVWDKGRDFATVRKVLSMPQVNIVKKTEVQTGGFSKESILPKRNSDKLIARKKDWDPKKYGGFDSPTVAYSVLVVAKVEKGKSKKLKSVKELLGITIMERSSFEKNPIDFLEAKGYKEVKKDLIIKLPKYSLFELENGRKRMLASAGELQKGNELALPSKYVNFLYLASHYEKLKGSPEDNEQKQLFVEQHKHYLDEIIEQISEFSKRVILADANLDKVLSAYNKHRDKPIREQAENIIHLFTLTNLGAPAAFKYFDTTIDRKRYTSTKEVLDATLIHQSITGLYETRIDLSQLGGDGGEAAAKGGSGSSGGIPWLMKKPLQLTTLVPLQEYEERLLKQTMLTGSYKEKLQSLFLKYDALWQHWENQVGHRRIKPHHIATGTVNPRPQKQYPINPKAKASIQTVINDLLKQGVLIQQNSIMNTPVYPVPKPDGKWRMVLDYREVNKTIPLIAAQNQHSAGILSSIFRGKYKTTLDLSNGFWAHSITPESYWLTAFTWLGQQYCWTRLPQGFLNSPALFNADVVDLLKEVPNVQVYVDDIYISHDDPREHLEQLEKVFSLLLNAGYVVSLKKSEIAQHEVEFLGFNITKEGRGLTETFKQKLLNITPPRDLKQLQSILGLLNFARNFIPNFSELVKPLYNIIATAPGKYITWTTDNSQQLQNIISMLNSAENLEERNPEVRLIMKVNTSPSAGYIRFYNEFAKRPIMYLNYVYTKAEVKFTNTEKLLTTIHKGLIKALDLGMGQEILVYSPIVSMTKIQKTPLPERKALPIRWITWMSYLEDPRIQFHYDKTLPELQQVPTVTDDIIAKIKHPSEFSMVFYTDGSAIKHPNVNKSHNAGMGIAQVQFKPEFTVINTWSIPLGDHTAQLAEVAAVEFACKKALKIDGPVLIVTDSFYVAESVNKELPYWQSNGFFNNKKKPLKHVSKWKSIADCIQLKPDIIIIHEKGHQPTASTFHTEGNNLADKLATQGSYVVNAGKRTADGSEFEKRTADGSEFESPKKKAKVE

SEQ ID NO: 7103 - protein, 2096 aa, synthetic construct; identical to SEQ ID NO: 4523

SEQ ID NO: 7104 - protein, 2098 aa, synthetic construct
MPAAKRVKLDGGDKKYSIGLDIGTNSVGWAVITDEYKVPSKKFKVLGNTDRHSIKKNLIGALLFDSGETAEATRLKRTARRRYTRRKNRICYLQEIFSNEMAKVDDSFFHRLEESFLVEEDKKHERHPIFGNIVDEVAYHEKYPTIYHLRKKLVDSTDKADLRLIYLALAHMIKFRGHFLIEGDLNPDNSDVDKLFIQLVQTYNQLFEENPINASGVDAKAILSARLSKSRRLENLIAQLPGEKKNGLFGNLIALSLGLTPNFKSNFDLAEDAKLQLSKDTYDDDLDNLLAQIGDQYADLFLAAKNLSDAILLSDILRVNTEITKAPLSASMIKRYDEHHQDLTLLKALVRQQLPEKYKEIFFDQSKNGYAGYIDGGASQEEFYKFIKPILEKMDGTEELLVKLNREDLLRKQRTFDNGSIPHQIHLGELHAILRRQEDFYPFLKDNREKIEKILTFRIPYYVGPLARGNSRFAWMTRKSEETITPWNFEEVVDKGASAQSFIERMTNFDKNLPNEKVLPKHSLLYEYFTVYNELTKVKYVTEGMRKPAFLSGEQKKAIVDLLFKTNRKVTVKQLKEDYFKKIECFDSVEISGVEDRFNASLGTYHDLLKIIKDKDFLDNEENEDILEDIVLTLTLFEDREMIEERLKTYAHLFDDKVMKQLKRRRYTGWGRLSRKLINGIRDKQSGKTILDFLKSDGFANRNFMQLIHDDSLTFKEDIQKAQVSGQGDSLHEHIANLAGSPAIKKGILQTVKVVDELVKVMGRHKPENIVIEMARENQTTQKGQKNSRERMKRIEEGIKELGSQILKEHPVENTQLQNEKLYLYYLQNGRDMYVDQELDINRLSDYDVDHIVPQSFLKDDSIDNKVLTRSDKARGKSDNVPSEEVVKKMKNYWRQLLNAKLITQRKFDNLTKAERGGLSELDKAGFIKRQLVETRQITKHVAQILDSRMNTKYDENDKLIREVKVITLKSKLVSDFRKDFQFYKVREINNYHHAHDAYLNAVVGTALIKKYPKLESEFVYGDYKVYDVRKMIAKSEQEIGKATAKYFFYSNIMNFFKTEITLANGEIRKRPLIETNGETGEIVWDKGRDFATVRKVLSMPQVNIVKKTEVQTGGFSKESILPKRNSDKLIARKKDWDPKKYGGFDSPTVAYSVLVVAKVEKGKSKKLKSVKELLGITIMERSSFEKNPIDFLEAKGYKEVKKDLIIKLPKYSLFELENGRKRMLASAGELQKGNELALPSKYVNFLYLASHYEKLKGSPEDNEQKQLFVEQHKHYLDEIIEQISEFSKRVILADANLDKVLSAYNKHRDKPIREQAENIIHLFTLTNLGAPAAFKYFDTTIDRKRYTSTKEVLDATLIHQSITGLYETRIDLSQLGGDGGEAAAKGSSGGSGGTAPLEEEYRLFLEAPIQNVTLLEQWKREIPKVWAEINPPGLASTQAPIHVQLLSTALPVRVRQYPITLEAKRSLRETIRKFRAAGILRPVHSPWNTPLLPVRKSGTSEYRMVQDLREVNKRVETIHPTVPNPYTLLSLLPPDRIWYSVLDLKDAFFCIPLAPESQLIFAFEWADAEEGESGQLTWTRLPQGFKNSPTLFNEALNRDLQGFRLDHPSVSLLQYVDDLLIAADTQAACLSATRDLLMTLAELGYRVSGKKAQLCQEEVTYLGFKIHKGSRSLSNSRTQAILQIPVPKTKRQVREFLGTIGYCRLWIPGFAELAQPLYAATRPGNDPLVWGEKEEEAFQSLKLALTQPPALALPSLDKPFQLFVEETSGAAKGVLTQALGPWKRPVAYLSKRLDPVAAGWPRCLRAIAAAALLTREASKLTFGQDIEITSSHNLESLLRSPPDKWLTNARITQYQVLLLDPPRVRFKQTAALNPATLLPETDDTLPIHHCLDTLDSLTSTRPDLTDQPLAQAEATLFTDGSSYIRDGKRYAGAAVVTLDSVIWAEPLPIGTSAQKAELIALTKALEWSKDKSVNIYTDSRYAFATLHVHGMIYRERGWLTAGGKAIKNAPEILALLTAVWLPKRVAVMHCKGHQKDDAPTSTGNRRADEVAREVAIRPLSTQATISAGKRTADGSEFEKRTADGSEFESPKKKAKVE

SEQ ID NO: 7105 - protein, 2098 aa, synthetic construct
MPAAKRVKLDGGDKKYSIGLDIGTNSVGWAVITDEYKVPSKKFKVLGNTDRHSIKKNLIGALLFDSGETAEATRLKRTARRRYTRRKNRICYLQEIFSNEMAKVDDSFFHRLEESFLVEEDKKHERHPIFGNIVDEVAYHEKYPTIYHLRKKLVDSTDKADLRLIYLALAHMIKFRGHFLIEGDLNPDNSDVDKLFIQLVQTYNQLFEENPINASGVDAKAILSARLSKSRRLENLIAQLPGEKKNGLFGNLIALSLGLTPNFKSNFDLAEDAKLQLSKDTYDDDLDNLLAQIGDQYADLFLAAKNLSDAILLSDILRVNTEITKAPLSASMIKRYDEHHQDLTLLKALVRQQLPEKYKEIFFDQSKNGYAGYIDGGASQEEFYKFIKPILEKMDGTEELLVKLNREDLLRKQRTFDNGSIPHQIHLGELHAILRRQEDFYPFLKDNREKIEKILTFRIPYYVGPLARGNSRFAWMTRKSEETITPWNFEEVVDKGASAQSFIERMTNFDKNLPNEKVLPKHSLLYEYFTVYNELTKVKYVTEGMRKPAFLSGEQKKAIVDLLFKTNRKVTVKQLKEDYFKKIECFDSVEISGVEDRFNASLGTYHDLLKIIKDKDFLDNEENEDILEDIVLTLTLFEDREMIEERLKTYAHLFDDKVMKQLKRRRYTGWGRLSRKLINGIRDKQSGKTILDFLKSDGFANRNFMQLIHDDSLTFKEDIQKAQVSGQGDSLHEHIANLAGSPAIKKGILQTVKVVDELVKVMGRHKPENIVIEMARENQTTQKGQKNSRERMKRIEEGIKELGSQILKEHPVENTQLQNEKLYLYYLQNGRDMYVDQELDINRLSDYDVDHIVPQSFLKDDSIDNKVLTRSDKARGKSDNVPSEEVVKKMKNYWRQLLNAKLITQRKFDNLTKAERGGLSELDKAGFIKRQLVETRQITKHVAQILDSRMNTKYDENDKLIREVKVITLKSKLVSDFRKDFQFYKVREINNYHHAHDAYLNAVVGTALIKKYPKLESEFVYGDYKVYDVRKMIAKSEQEIGKATAKYFFYSNIMNFFKTEITLANGEIRKRPLIETNGETGEIVWDKGRDFATVRKVLSMPQVNIVKKTEVQTGGFSKESILPKRNSDKLIARKKDWDPKKYGGFDSPTVAYSVLVVAKVEKGKSKKLKSVKELLGITIMERSSFEKNPIDFLEAKGYKEVKKDLIIKLPKYSLFELENGRKRMLASAGELQKGNELALPSKYVNFLYLASHYEKLKGSPEDNEQKQLFVEQHKHYLDEIIEQISEFSKRVILADANLDKVLSAYNKHRDKPIREQAENIIHLFTLTNLGAPAAFKYFDTTIDRKRYTSTKEVLDATLIHQSITGLYETRIDLSQLGGDGGEAAAKGSSGGSGGTAPLEEEYRLFLEAPIQNVTLLEQWKREIPKVWAEINPPGLASTQAPIHVQLLSTALPVRVRQYPITLEAKRSLRETIRKFRAAGILRPVHSPWNTPLLPVRKSGTSEYRMVQDLREVNKRVETIHPTVPNPYTLLSLLPPDRIWYSVLDLKDAFFCIPLAPESQLIFAFEWADAEEGESGQLTWTRLPQGFKNSPTLFNEALNRDLQGFRLDHPSVSLLQYVDDLLIAADTQAACLSATRDLLMTLAELGYRVSGKKAQLCQEEVTYLGFKIHKGSRSLSNSRTQAILQIPVPKTKRQVREFLGKIGYCRLFIPGFAELAQPLYAATRPGNDPLVWGEKEEEAFQSLKLALTQPPALALPSLDKPFQLFVEETSGAAKGVLTQALGPWKRPVAYLSKRLDPVAAGWPRCLRAIAAAALLTREASKLTFGQDIEITSSHNLESLLRSPPDKWLTNARITQYQVLLLDPPRVRFKQTAALNPATLLPETDDTLPIHHCLDTLDSLTSTRPDLTDQPLAQAEATLFTDGSSYIRDGKRYAGAAVVTLDSVIWAEPLPIGTSAQKAELIALTKALEWSKDKSVNIYTDSRYAFATLHVHGMIYRERGWLTAGGKAIKNAPEILALLTAVWLPKRVAVMHCKGHQKDDAPTSTGNRRADEVAREVAIRPLSTQATISAGKRTADGSEFEKRTADGSEFESPKKKAKVE

SEQ ID NO: 7106 - protein, 2102 aa, synthetic construct
MPAAKRVKLDGGDKKYSIGLDIGTNSVGWAVITDEYKVPSKKFKVLGNTDRHSIKKNLIGALLFDSGETAEATRLKRTARRRYTRRKNRICYLQEIFSNEMAKVDDSFFHRLEESFLVEEDKKHERHPIFGNIVDEVAYHEKYPTIYHLRKKLVDSTDKADLRLIYLALAHMIKFRGHFLIEGDLNPDNSDVDKLFIQLVQTYNQLFEENPINASGVDAKAILSARLSKSRRLENLIAQLPGEKKNGLFGNLIALSLGLTPNFKSNFDLAEDAKLQLSKDTYDDDLDNLLAQIGDQYADLFLAAKNLSDAILLSDILRVNTEITKAPLSASMIKRYDEHHQDLTLLKALVRQQLPEKYKEIFFDQSKNGYAGYIDGGASQEEFYKFIKPILEKMDGTEELLVKLNREDLLRKQRTFDNGSIPHQIHLGELHAILRRQEDFYPFLKDNREKIEKILTFRIPYYVGPLARGNSRFAWMTRKSEETITPWNFEEVVDKGASAQSFIERMTNFDKNLPNEKVLPKHSLLYEYFTVYNELTKVKYVTEGMRKPAFLSGEQKKAIVDLLFKTNRKVTVKQLKEDYFKKIECFDSVEISGVEDRFNASLGTYHDLLKIIKDKDFLDNEENEDILEDIVLTLTLFEDREMIEERLKTYAHLFDDKVMKQLKRRRYTGWGRLSRKLINGIRDKQSGKTILDFLKSDGFANRNFMQLIHDDSLTFKEDIQKAQVSGQGDSLHEHIANLAGSPAIKKGILQTVKVVDELVKVMGRHKPENIVIEMARENQTTQKGQKNSRERMKRIEEGIKELGSQILKEHPVENTQLQNEKLYLYYLQNGRDMYVDQELDINRLSDYDVDHIVPQSFLKDDSIDNKVLTRSDKARGKSDNVPSEEVVKKMKNYWRQLLNAKLITQRKFDNLTKAERGGLSELDKAGFIKRQLVETRQITKHVAQILDSRMNTKYDENDKLIREVKVITLKSKLVSDFRKDFQFYKVREINNYHHAHDAYLNAVVGTALIKKYPKLESEFVYGDYKVYDVRKMIAKSEQEIGKATAKYFFYSNIMNFFKTEITLANGEIRKRPLIETNGETGEIVWDKGRDFATVRKVLSMPQVNIVKKTEVQTGGFSKESILPKRNSDKLIARKKDWDPKKYGGFDSPTVAYSVLVVAKVEKGKSKKLKSVKELLGITIMERSSFEKNPIDFLEAKGYKEVKKDLIIKLPKYSLFELENGRKRMLASAGELQKGNELALPSKYVNFLYLASHYEKLKGSPEDNEQKQLFVEQHKHYLDEIIEQISEFSKRVILADANLDKVLSAYNKHRDKPIREQAENIIHLFTLTNLGAPAAFKYFDTTIDRKRYTSTKEVLDATLIHQSITGLYETRIDLSQLGGDGGEAAAKGSSGGSGGTVSLQDEHRLFDIPVTTSLPDVWLQDFPQAWAETGGLGRAKCQAPIIIDLKPTAVPVSIKQYPMSLEAHMGIRQHIIKFLELGVLRPCRSPWNTPLLPVKKPGTQDYRPVQDLREINKRTVDIHPTVPNPYNLLSTLKPDYSWYTVLDLKDAFFCLPLAPQSQELFAFEWKDPERGISGQLTWTRLPQGFKNSPTLFNEALHRDLTDFRTQHPEVTLLQYVDDLLLAAPTKKACTQGTRHLLQELGEKGYRASAKKAQICQTKVTYLGYILSEGKRWLTPGRIETVARIPPPRNPREVREFLGKAGFCRLFIPGFAELAAPLYALTKPSTPFTWQTEHQLAFEALKKALLSAPALGLPDTSKPFTLFLDERQGIAKGVLTQKLGPWKRPVAYLSKKLDPVAAGWPPCLRIMAATAMLVKDSAKLTLGQPLTVITPHTLEAIVRQPPDRWITNARLTHYQALLLDTDRVQFGPPVTLNPATLLPVPENQPSPHDCRQVLAETHGTREDLKDQELPDADHTWYTDGSSYLDSGTRRAGAAVVDGHNTIWAQSLPPGTSAQKAELIALTKALELSKGKKANIYTDSRYAFATAHTHGSIYERRGWLTSEGKEIKNKAEIIALLKALFLPQEVAIIHCPGHQKGQDPVAVGNRQADRVARQAAMAEVLTLATEPDNTSHITAGKRTADGSEFEKRTADGSEFESPKKKAKVE

SEQ ID NO: 7107 - protein, 2087 aa, synthetic construct
MPAAKRVKLDGGDKKYSIGLDIGTNSVGWAVITDEYKVPSKKFKVLGNTDRHSIKKNLIGALLFDSGETAEATRLKRTARRRYTRRKNRICYLQEIFSNEMAKVDDSFFHRLEESFLVEEDKKHERHPIFGNIVDEVAYHEKYPTIYHLRKKLVDSTDKADLRLIYLALAHMIKFRGHFLIEGDLNPDNSDVDKLFIQLVQTYNQLFEENPINASGVDAKAILSARLSKSRRLENLIAQLPGEKKNGLFGNLIALSLGLTPNFKSNFDLAEDAKLQLSKDTYDDDLDNLLAQIGDQYADLFLAAKNLSDAILLSDILRVNTEITKAPLSASMIKRYDEHHQDLTLLKALVRQQLPEKYKEIFFDQSKNGYAGYIDGGASQEEFYKFIKPILEKMDGTEELLVKLNREDLLRKQRTFDNGSIPHQIHLGELHAILRRQEDFYPFLKDNREKIEKILTFRIPYYVGPLARGNSRFAWMTRKSEETITPWNFEEVVDKGASAQSFIERMTNFDKNLPNEKVLPKHSLLYEYFTVYNELTKVKYVTEGMRKPAFLSGEQKKAIVDLLFKTNRKVTVKQLKEDYFKKIECFDSVEISGVEDRFNASLGTYHDLLKIIKDKDFLDNEENEDILEDIVLTLTLFEDREMIEERLKTYAHLFDDKVMKQLKRRRYTGWGRLSRKLINGIRDKQSGKTILDFLKSDGFANRNFMQLIHDDSLTFKEDIQKAQVSGQGDSLHEHIANLAGSPAIKKGILQTVKVVDELVKVMGRHKPENIVIEMARENQTTQKGQKNSRERMKRIEEGIKELGSQILKEHPVENTQLQNEKLYLYYLQNGRDMYVDQELDINRLSDYDVDHIVPQSFLKDDSIDNKVLTRSDKARGKSDNVPSEEVVKKMKNYWRQLLNAKLITQRKFDNLTKAERGGLSELDKAGFIKRQLVETRQITKHVAQILDSRMNTKYDENDKLIREVKVITLKSKLVSDFRKDFQFYKVREINNYHHAHDAYLNAVVGTALIKKYPKLESEFVYGDYKVYDVRKMIAKSEQEIGKATAKYFFYSNIMNFFKTEITLANGEIRKRPLIETNGETGEIVWDKGRDFATVRKVLSMPQVNIVKKTEVQTGGFSKESILPKRNSDKLIARKKDWDPKKYGGFDSPTVAYSVLVVAKVEKGKSKKLKSVKELLGITIMERSSFEKNPIDFLEAKGYKEVKKDLIIKLPKYSLFELENGRKRMLASAGELQKGNELALPSKYVNFLYLASHYEKLKGSPEDNEQKQLFVEQHKHYLDEIIEQISEFSKRVILADANLDKVLSAYNKHRDKPIREQAENIIHLFTLTNLGAPAAFKYFDTTIDRKRYTSTKEVLDATLIHQSITGLYETRIDLSQLGGDGGEAAAKGSSGGSGGVPWILKKPLELTIKLDLEEQQGTLLNNSILSKKGKEELKQLFEKYSALWQSWENQVGHRRIRPHKIATGTVKPTPQKQYHINPKAKPDIQIVINDLLKQGVLIQKESTMNTPVYPVPKPNGRWRMVLDYRAVNKVTPLIAVQNQHSYGILGSLFKGRYKTTIDLSNGFWAHPIVPEDYWITAFTWQGKQYCWTVLPQGFLNSPGLFTGDVVDLLQGIPNVEVYVDDVYISHDSEKEHLEYLDILFNRLKEAGYIISLKKSNIANSIVDFLGFQITNEGRGLTDTFKEKLENITAPTTLKQLQSILGLLNFARNFIPDFTELIAPLYALIPKSTKNYVPWQIEHSTTLETLITKLNGAEYLQGRKGDKTLIMKVNASYTTGYIRYYNEGEKKPISYVSIVFSKTELKFTELEKLLTTVHKGLLKALDLSMGQNIHVYSPIVSMQNIQKTPQTAKKALASRWLSWLSYLEDPRIRFFYDPQMPALKDLPAVDTGKDNKKHPSNFQHIFYTDGSAITSPTKEGHLNAGMGIVYFINKDGNLQKQQEWSISLGNHTAQFAEIAAFEFALKKCLPLGGNILVVTDSNYVAKAYNEELDVWASNGFVNNRKKPLKHISKWKSVADLKRLRPDVVVTHEPGHQKLDSSPHAYGNNLADQLATQASFKVHAGKRTADGSEFEKRTADGSEFESPKKKAKVE

SEQ ID NO: 7108 - protein, 2087 aa, synthetic construct
MPAAKRVKLDGGDKKYSIGLDIGTNSVGWAVITDEYKVPSKKFKVLGNTDRHSIKKNLIGALLFDSGETAEATRLKRTARRRYTRRKNRICYLQEIFSNEMAKVDDSFFHRLEESFLVEEDKKHERHPIFGNIVDEVAYHEKYPTIYHLRKKLVDSTDKADLRLIYLALAHMIKFRGHFLIEGDLNPDNSDVDKLFIQLVQTYNQLFEENPINASGVDAKAILSARLSKSRRLENLIAQLPGEKKNGLFGNLIALSLGLTPNFKSNFDLAEDAKLQLSKDTYDDDLDNLLAQIGDQYADLFLAAKNLSDAILLSDILRVNTEITKAPLSASMIKRYDEHHQDLTLLKALVRQQLPEKYKEIFFDQSKNGYAGYIDGGASQEEFYKFIKPILEKMDGTEELLVKLNREDLLRKQRTFDNGSIPHQIHLGELHAILRRQEDFYPFLKDNREKIEKILTFRIPYYVGPLARGNSRFAWMTRKSEETITPWNFEEVVDKGASAQSFIERMTNFDKNLPNEKVLPKHSLLYEYFTVYNELTKVKYVTEGMRKPAFLSGEQKKAIVDLLFKTNRKVTVKQLKEDYFKKIECFDSVEISGVEDRFNASLGTYHDLLKIIKDKDFLDNEENEDILEDIVLTLTLFEDREMIEERLKTYAHLFDDKVMKQLKRRRYTGWGRLSRKLINGIRDKQSGKTILDFLKSDGFANRNFMQLIHDDSLTFKEDIQKAQVSGQGDSLHEHIANLAGSPAIKKGILQTVKVVDELVKVMGRHKPENIVIEMARENQTTQKGQKNSRERMKRIEEGIKELGSQILKEHPVENTQLQNEKLYLYYLQNGRDMYVDQELDINRLSDYDVDHIVPQSFLKDDSIDNKVLTRSDKARGKSDNVPSEEVVKKMKNYWRQLLNAKLITQRKFDNLTKAERGGLSELDKAGFIKRQLVETRQITKHVAQILDSRMNTKYDENDKLIREVKVITLKSKLVSDFRKDFQFYKVREINNYHHAHDAYLNAVVGTALIKKYPKLESEFVYGDYKVYDVRKMIAKSEQEIGKATAKYFFYSNIMNFFKTEITLANGEIRKRPLIETNGETGEIVWDKGRDFATVRKVLSMPQVNIVKKTEVQTGGFSKESILPKRNSDKLIARKKDWDPKKYGGFDSPTVAYSVLVVAKVEKGKSKKLKSVKELLGITIMERSSFEKNPIDFLEAKGYKEVKKDLIIKLPKYSLFELENGRKRMLASAGELQKGNELALPSKYVNFLYLASHYEKLKGSPEDNEQKQLFVEQHKHYLDEIIEQISEFSKRVILADANLDKVLSAYNKHRDKPIREQAENIIHLFTLTNLGAPAAFKYFDTTIDRKRYTSTKEVLDATLIHQSITGLYETRIDLSQLGGDGGEAAAKGSSGGSGGVPWILKKPLELTIKLDLEEQQGTLLNNSILSKKGKEELKQLFEKYSALWQSWENQVGHRRIRPHKIATGTVKPTPQKQYHINPKAKPDIQIVINDLLKQGVLIQKESTMNTPVYPVPKPNGRWRMVLDYRAVNKVTPLIAVQNQHSYGILGSLFKGRYKTTIDLSNGFWAHPIVPEDYWITAFTWQGKQYCWTVLPQGFLNSPGLFNGDVVDLLQGIPNVEVYVDDVYISHDSEKEHLEYLDILFNRLKEAGYIISLKKSNIANSIVDFLGFQITNEGRGLTDTFKEKLENITAPTTLKQLQSILGKLNFARNFIPDFTELIAPLYALIPKSPKNYVPWQIEHSTTLETLITKLNGAEYLQGRKGDKTLIMKVNASYTTGYIRYYNEGEKKPISYVSIVFSKTELKFTELEKLLTTVHKGLLKALDLSMGQNIHVYSPIVSMQNIQKTPQTAKKALASRWLSWLSYLEDPRIRFFYDPQMPALKDLPAVDTGKDNKKHPSNFQHIFYTDGSAITSPTKEGHLNAGMGIVYFINKDGNLQKQQEWSISLGNHTAQFAEIAAFEFALKKCLPLGGNILVVTDSNYVAKAYNEELDVWASNGFVNNRKKPLKHISKWKSVADLKRLRPDVVVTHEPGHQKLDSSPHAYGNNLADQLATQASFKVHAGKRTADGSEFEKRTADGSEFESPKKKAKVE

SEQ ID NO: 7109 - protein, 2094 aa, synthetic construct
MPAAKRVKLDGGDKKYSIGLDIGTNSVGWAVITDEYKVPSKKFKVLGNTDRHSIKKNLIGALLFDSGETAEATRLKRTARRRYTRRKNRICYLQEIFSNEMAKVDDSFFHRLEESFLVEEDKKHERHPIFGNIVDEVAYHEKYPTIYHLRKKLVDSTDKADLRLIYLALAHMIKFRGHFLIEGDLNPDNSDVDKLFIQLVQTYNQLFEENPINASGVDAKAILSARLSKSRRLENLIAQLPGEKKNGLFGNLIALSLGLTPNFKSNFDLAEDAKLQLSKDTYDDDLDNLLAQIGDQYADLFLAAKNLSDAILLSDILRVNTEITKAPLSASMIKRYDEHHQDLTLLKALVRQQLPEKYKEIFFDQSKNGYAGYIDGGASQEEFYKFIKPILEKMDGTEELLVKLNREDLLRKQRTFDNGSIPHQIHLGELHAILRRQEDFYPFLKDNREKIEKILTFRIPYYVGPLARGNSRFAWMTRKSEETITPWNFEEVVDKGASAQSFIERMTNFDKNLPNEKVLPKHSLLYEYFTVYNELTKVKYVTEGMRKPAFLSGEQKKAIVDLLFKTNRKVTVKQLKEDYFKKIECFDSVEISGVEDRFNASLGTYHDLLKIIKDKDFLDNEENEDILEDIVLTLTLFEDREMIEERLKTYAHLFDDKVMKQLKRRRYTGWGRLSRKLINGIRDKQSGKTILDFLKSDGFANRNFMQLIHDDSLTFKEDIQKAQVSGQGDSLHEHIANLAGSPAIKKGILQTVKVVDELVKVMGRHKPENIVIEMARENQTTQKGQKNSRERMKRIEEGIKELGSQILKEHPVENTQLQNEKLYLYYLQNGRDMYVDQELDINRLSDYDVDHIVPQSFLKDDSIDNKVLTRSDKARGKSDNVPSEEVVKKMKNYWRQLLNAKLITQRKFDNLTKAERGGLSELDKAGFIKRQLVETRQITKHVAQILDSRMNTKYDENDKLIREVKVITLKSKLVSDFRKDFQFYKVREINNYHHAHDAYLNAVVGTALIKKYPKLESEFVYGDYKVYDVRKMIAKSEQEIGKATAKYFFYSNIMNFFKTEITLANGEIRKRPLIETNGETGEIVWDKGRDFATVRKVLSMPQVNIVKKTEVQTGGFSKESILPKRNSDKLIARKKDWDPKKYGGFDSPTVAYSVLVVAKVEKGKSKKLKSVKELLGITIMERSSFEKNPIDFLEAKGYKEVKKDLIIKLPKYSLFELENGRKRMLASAGELQKGNELALPSKYVNFLYLASHYEKLKGSPEDNEQKQLFVEQHKHYLDEIIEQISEFSKRVILADANLDKVLSAYNKHRDKPIREQAENIIHLFTLTNLGAPAAFKYFDTTIDRKRYTSTKEVLDATLIHQSITGLYETRIDLSQLGGDGGEAAAKGSSGGSGGVLNLEEEYRLHEKPVPSSIDPSWLQLFPTVWAERAGMGLANQVPPVVVELRSGASPVAVRQYPMSKEAREGIRPHIQKFLDLGVLVPCRSPWNTPLLPVKKPGTNDYRPVQDLREINKRVQDIHPTVPNPYNLLSSLPPSYTWYSVLDLKDAFFCLRLHPNSQPLFAFEWKDPEKGNTGQLTWTRLPQGFKNSPTLFNEALHRDLAPFRALNPQVVLLQYVDDLLVAAPTYEDCKKGTQKLLQELSKLGYRVSAKKAQLCQREVTYLGYLLKEGKRWLTPARKATVMKIPVPTTPRQVREFLGTAGFCRLWIPGFASLAAPLYPLTKPSIPFIWTEEHQQAFDHIKKALLSAPALALPDLTKPFTLYIDERAGVARGVLTQTLGPWRRPVAYLSKKLDPVASGWPTCLKAVAAVALLLKDADKLTLGQNVTVIASHSLESIVRQPPDRWMTNARMTHYQSLLLNERVSFAPPAVLNPATLLPVESEATPVHRCSEILAEETGTRRDLEDQPLPGVPTWYTDGSSFITEGKRRAGAPIVDGKRTVWASSLPEGTSAQKAELVALTQALRLAEGKNINIYTDSRYAFATAHIHGAIYKQRGWLTSAGKDIKNKEEILALLEAIHLPRRVAIIHCPGHQRGSNPVATGNRRADEAAKQAALSTRVLAGTTKPAGKRTADGSEFEKRTADGSEFESPKKKAKVE

SEQ ID NO: 7110 - protein, 2127 aa, synthetic construct
MPAAKRVKLDGGDKKYSIGLDIGTNSVGWAVITDEYKVPSKKFKVLGNTDRHSIKKNLIGALLFDSGETAEATRLKRTARRRYTRRKNRICYLQEIFSNEMAKVDDSFFHRLEESFLVEEDKKHERHPIFGNIVDEVAYHEKYPTIYHLRKKLVDSTDKADLRLIYLALAHMIKFRGHFLIEGDLNPDNSDVDKLFIQLVQTYNQLFEENPINASGVDAKAILSARLSKSRRLENLIAQLPGEKKNGLFGNLIALSLGLTPNFKSNFDLAEDAKLQLSKDTYDDDLDNLLAQIGDQYADLFLAAKNLSDAILLSDILRVNTEITKAPLSASMIKRYDEHHQDLTLLKALVRQQLPEKYKEIFFDQSKNGYAGYIDGGASQEEFYKFIKPILEKMDGTEELLVKLNREDLLRKQRTFDNGSIPHQIHLGELHAILRRQEDFYPFLKDNREKIEKILTFRIPYYVGPLARGNSRFAWMTRKSEETITPWNFEEVVDKGASAQSFIERMTNFDKNLPNEKVLPKHSLLYEYFTVYNELTKVKYVTEGMRKPAFLSGEQKKAIVDLLFKTNRKVTVKQLKEDYFKKIECFDSVEISGVEDRFNASLGTYHDLLKIIKDKDFLDNEENEDILEDIVLTLTLFEDREMIEERLKTYAHLFDDKVMKQLKRRRYTGWGRLSRKLINGIRDKQSGKTILDFLKSDGFANRNFMQLIHDDSLTFKEDIQKAQVSGQGDSLHEHIANLAGSPAIKKGILQTVKVVDELVKVMGRHKPENIVIEMARENQTTQKGQKNSRERMKRIEEGIKELGSQILKEHPVENTQLQNEKLYLYYLQNGRDMYVDQELDINRLSDYDVDHIVPQSFLKDDSIDNKVLTRSDKARGKSDNVPSEEVVKKMKNYWRQLLNAKLITQRKFDNLTKAERGGLSELDKAGFIKRQLVETRQITKHVAQILDSRMNTKYDENDKLIREVKVITLKSKLVSDFRKDFQFYKVREINNYHHAHDAYLNAVVGTALIKKYPKLESEFVYGDYKVYDVRKMIAKSEQEIGKATAKYFFYSNIMNFFKTEITLANGEIRKRPLIETNGETGEIVWDKGRDFATVRKVLSMPQVNIVKKTEVQTGGFSKESILPKRNSDKLIARKKDWDPKKYGGFDSPTVAYSVLVVAKVEKGKSKKLKSVKELLGITIMERSSFEKNPIDFLEAKGYKEVKKDLIIKLPKYSLFELENGRKRMLASAGELQKGNELALPSKYVNFLYLASHYEKLKGSPEDNEQKQLFVEQHKHYLDEIIEQISEFSKRVILADANLDKVLSAYNKHRDKPIREQAENIIHLFTLTNLGAPAAFKYFDTTIDRKRYTSTKEVLDATLIHQSITGLYETRIDLSQLGGDGGEAAAKGSSGGSGGLLGRDLLTKLKAQIQFSTEGPQVTWEDRPAMCLVLNLEEEYRLHEKPVPPSIDPSWLQLFPMVWAEKAGMGLANQVPPVVVELKSDASPVAVRQYPMSKEAREGIRPHIQRFLDLGILVPCQSPWNTPLLPVKKPGTNDYRPVQDLREVNKRVQDIHPTVPNPYNLLSSLPPSHTWYSVLDLKDAFFCLKLHPNSQPLFAFEWRDPEKGNTGQLTWTRLPQGFKNSPTLFNEALHRDLASFRALNPQVVMLQYVDDLLVAAPTYRDCKEGTRRLLQELSKLGYRVSAKKAQLCREEVTYLGYLLKGGKRWLTPARKATVMKIPTPTTPRQVREFLGTAGFCRLWIPGFASLAAPLYPLTRPKVPFTWTEAHQEAFGRIKEALLSAPALALPDLTKPFALYVDEKEGVARGVLTQTLGPWRRPVAYLSKKLDPVASGWPTCLKAIAAVALLLKDADKLTLGQNVLVIAPHNLESIVRQPPDRWMTNARMTHYQSLLLNERVSFAPPAILNPATLLPVESDDTPIHICSEILAEETGTRPDLRDQPLPGVPAWYTDGSSFIMDGRRQAGAAIVDNKRTVWASNLPEGTSAQKAELIALTQALRLAEGKSINIYTDSRYAFATAHVHGAIYKQRGWLTSAGKDIKNKEEILALLEAIHLPKRVAIIHCPGHQRGTDPVATGNRKADEAAKQAAQSTRILTETTKNAGKRTADGSEFEKRTADGSEFESPKKKAKVE

SEQ ID NO: 7111 - protein, 2218 aa, synthetic construct
MPAAKRVKLDGGDKKYSIGLDIGTNSVGWAVITDEYKVPSKKFKVLGNTDRHSIKKNLIGALLFDSGETAEATRLKRTARRRYTRRKNRICYLQEIFSNEMAKVDDSFFHRLEESFLVEEDKKHERHPIFGNIVDEVAYHEKYPTIYHLRKKLVDSTDKADLRLIYLALAHMIKFRGHFLIEGDLNPDNSDVDKLFIQLVQTYNQLFEENPINASGVDAKAILSARLSKSRRLENLIAQLPGEKKNGLFGNLIALSLGLTPNFKSNFDLAEDAKLQLSKDTYDDDLDNLLAQIGDQYADLFLAAKNLSDAILLSDILRVNTEITKAPLSASMIKRYDEHHQDLTLLKALVRQQLPEKYKEIFFDQSKNGYAGYIDGGASQEEFYKFIKPILEKMDGTEELLVKLNREDLLRKQRTFDNGSIPHQIHLGELHAILRRQEDFYPFLKDNREKIEKILTFRIPYYVGPLARGNSRFAWMTRKSEETITPWNFEEVVDKGASAQSFIERMTNFDKNLPNEKVLPKHSLLYEYFTVYNELTKVKYVTEGMRKPAFLSGEQKKAIVDLLFKTNRKVTVKQLKEDYFKKIECFDSVEISGVEDRFNASLGTYHDLLKIIKDKDFLDNEENEDILEDIVLTLTLFEDREMIEERLKTYAHLFDDKVMKQLKRRRYTGWGRLSRKLINGIRDKQSGKTILDFLKSDGFANRNFMQLIHDDSLTFKEDIQKAQVSGQGDSLHEHIANLAGSPAIKKGILQTVKVVDELVKVMGRHKPENIVIEMARENQTTQKGQKNSRERMKRIEEGIKELGSQILKEHPVENTQLQNEKLYLYYLQNGRDMYVDQELDINRLSDYDVDHIVPQSFLKDDSIDNKVLTRSDKARGKSDNVPSEEVVKKMKNYWRQLLNAKLITQRKFDNLTKAERGGLSELDKAGFIKRQLVETRQITKHVAQILDSRMNTKYDENDKLIREVKVITLKSKLVSDFRKDFQFYKVREINNYHHAHDAYLNAVVGTALIKKYPKLESEFVYGDYKVYDVRKMIAKSEQEIGKATAKYFFYSNIMNFFKTEITLANGEIRKRPLIETNGETGEIVWDKGRDFATVRKVLSMPQVNIVKKTEVQTGGFSKESILPKRNSDKLIARKKDWDPKKYGGFDSPTVAYSVLVVAKVEKGKSKKLKSVKELLGITIMERSSFEKNPIDFLEAKGYKEVKKDLIIKLPKYSLFELENGRKRMLASAGELQKGNELALPSKYVNFLYLASHYEKLKGSPEDNEQKQLFVEQHKHYLDEIIEQISEFSKRVILADANLDKVLSAYNKHRDKPIREQAENIIHLFTLTNLGAPAAFKYFDTTIDRKRYTSTKEVLDATLIHQSITGLYETRIDLSQLGGDGGEAAAKGSSGGSGGTLGDQGSRGSDPLPEPRVTLTVEGIPTEFLVNTGAEHSVLTKPMGKMGSKRTVVAGATGSKVYPWTTKRLLKIGQKQVTHSFLVIPECPAPLLGRDLLTKLKAQIQFSTEGPQVTWEDRPAMCLVLNLEEEYRLHEKPVPPSIDPSWLQLFPMVWAEKAGMGLANQVPPVVVELKSDASPVAVRQYPMSKEAREGIRPHIQRFLDLGILVPCQSPWNTPLLPVKKPGTNDYRPVQDLREVNKRVQDIHPTVPNPYNLLSSLPPSHTWYSVLDLKDAFFCLKLHPNSQPLFAFEWRDPEKGNTGQLTWTRLPQGFKNSPTLFNEALHRDLASFRALNPQVVMLQYVDDLLVAAPTYRDCKEGTRRLLQELSKLGYRVSAKKAQLCREEVTYLGYLLKGGKRWLTPARKATVMKIPTPTTPRQVREFLGTAGFCRLWIPGFASLAAPLYPLTRPKVPFTWTEAHQEAFGRIKEALLSAPALALPDLTKPFALYVDEKEGVARGVLTQTLGPWRRPVAYLSKKLDPVASGWPTCLKAIAAVALLLKDADKLTLGQNVLVIAPHNLESIVRQPPDRWMTNARMTHYQSLLLNERVSFAPPAILNPATLLPVESDDTPIHICSEILAEETGTRPDLRDQPLPGVPAWYTDGSSFIMDGRRQAGAAIVDNKRTVWASNLPEGTSAQKAELIALTQALRLAEGKSINIYTDSRYAFATAHVHGAIYKQRGWLTSAGKDIKNKEEILALLEAIHLPKRVAIIHCPGHQRGTDPVATGNRKADEAAKQAAQSTRILTETTKNAGKRTADGSEFEKRTADGSEFESPKKKAKVE

SEQ ID NO: 7112 - protein, 2218 aa, synthetic construct
MPAAKRVKLDGGDKKYSIGLDIGTNSVGWAVITDEYKVPSKKFKVLGNTDRHSIKKNLIGALLFDSGETAEATRLKRTARRRYTRRKNRICYLQEIFSNEMAKVDDSFFHRLEESFLVEEDKKHERHPIFGNIVDEVAYHEKYPTIYHLRKKLVDSTDKADLRLIYLALAHMIKFRGHFLIEGDLNPDNSDVDKLFIQLVQTYNQLFEENPINASGVDAKAILSARLSKSRRLENLIAQLPGEKKNGLFGNLIALSLGLTPNFKSNFDLAEDAKLQLSKDTYDDDLDNLLAQIGDQYADLFLAAKNLSDAILLSDILRVNTEITKAPLSASMIKRYDEHHQDLTLLKALVRQQLPEKYKEIFFDQSKNGYAGYIDGGASQEEFYKFIKPILEKMDGTEELLVKLNREDLLRKQRTFDNGSIPHQIHLGELHAILRRQEDFYPFLKDNREKIEKILTFRIPYYVGPLARGNSRFAWMTRKSEETITPWNFEEVVDKGASAQSFIERMTNFDKNLPNEKVLPKHSLLYEYFTVYNELTKVKYVTEGMRKPAFLSGEQKKAIVDLLFKTNRKVTVKQLKEDYFKKIECFDSVEISGVEDRFNASLGTYHDLLKIIKDKDFLDNEENEDILEDIVLTLTLFEDREMIEERLKTYAHLFDDKVMKQLKRRRYTGWGRLSRKLINGIRDKQSGKTILDFLKSDGFANRNFMQLIHDDSLTFKEDIQKAQVSGQGDSLHEHIANLAGSPAIKKGILQTVKVVDELVKVMGRHKPENIVIEMARENQTTQKGQKNSRERMKRIEEGIKELGSQILKEHPVENTQLQNEKLYLYYLQNGRDMYVDQELDINRLSDYDVDHIVPQSFLKDDSIDNKVLTRSDKARGKSDNVPSEEVVKKMKNYWRQLLNAKLITQRKFDNLTKAERGGLSELDKAGFIKRQLVETRQITKHVAQILDSRMNTKYDENDKLIREVKVITLKSKLVSDFRKDFQFYKVREINNYHHAHDAYLNAVVGTALIKKYPKLESEFVYGDYKVYDVRKMIAKSEQEIGKATAKYFFYSNIMNFFKTEITLANGEIRKRPLIETNGETGEIVWDKGRDFATVRKVLSMPQVNIVKKTEVQTGGFSKESILPKRNSDKLIARKKDWDPKKYGGFDSPTVAYSVLVVAKVEKGKSKKLKSVKELLGITIMERSSFEKNPIDFLEAKGYKEVKKDLIIKLPKYSLFELENGRKRMLASAGELQKGNELALPSKYVNFLYLASHYEKLKGSPEDNEQKQLFVEQHKHYLDEIIEQISEFSKRVILADANLDKVLSAYNKHRDKPIREQAENIIHLFTLTNLGAPAAFKYFDTTIDRKRYTSTKEVLDATLIHQSITGLYETRIDLSQLGGDGGEAAAKGSSGGSGGTLGDQGSRGSDPLPEPRVTLTVEGIPTEFLVNTGAEHSVLTKPMGKMGSKRTVVAGATGSKVYPWTTKRLLKIGQKQVTHSFLVIPECPAPLLGRDLLTKLKAQIQFSTEGPQVTWEDRPAMCLVLNLEEEYRLHEKPVPPSIDPSWLQLFPMVWAEKAGMGLANQVPPVVVELKSDASPVAVRQYPMSKEAREGIRPHIQRFLDLGILVPCQSPWNTPLLPVKKPGTNDYRPVQDLREVNKRVQDIHPTVPNPYNLLSSLPPSHTWYSVLDLKDAFFCLKLHPNSQPLFAFEWRDPEKGNTGQLTWTRLPQGFKNSPTLFNEALHRDLASFRALNPQVVMLQYVDDLLVAAPTYRDCKEGTRRLLQELSKLGYRVSAKKAQLCREEVTYLGYLLKGGKRWLTPARKATVMKIPTPTTPRQVREFLGKAGFCRLFIPGFASLAAPLYPLTRPKVPFTWTEAHQEAFGRIKEALLSAPALALPDLTKPFALYVDEKEGVARGVLTQTLGPWRRPVAYLSKKLDPVASGWPTCLKAIAAVALLLKDADKLTLGQNVLVIAPHNLESIVRQPPDRWMTNARMTHYQSLLLNERVSFAPPAILNPATLLPVESDDTPIHICSEILAEETGTRPDLRDQPLPGVPAWYTDGSSFIMDGRRQAGAAIVDNKRTVWASNLPEGTSAQKAELIALTQALRLAEGKSINIYTDSRYAFATAHVHGAIYKQRGWLTSAGKDIKNKEEILALLEAIHLPKRVAIIHCPGHQRGTDPVATGNRKADEAAKQAAQSTRILTETTKNAGKRTADGSEFEKRTADGSEFESPKKKAKVE

SEQ ID NO: 7113 - protein, 2096 aa, synthetic construct
MPAAKRVKLDGGDKKYSIGLDIGTNSVGWAVITDEYKVPSKKFKVLGNTDRHSIKKNLIGALLFDSGETAEATRLKRTARRRYTRRKNRICYLQEIFSNEMAKVDDSFFHRLEESFLVEEDKKHERHPIFGNIVDEVAYHEKYPTIYHLRKKLVDSTDKADLRLIYLALAHMIKFRGHFLIEGDLNPDNSDVDKLFIQLVQTYNQLFEENPINASGVDAKAILSARLSKSRRLENLIAQLPGEKKNGLFGNLIALSLGLTPNFKSNFDLAEDAKLQLSKDTYDDDLDNLLAQIGDQYADLFLAAKNLSDAILLSDILRVNTEITKAPLSASMIKRYDEHHQDLTLLKALVRQQLPEKYKEIFFDQSKNGYAGYIDGGASQEEFYKFIKPILEKMDGTEELLVKLNREDLLRKQRTFDNGSIPHQIHLGELHAILRRQEDFYPFLKDNREKIEKILTFRIPYYVGPLARGNSRFAWMTRKSEETITPWNFEEVVDKGASAQSFIERMTNFDKNLPNEKVLPKHSLLYEYFTVYNELTKVKYVTEGMRKPAFLSGEQKKAIVDLLFKTNRKVTVKQLKEDYFKKIECFDSVEISGVEDRFNASLGTYHDLLKIIKDKDFLDNEENEDILEDIVLTLTLFEDREMIEERLKTYAHLFDDKVMKQLKRRRYTGWGRLSRKLINGIRDKQSGKTILDFLKSDGFANRNFMQLIHDDSLTFKEDIQKAQVSGQGDSLHEHIANLAGSPAIKKGILQTVKVVDELVKVMGRHKPENIVIEMARENQTTQKGQKNSRERMKRIEEGIKELGSQILKEHPVENTQLQNEKLYLYYLQNGRDMYVDQELDINRLSDYDVDHIVPQSFLKDDSIDNKVLTRSDKARGKSDNVPSEEVVKKMKNYWRQLLNAKLITQRKFDNLTKAERGGLSELDKAGFIKRQLVETRQITKHVAQILDSRMNTKYDENDKLIREVKVITLKSKLVSDFRKDFQFYKVREINNYHHAHDAYLNAVVGTALIKKYPKLESEFVYGDYKVYDVRKMIAKSEQEIGKATAKYFFYSNIMNFFKTEITLANGEIRKRPLIETNGETGEIVWDKGRDFATVRKVLSMPQVNIVKKTEVQTGGFSKESILPKRNSDKLIARKKDWDPKKYGGFDSPTVAYSVLVVAKVEKGKSKKLKSVKELLGITIMERSSFEKNPIDFLEAKGYKEVKKDLIIKLPKYSLFELENGRKRMLASAGELQKGNELALPSKYVNFLYLASHYEKLKGSPEDNEQKQLFVEQHKHYLDEIIEQISEFSKRVILADANLDKVLSAYNKHRDKPIREQAENIIHLFTLTNLGAPAAFKYFDTTIDRKRYTSTKEVLDATLIHQSITGLYETRIDLSQLGGDGGEAAAKGSSGGSGGTLNLEDEYRLYETSAEPEVSPGSTWLSDFPQAWAETGGMGLAVRQAPLIIPLKATSTPVSIKQYPMSQEAKLGIKPHIQRLLDQGILVPCQSPWNTPLLPVKKPGTNDYRPVQDLREVNKRVEDIHPTVPNPYNLLSGLPPSHRWYTVLDLKDAFFCLRLHPTSQPLFAFEWRDPGMGISGQLTWTRLPQGFKNSPTLFNEALHRDLADFRIQHPDLILLQYVDDILLAATSELDCQQGTRALLLTLGNLGYRASAKKAQLCQKQVKYLGYLLKEGQRWLTEARKETVMGQPTPKTPRQLREFLGTAGFCRLWIPGFAEMAAPLYPLTKPGTLFNWGPDQQKAYQEIKQALLTAPALGLPDLTKPFELFVDEKQGYAKGVLTQKLGPWRRPVAYLSKKLDPVAAGWPPCLRMVAAIAVLRKDAGKLTMGQPLVILAPHAVEALVKQPPDRWLSNARMTHYQAMLLDTDRVQFGPVVALNPATLLPLPEEGAPHDCLEILAETHGTRPDLTDQPIPDADHTWYTDGSSFLQEGQRKAGAAVTTETEVIWARALPAGTSAQRAELIALTQALKMAEGKRLNVYTDSRYAFATAHIHGEIYRRRGWLTSEGREIKNKSEILALLKALFLPKRLSIIHCLGHQKGDSAEARGNRLADQAAREAAIKTPPDTSTLLAGKRTADGSEFEKRTADGSEFESPKKKAKVE

SEQ ID NO: 7114 - protein, 2096 aa, synthetic construct
MPAAKRVKLDGGDKKYSIGLDIGTNSVGWAVITDEYKVPSKKFKVLGNTDRHSIKKNLIGALLFDSGETAEATRLKRTARRRYTRRKNRICYLQEIFSNEMAKVDDSFFHRLEESFLVEEDKKHERHPIFGNIVDEVAYHEKYPTIYHLRKKLVDSTDKADLRLIYLALAHMIKFRGHFLIEGDLNPDNSDVDKLFIQLVQTYNQLFEENPINASGVDAKAILSARLSKSRRLENLIAQLPGEKKNGLFGNLIALSLGLTPNFKSNFDLAEDAKLQLSKDTYDDDLDNLLAQIGDQYADLFLAAKNLSDAILLSDILRVNTEITKAPLSASMIKRYDEHHQDLTLLKALVRQQLPEKYKEIFFDQSKNGYAGYIDGGASQEEFYKFIKPILEKMDGTEELLVKLNREDLLRKQRTFDNGSIPHQIHLGELHAILRRQEDFYPFLKDNREKIEKILTFRIPYYVGPLARGNSRFAWMTRKSEETITPWNFEEVVDKGASAQSFIERMTNFDKNLPNEKVLPKHSLLYEYFTVYNELTKVKYVTEGMRKPAFLSGEQKKAIVDLLFKTNRKVTVKQLKEDYFKKIECFDSVEISGVEDRFNASLGTYHDLLKIIKDKDFLDNEENEDILEDIVLTLTLFEDREMIEERLKTYAHLFDDKVMKQLKRRRYTGWGRLSRKLINGIRDKQSGKTILDFLKSDGFANRNFMQLIHDDSLTFKEDIQKAQVSGQGDSLHEHIANLAGSPAIKKGILQTVKVVDELVKVMGRHKPENIVIEMARENQTTQKGQKNSRERMKRIEEGIKELGSQILKEHPVENTQLQNEKLYLYYLQNGRDMYVDQELDINRLSDYDVDHIVPQSFLKDDSIDNKVLTRSDKARGKSDNVPSEEVVKKMKNYWRQLLNAKLITQRKFDNLTKAERGGLSELDKAGFIKRQLVETRQITKHVAQILDSRMNTKYDENDKLIREVKVITLKSKLVSDFRKDFQFYKVREINNYHHAHDAYLNAVVGTALIKKYPKLESEFVYGDYKVYDVRKMIAKSEQEIGKATAKYFFYSNIMNFFKTEITLANGEIRKRPLIETNGETGEIVWDKGRDFATVRKVLSMPQVNIVKKTEVQTGGFSKESILPKRNSDKLIARKKDWDPKKYGGFDSPTVAYSVLVVAKVEKGKSKKLKSVKELLGITIMERSSFEKNPIDFLEAKGYKEVKKDLIIKLPKYSLFELENGRKRMLASAGELQKGNELALPSKYVNFLYLASHYEKLKGSPEDNEQKQLFVEQHKHYLDEIIEQISEFSKRVILADANLDKVLSAYNKHRDKPIREQAENIIHLFTLTNLGAPAAFKYFDTTIDRKRYTSTKEVLDATLIHQSITGLYETRIDLSQLGGDGGEAAAKGSSGGSGGTLNIEDEYRLHETSKGPDVPLGSTWLSDFPQAWAETGGMGLAVRQAPLIIPLKATSTPVSIKQYPMSQEARLGIKPHIQRLLDQGILVPCQSPWNTPLLPVKKPGTNDYRPVQDLREVNKRVEDIHPTVPNPYNLLSGLPPSHQWYTVLDLKDAFFCLRLHPTSQSLFAFEWRDPEMGISGQLTWTRLPQGFKNSPTLFDEALHRDLADFRIQHPDLILLQYVDDLLLAATSELDCQQGTRALLQTLGDLGYRASAKKAQICQKQVKYLGYLLKEGQRWLTEARKETVMGQPTPKTPRQLREFLGTAGFCRLWIPGFAEMAAPLYPLTKTGTLFEWGPDQQKAYQEIKQALLTAPALGLPDLTKPFELFVDEKQGYAKGVLTQKLGPWRRPVAYLSKKLDPVAAGWPPCLRMVAAIAVLTKDAGKLTMGQPLVILAPHAVEALVKQPPDRWLSNARMTHYQALLLDTDRVQFGPIVALNPATLLPLPEEGLQHDCLDILAEAHGTRPDLTDQPLPDADHTWYTDGSSFLQEGQRKAGAAVTTETEVVWAKALPAGTSAQRAELIALTQALKMAEGKKLNVYTDSRYAFATAHIHGEIYRRRGLLTSEGKEIKNKDEILALLKALFLPKRLSIIHCPGHQKGNRAEARGNRMADQAAREVATRETPETSTLLAGKRTADGSEFEKRTADGSEFESPKKKAKVE

SEQ ID NO: 7115 - protein, 2096 aa, synthetic construct
MPAAKRVKLDGGDKKYSIGLDIGTNSVGWAVITDEYKVPSKKFKVLGNTDRHSIKKNLIGALLFDSGETAEATRLKRTARRRYTRRKNRICYLQEIFSNEMAKVDDSFFHRLEESFLVEEDKKHERHPIFGNIVDEVAYHEKYPTIYHLRKKLVDSTDKADLRLIYLALAHMIKFRGHFLIEGDLNPDNSDVDKLFIQLVQTYNQLFEENPINASGVDAKAILSARLSKSRRLENLIAQLPGEKKNGLFGNLIALSLGLTPNFKSNFDLAEDAKLQLSKDTYDDDLDNLLAQIGDQYADLFLAAKNLSDAILLSDILRVNTEITKAPLSASMIKRYDEHHQDLTLLKALVRQQLPEKYKEIFFDQSKNGYAGYIDGGASQEEFYKFIKPILEKMDGTEELLVKLNREDLLRKQRTFDNGSIPHQIHLGELHAILRRQEDFYPFLKDNREKIEKILTFRIPYYVGPLARGNSRFAWMTRKSEETITPWNFEEVVDKGASAQSFIERMTNFDKNLPNEKVLPKHSLLYEYFTVYNELTKVKYVTEGMRKPAFLSGEQKKAIVDLLFKTNRKVTVKQLKEDYFKKIECFDSVEISGVEDRFNASLGTYHDLLKIIKDKDFLDNEENEDILEDIVLTLTLFEDREMIEERLKTYAHLFDDKVMKQLKRRRYTGWGRLSRKLINGIRDKQSGKTILDFLKSDGFANRNFMQLIHDDSLTFKEDIQKAQVSGQGDSLHEHIANLAGSPAIKKGILQTVKVVDELVKVMGRHKPENIVIEMARENQTTQKGQKNSRERMKRIEEGIKELGSQILKEHPVENTQLQNEKLYLYYLQNGRDMYVDQELDINRLSDYDVDHIVPQSFLKDDSIDNKVLTRSDKARGKSDNVPSEEVVKKMKNYWRQLLNAKLITQRKFDNLTKAERGGLSELDKAGFIKRQLVETRQITKHVAQILDSRMNTKYDENDKLIREVKVITLKSKLVSDFRKDFQFYKVREINNYHHAHDAYLNAVVGTALIKKYPKLESEFVYGDYKVYDVRKMIAKSEQEIGKATAKYFFYSNIMNFFKTEITLANGEIRKRPLIETNGETGEIVWDKGRDFATVRKVLSMPQVNIVKKTEVQTGGFSKESILPKRNSDKLIARKKDWDPKKYGGFDSPTVAYSVLVVAKVEKGKSKKLKSVKELLGITIMERSSFEKNPIDFLEAKGYKEVKKDLIIKLPKYSLFELENGRKRMLASAGELQKGNELALPSKYVNFLYLASHYEKLKGSPEDNEQKQLFVEQHKHYLDEIIEQISEFSKRVILADANLDKVLSAYNKHRDKPIREQAENIIHLFTLTNLGAPAAFKYFDTTIDRKRYTSTKEVLDATLIHQSITGLYETRIDLSQLGGDGGEAAAKGSSGGSGGTLNIEDEYRLHETSKGPDVPLGSTWLSDFPQAWAETGGMGLAVRQAPLIIPLKATSTPVSIKQYPMSQEARLGIKPHIQRLLDQGILVPCQSPWNTPLLPVKKPGTNDYRPVQDLREVNKRVEDIHPTVPNPYNLLSGLPPSHQWYTVLDLKDAFFCLRLHPTSQSLFAFEWRDPEMGISGQLTWTRLPQGFKNSPTLFNEALHRDLADFRIQHPDLILLQYVDDLLLAATSELDCQQGTRALLQTLGDLGYRASAKKAQICQKQVKYLGYLLKEGQRWLTEARKETVMGQPTPKTPRQLREFLGKAGFCRLFIPGFAEMAAPLYPLTKPGTLFEWGPDQQKAYQEIKQALLTAPALGLPDLTKPFELFVDEKQGYAKGVLTQKLGPWRRPVAYLSKKLDPVAAGWPPCLRMVAAIAVLTKDAGKLTMGQPLVILAPHAVEALVKQPPDRWLSNARMTHYQALLLDTDRVQFGPIVALNPATLLPLPEEGLQHDCLDILAEAHGTRPDLTDQPLPDADHTWYTDGSSFLQEGQRKAGAAVTTETEVVWAKALPAGTSAQRAELIALTQALKMAEGKKLNVYTDSRYAFATAHIHGEIYRRRGWLTSEGKEIKNKDEILALLKALFLPKRLSIIHCPGHQKGNRAEARGNRMADQAAREVATRETPETSTLLAGKRTADGSEFEKRTADGSEFESPKKKAKVE

SEQ ID NO: 7116 - protein, 2096 aa, synthetic construct
MPAAKRVKLDGGDKKYSIGLDIGTNSVGWAVITDEYKVPSKKFKVLGNTDRHSIKKNLIGALLFDSGETAEATRLKRTARRRYTRRKNRICYLQEIFSNEMAKVDDSFFHRLEESFLVEEDKKHERHPIFGNIVDEVAYHEKYPTIYHLRKKLVDSTDKADLRLIYLALAHMIKFRGHFLIEGDLNPDNSDVDKLFIQLVQTYNQLFEENPINASGVDAKAILSARLSKSRRLENLIAQLPGEKKNGLFGNLIALSLGLTPNFKSNFDLAEDAKLQLSKDTYDDDLDNLLAQIGDQYADLFLAAKNLSDAILLSDILRVNTEITKAPLSASMIKRYDEHHQDLTLLKALVRQQLPEKYKEIFFDQSKNGYAGYIDGGASQEEFYKFIKPILEKMDGTEELLVKLNREDLLRKQRTFDNGSIPHQIHLGELHAILRRQEDFYPFLKDNREKIEKILTFRIPYYVGPLARGNSRFAWMTRKSEETITPWNFEEVVDKGASAQSFIERMTNFDKNLPNEKVLPKHSLLYEYFTVYNELTKVKYVTEGMRKPAFLSGEQKKAIVDLLFKTNRKVTVKQLKEDYFKKIECFDSVEISGVEDRFNASLGTYHDLLKIIKDKDFLDNEENEDILEDIVLTLTLFEDREMIEERLKTYAHLFDDKVMKQLKRRRYTGWGRLSRKLINGIRDKQSGKTILDFLKSDGFANRNFMQLIHDDSLTFKEDIQKAQVSGQGDSLHEHIANLAGSPAIKKGILQTVKVVDELVKVMGRHKPENIVIEMARENQTTQKGQKNSRERMKRIEEGIKELGSQILKEHPVENTQLQNEKLYLYYLQNGRDMYVDQELDINRLSDYDVDHIVPQSFLKDDSIDNKVLTRSDKARGKSDNVPSEEVVKKMKNYWRQLLNAKLITQRKFDNLTKAERGGLSELDKAGFIKRQLVETRQITKHVAQILDSRMNTKYDENDKLIREVKVITLKSKLVSDFRKDFQFYKVREINNYHHAHDAYLNAVVGTALIKKYPKLESEFVYGDYKVYDVRKMIAKSEQEIGKATAKYFFYSNIMNFFKTEITLANGEIRKRPLIETNGETGEIVWDKGRDFATVRKVLSMPQVNIVKKTEVQTGGFSKESILPKRNSDKLIARKKDWDPKKYGGFDSPTVAYSVLVVAKVEKGKSKKLKSVKELLGITIMERSSFEKNPIDFLEAKGYKEVKKDLIIKLPKYSLFELENGRKRMLASAGELQKGNELALPSKYVNFLYLASHYEKLKGSPEDNEQKQLFVEQHKHYLDEIIEQISEFSKRVILADANLDKVLSAYNKHRDKPIREQAENIIHLFTLTNLGAPAAFKYFDTTIDRKRYTSTKEVLDATLIHQSITGLYETRIDLSQLGGDGGEAAAKGSSGGSGGTLNIEDEHRLHETSKEPDVSLGSTWLSDFPQAWAETGGMGLAVRQAPLIIPLKATSTPVSIKQYPMSQEARLGIKPHIQRLLDQGILVPCQSPWNTPLLPVKKPGTNDYRPVQDLREVNKRVEDIHPTVPNPYNLLSGLPPSHQWYTVLDLKDAFFCLRLHPTSQPLFAFEWRDPEMGISGQLTWTRLPQGFKNSPTLFDEALHRDLADFRIQHPDLILLQYVDDLLLAATSELDCQQGTRALLQTLGNLGYRASAKKAQICQKQVKYLGYLLKEGQRWLTEARKETVMGQPTPKTPRQLREFLGTAGFCRLWIPGFAEMAAPLYPLTKTGTLFNWGPDQQKAYQEIKQALLTAPALGLPDLTKPFELFVDEKQGYAKGVLTQKLGPWRRPVAYLSKKLDPVAAGWPPCLRMVAAIAVLTKDAGKLTMGQPLVILAPHAVEALVKQPPDRWLSNARMTHYQALLLDTDRVQFGPVVALNPATLLPLPEEGLQHNCLDILAEAHGTRPDLTDQPLPDADHTWYTDGSSLLQEGQRKAGAAVTTETEVIWAKALPAGTSAQRAELIALTQALKMAEGKKLNVYTDSRYAFATAHIHGEIYRRRGLLTSEGKEIKNKDEILALLKALFLPKRLSIIHCPGHQKGHSAEARGNRMADQAARKAAITETPDTSTLLAGKRTADGSEFEKRTADGSEFESPKKKAKVE

SEQ ID NO: 7117 - protein, 2090 aa, synthetic construct
MPAAKRVKLDGGDKKYSIGLDIGTNSVGWAVITDEYKVPSKKFKVLGNTDRHSIKKNLIGALLFDSGETAEATRLKRTARRRYTRRKNRICYLQEIFSNEMAKVDDSFFHRLEESFLVEEDKKHERHPIFGNIVDEVAYHEKYPTIYHLRKKLVDSTDKADLRLIYLALAHMIKFRGHFLIEGDLNPDNSDVDKLFIQLVQTYNQLFEENPINASGVDAKAILSARLSKSRRLENLIAQLPGEKKNGLFGNLIALSLGLTPNFKSNFDLAEDAKLQLSKDTYDDDLDNLLAQIGDQYADLFLAAKNLSDAILLSDILRVNTEITKAPLSASMIKRYDEHHQDLTLLKALVRQQLPEKYKEIFFDQSKNGYAGYIDGGASQEEFYKFIKPILEKMDGTEELLVKLNREDLLRKQRTFDNGSIPHQIHLGELHAILRRQEDFYPFLKDNREKIEKILTFRIPYYVGPLARGNSRFAWMTRKSEETITPWNFEEVVDKGASAQSFIERMTNFDKNLPNEKVLPKHSLLYEYFTVYNELTKVKYVTEGMRKPAFLSGEQKKAIVDLLFKTNRKVTVKQLKEDYFKKIECFDSVEISGVEDRFNASLGTYHDLLKIIKDKDFLDNEENEDILEDIVLTLTLFEDREMIEERLKTYAHLFDDKVMKQLKRRRYTGWGRLSRKLINGIRDKQSGKTILDFLKSDGFANRNFMQLIHDDSLTFKEDIQKAQVSGQGDSLHEHIANLAGSPAIKKGILQTVKVVDELVKVMGRHKPENIVIEMARENQTTQKGQKNSRERMKRIEEGIKELGSQILKEHPVENTQLQNEKLYLYYLQNGRDMYVDQELDINRLSDYDVDHIVPQSFLKDDSIDNKVLTRSDKARGKSDNVPSEEVVKKMKNYWRQLLNAKLITQRKFDNLTKAERGGLSELDKAGFIKRQLVETRQITKHVAQILDSRMNTKYDENDKLIREVKVITLKSKLVSDFRKDFQFYKVREINNYHHAHDAYLNAVVGTALIKKYPKLESEFVYGDYKVYDVRKMIAKSEQEIGKATAKYFFYSNIMNFFKTEITLANGEIRKRPLIETNGETGEIVWDKGRDFATVRKVLSMPQVNIVKKTEVQTGGFSKESILPKRNSDKLIARKKDWDPKKYGGFDSPTVAYSVLVVAKVEKGKSKKLKSVKELLGITIMERSSFEKNPIDFLEAKGYKEVKKDLIIKLPKYSLFELENGRKRMLASAGELQKGNELALPSKYVNFLYLASHYEKLKGSPEDNEQKQLFVEQHKHYLDEIIEQISEFSKRVILADANLDKVLSAYNKHRDKPIREQAENIIHLFTLTNLGAPAAFKYFDTTIDRKRYTSTKEVLDATLIHQSITGLYETRIDLSQLGGDGGEAAAKGSSGGSGGTLQLDDEYRLYSPLVKPDQNIQFWLEQFPQAWAETAGMGLAKQVPPQVIQLKASATPVSVRQYPLSKEAQEGIRPHVQRLIQQGILVPVQSPWNTPLLPVRKPGTNDYRPVQDLREVNKRVQDIHPTVPNPYNLLCALPPQRSWYTVLDLKDAFFCLRLHPTSQPLFAFEWRDPGTGRTGQLTWTRLPQGFKNSPTIFDEALHRDLANFRIQHPQVTLLQYVDDLLLAGATKQDCLEGTKALLLELSDLGYRASAKKAQICRREVTYLGYSLRDGQRWLTEARKKTVVQIPAPTTAKQVREFLGTAGFCRLWIPGFATLAAPLYPLTKEKGEFSWAPEHQKAFDAIKKALLSAPALALPDVTKPFTLYVDERKGVARGVLTQTLGPWRRPVAYLSKKLDPVASGWPVCLKAIAAVAILVKDADKLTLGQNITVIAPHALENIVRQPPDRWMTNARMTHYQSLLLTERVTFAPPAALNPATLLPEETDEPVTHDCHQLLIEETGVRKDLTDIPLTGEVLTWFTDGSSYVVEGKRMAGAAVVDGTRTIWASSLPEGTSAQKAELMALTQALRLAEGKSINIYTDSRYAFATAHVHGAIYKQRGLLTSAGREIKNKEEILSLLEALHLPKRLAIIHCPGHQKAKDPISRGNQMADRVAKQAAQGVNLLAGKRTADGSEFEKRTADGSEFESPKKKAKVE

SEQ ID NO: 7118 - protein, 2176 aa, synthetic construct
MPAAKRVKLDGGDKKYSIGLDIGTNSVGWAVITDEYKVPSKKFKVLGNTDRHSIKKNLIGALLFDSGETAEATRLKRTARRRYTRRKNRICYLQEIFSNEMAKVDDSFFHRLEESFLVEEDKKHERHPIFGNIVDEVAYHEKYPTIYHLRKKLVDSTDKADLRLIYLALAHMIKFRGHFLIEGDLNPDNSDVDKLFIQLVQTYNQLFEENPINASGVDAKAILSARLSKSRRLENLIAQLPGEKKNGLFGNLIALSLGLTPNFKSNFDLAEDAKLQLSKDTYDDDLDNLLAQIGDQYADLFLAAKNLSDAILLSDILRVNTEITKAPLSASMIKRYDEHHQDLTLLKALVRQQLPEKYKEIFFDQSKNGYAGYIDGGASQEEFYKFIKPILEKMDGTEELLVKLNREDLLRKQRTFDNGSIPHQIHLGELHAILRRQEDFYPFLKDNREKIEKILTFRIPYYVGPLARGNSRFAWMTRKSEETITPWNFEEVVDKGASAQSFIERMTNFDKNLPNEKVLPKHSLLYEYFTVYNELTKVKYVTEGMRKPAFLSGEQKKAIVDLLFKTNRKVTVKQLKEDYFKKIECFDSVEISGVEDRFNASLGTYHDLLKIIKDKDFLDNEENEDILEDIVLTLTLFEDREMIEERLKTYAHLFDDKVMKQLKRRRYTGWGRLSRKLINGIRDKQSGKTILDFLKSDGFANRNFMQLIHDDSLTFKEDIQKAQVSGQGDSLHEHIANLAGSPAIKKGILQTVKVVDELVKVMGRHKPENIVIEMARENQTTQKGQKNSRERMKRIEEGIKELGSQILKEHPVENTQLQNEKLYLYYLQNGRDMYVDQELDINRLSDYDVDHIVPQSFLKDDSIDNKVLTRSDKARGKSDNVPSEEVVKKMKNYWRQLLNAKLITQRKFDNLTKAERGGLSELDKAGFIKRQLVETRQITKHVAQILDSRMNTKYDENDKLIREVKVITLKSKLVSDFRKDFQFYKVREINNYHHAHDAYLNAVVGTALIKKYPKLESEFVYGDYKVYDVRKMIAKSEQEIGKATAKYFFYSNIMNFFKTEITLANGEIRKRPLIETNGETGEIVWDKGRDFATVRKVLSMPQVNIVKKTEVQTGGFSKESILPKRNSDKLIARKKDWDPKKYGGFDSPTVAYSVLVVAKVEKGKSKKLKSVKELLGITIMERSSFEKNPIDFLEAKGYKEVKKDLIIKLPKYSLFELENGRKRMLASAGELQKGNELALPSKYVNFLYLASHYEKLKGSPEDNEQKQLFVEQHKHYLDEIIEQISEFSKRVILADANLDKVLSAYNKHRDKPIREQAENIIHLFTLTNLGAPAAFKYFDTTIDRKRYTSTKEVLDATLIHQSITGLYETRIDLSQLGGDGGEAAAKGSSGGSGGMDPLQLLQPLEAEIKGTKLKAHWNSGATITCVPQAFLEEEVPIKNIWIKTIHGEKEQPVYYLTFKIQGRKVEAEVISSPYDYILVSPSDIPWLMKKPLQLTTLVPLQEYEERLLKQTMLTGSYKEKLQSLFLKYDALWQHWENQVGHRRIKPHHIATGTVNPRPQKQYPINPKAKASIQTVINDLLKQGVLIQQNSIMNTPVYPVPKPDGKWRMVLDYREVNKTIPLIAAQNQHSAGILSSIFRGKYKTTLDLSNGFWAHSITPESYWLTAFTWLGQQYCWTRLPQGFLNSPALFNADVVDLLKEVPNVQVYVDDIYISHDDPREHLEQLEKVFSLLLNAGYVVSLKKSEIAQHEVEFLGFNITKEGRGLTETFKQKLLNITPPRDLKQLQSILGLLNFARNFIPNFSELVKPLYNIIATAPGKYITWTTDNSQQLQNIISMLNSAENLEERNPEVRLIMKVNTSPSAGYIRFYNEFAKRPIMYLNYVYTKAEVKFTNTEKLLTTIHKGLIKALDLGMGQEILVYSPIVSMTKIQKTPLPERKALPIRWITWMSYLEDPRIQFHYDKTLPELQQVPTVTDDIIAKIKHPSEFSMVFYTDGSAIKHPNVNKSHNAGMGIAQVQFKPEFTVINTWSIPLGDHTAQLAEVAAVEFACKKALKIDGPVLIVTDSFYVAESVNKELPYWQSNGFFNNKKKPLKHVSKWKSIADCIQLKPDIIIIHEKGHQPTASTFHTEGNNLADKLATQGSYVVNAGKRTADGSEFEKRTADGSEFESPKKKAKVE

SEQ ID NO: 7119 - protein, 2094 aa, synthetic construct
MPAAKRVKLDGGDKKYSIGLDIGTNSVGWAVITDEYKVPSKKFKVLGNTDRHSIKKNLIGALLFDSGETAEATRLKRTARRRYTRRKNRICYLQEIFSNEMAKVDDSFFHRLEESFLVEEDKKHERHPIFGNIVDEVAYHEKYPTIYHLRKKLVDSTDKADLRLIYLALAHMIKFRGHFLIEGDLNPDNSDVDKLFIQLVQTYNQLFEENPINASGVDAKAILSARLSKSRRLENLIAQLPGEKKNGLFGNLIALSLGLTPNFKSNFDLAEDAKLQLSKDTYDDDLDNLLAQIGDQYADLFLAAKNLSDAILLSDILRVNTEITKAPLSASMIKRYDEHHQDLTLLKALVRQQLPEKYKEIFFDQSKNGYAGYIDGGASQEEFYKFIKPILEKMDGTEELLVKLNREDLLRKQRTFDNGSIPHQIHLGELHAILRRQEDFYPFLKDNREKIEKILTFRIPYYVGPLARGNSRFAWMTRKSEETITPWNFEEVVDKGASAQSFIERMTNFDKNLPNEKVLPKHSLLYEYFTVYNELTKVKYVTEGMRKPAFLSGEQKKAIVDLLFKTNRKVTVKQLKEDYFKKIECFDSVEISGVEDRFNASLGTYHDLLKIIKDKDFLDNEENEDILEDIVLTLTLFEDREMIEERLKTYAHLFDDKVMKQLKRRRYTGWGRLSRKLINGIRDKQSGKTILDFLKSDGFANRNFMQLIHDDSLTFKEDIQKAQVSGQGDSLHEHIANLAGSPAIKKGILQTVKVVDELVKVMGRHKPENIVIEMARENQTTQKGQKNSRERMKRIEEGIKELGSQILKEHPVENTQLQNEKLYLYYLQNGRDMYVDQELDINRLSDYDVDHIVPQSFLKDDSIDNKVLTRSDKARGKSDNVPSEEVVKKMKNYWRQLLNAKLITQRKFDNLTKAERGGLSELDKAGFIKRQLVETRQITKHVAQILDSRMNTKYDENDKLIREVKVITLKSKLVSDFRKDFQFYKVREINNYHHAHDAYLNAVVGTALIKKYPKLESEFVYGDYKVYDVRKMIAKSEQEIGKATAKYFFYSNIMNFFKTEITLANGEIRKRPLIETNGETGEIVWDKGRDFATVRKVLSMPQVNIVKKTEVQTGGFSKESILPKRNSDKLIARKKDWDPKKYGGFDSPTVAYSVLVVAKVEKGKSKKLKSVKELLGITIMERSSFEKNPIDFLEAKGYKEVKKDLIIKLPKYSLFELENGRKRMLASAGELQKGNELALPSKYVNFLYLASHYEKLKGSPEDNEQKQLFVEQHKHYLDEIIEQISEFSKRVILADANLDKVLSAYNKHRDKPIREQAENIIHLFTLTNLGAPAAFKYFDTTIDRKRYTSTKEVLDATLIHQSITGLYETRIDLSQLGGDGGEAAAKGSSGGSGGVLNLEEEYRLHEKPVPSSIDPSWLQLFPTVWAERAGMGLANQVPPVVVELRSGASPVAVRQYPMSKEAREGIRPHIQRFLDLGVLVPCQSPWNTPLLPVKKPGTNDYRPVQDLREINKRVQDIHPTVPNPYNLLSSLPPSHTWYSVLDLKDAFFCLKLHPNSQPLFAFEWRDPEKGNTGQLTWTRLPQGFKNSPTLFDEALHRDLAPFRALNPQVVLLQYVDDLLVAAPTYRDCKEGTQKLLQELSKLGYRVSAKKAQLCQKEVTYLGYLLKEGKRWLTPARKATVMKIPPPTTPRQVREFLGTAGFCRLWIPGFASLAAPLYPLTKESIPFIWTEEHQKAFDRIKEALLSAPALALPDLTKPFTLYVDERAGVARGVLTQTLGPWRRPVAYLSKKLDPVASGWPTCLKAVAAVALLLKDADKLTLGQNVTVIASHSLESIVRQPPDRWMTNARMTHYQSLLLNERVSFAPPAVLNPATLLPVESEATPVHRCSEILAEETGTRRDLKDQPLPGVPAWYTDGSSFIAEGKRRAGAAIVDGKRTVWASSLPEGTSAQKAELVALTQALRLAEGKDINIYTDSRYAFATAHIHGAIYKQRGLLTSAGKDIKNKEEILALLEAIHLPKRVAIIHCPGHQKGNDPVATGNRRADEAAKQAALSTRVLAETTKPAGKRTADGSEFEKRTADGSEFESPKKKAKVE

SEQ ID NO: 7120 - protein, 2094 aa, synthetic construct
MPAAKRVKLDGGDKKYSIGLDIGTNSVGWAVITDEYKVPSKKFKVLGNTDRHSIKKNLIGALLFDSGETAEATRLKRTARRRYTRRKNRICYLQEIFSNEMAKVDDSFFHRLEESFLVEEDKKHERHPIFGNIVDEVAYHEKYPTIYHLRKKLVDSTDKADLRLIYLALAHMIKFRGHFLIEGDLNPDNSDVDKLFIQLVQTYNQLFEENPINASGVDAKAILSARLSKSRRLENLIAQLPGEKKNGLFGNLIALSLGLTPNFKSNFDLAEDAKLQLSKDTYDDDLDNLLAQIGDQYADLFLAAKNLSDAILLSDILRVNTEITKAPLSASMIKRYDEHHQDLTLLKALVRQQLPEKYKEIFFDQSKNGYAGYIDGGASQEEFYKFIKPILEKMDGTEELLVKLNREDLLRKQRTFDNGSIPHQIHLGELHAILRRQEDFYPFLKDNREKIEKILTFRIPYYVGPLARGNSRFAWMTRKSEETITPWNFEEVVDKGASAQSFIERMTNFDKNLPNEKVLPKHSLLYEYFTVYNELTKVKYVTEGMRKPAFLSGEQKKAIVDLLFKTNRKVTVKQLKEDYFKKIECFDSVEISGVEDRFNASLGTYHDLLKIIKDKDFLDNEENEDILEDIVLTLTLFEDREMIEERLKTYAHLFDDKVMKQLKRRRYTGWGRLSRKLINGIRDKQSGKTILDFLKSDGFANRNFMQLIHDDSLTFKEDIQKAQVSGQGDSLHEHIANLAGSPAIKKGILQTVKVVDELVKVMGRHKPENIVIEMARENQTTQKGQKNSRERMKRIEEGIKELGSQILKEHPVENTQLQNEKLYLYYLQNGRDMYVDQELDINRLSDYDVDHIVPQSFLKDDSIDNKVLTRSDKARGKSDNVPSEEVVKKMKNYWRQLLNAKLITQRKFDNLTKAERGGLSELDKAGFIKRQLVETRQITKHVAQILDSRMNTKYDENDKLIREVKVITLKSKLVSDFRKDFQFYKVREINNYHHAHDAYLNAVVGTALIKKYPKLESEFVYGDYKVYDVRKMIAKSEQEIGKATAKYFFYSNIMNFFKTEITLANGEIRKRPLIETNGETGEIVWDKGRDFATVRKVLSMPQVNIVKKTEVQTGGFSKESILPKRNSDKLIARKKDWDPKKYGGFDSPTVAYSVLVVAKVEKGKSKKLKSVKELLGITIMERSSFEKNPIDFLEAKGYKEVKKDLIIKLPKYSLFELENGRKRMLASAGELQKGNELALPSKYVNFLYLASHYEKLKGSPEDNEQKQLFVEQHKHYLDEIIEQISEFSKRVILADANLDKVLSAYNKHRDKPIREQAENIIHLFTLTNLGAPAAFKYFDTTIDRKRYTSTKEVLDATLIHQSITGLYETRIDLSQLGGDGGEAAAKGSSGGSGGVLNLEEEYRLHEKPVPSSIDPSWLQLFPTVWAERAGMGLANQVPPVVVELRSGASPVAVRQYPMSKEAREGIRPHIQRFLDLGVLVPCQSPWNTPLLPVKKPGTNDYRPVQDLREINKRVQDIHPTVPNPYNLLSSLPPSHTWYSVLDLKDAFFCLKLHPNSQPLFAFEWRDPEKGNTGQLTWTRLPQGFKNSPTLFNEALHRDLAPFRALNPQVVLLQYVDDLLVAAPTYRDCKEGTQKLLQELSKLGYRVSAKKAQLCQKEVTYLGYLLKEGKRWLTPARKATVMKIPPPTTPRQVREFLGTAGFCRLWIPGFASLAAPLYPLTKPSIPFIWTEEHQKAFDRIKEALLSAPALALPDLTKPFTLYVDERAGVARGVLTQTLGPWRRPVAYLSKKLDPVASGWPTCLKAVAAVALLLKDADKLTLGQNVTVIASHSLESIVRQPPDRWMTNARMTHYQSLLLNERVSFAPPAVLNPATLLPVESEATPVHRCSEILAEETGTRRDLKDQPLPGVPAWYTDGSSFIAEGKRRAGAAIVDGKRTVWASSLPEGTSAQKAELVALTQALRLAEGKDINIYTDSRYAFATAHIHGAIYKQRGWLTSAGKDIKNKEEILALLEAIHLPKRVAIIHCPGHQKGNDPVATGNRRADEAAKQAALSTRVLAETTKPAGKRTADGSEFEKRTADGSEFESPKKKAKVE

SEQ ID NO: 7121 - protein, 2096 aa, synthetic construct; identical to SEQ ID NO: 4524

SEQ ID NO: 7122 - protein, 2096 aa, synthetic construct
MPAAKRVKLDGGDKKYSIGLDIGTNSVGWAVITDEYKVPSKKFKVLGNTDRHSIKKNLIGALLFDSGETAEATRLKRTARRRYTRRKNRICYLQEIFSNEMAKVDDSFFHRLEESFLVEEDKKHERHPIFGNIVDEVAYHEKYPTIYHLRKKLVDSTDKADLRLIYLALAHMIKFRGHFLIEGDLNPDNSDVDKLFIQLVQTYNQLFEENPINASGVDAKAILSARLSKSRRLENLIAQLPGEKKNGLFGNLIALSLGLTPNFKSNFDLAEDAKLQLSKDTYDDDLDNLLAQIGDQYADLFLAAKNLSDAILLSDILRVNTEITKAPLSASMIKRYDEHHQDLTLLKALVRQQLPEKYKEIFFDQSKNGYAGYIDGGASQEEFYKFIKPILEKMDGTEELLVKLNREDLLRKQRTFDNGSIPHQIHLGELHAILRRQEDFYPFLKDNREKIEKILTFRIPYYVGPLARGNSRFAWMTRKSEETITPWNFEEVVDKGASAQSFIERMTNFDKNLPNEKVLPKHSLLYEYFTVYNELTKVKYVTEGMRKPAFLSGEQKKAIVDLLFKTNRKVTVKQLKEDYFKKIECFDSVEISGVEDRFNASLGTYHDLLKIIKDKDFLDNEENEDILEDIVLTLTLFEDREMIEERLKTYAHLFDDKVMKQLKRRRYTGWGRLSRKLINGIRDKQSGKTILDFLKSDGFANRNFMQLIHDDSLTFKEDIQKAQVSGQGDSLHEHIANLAGSPAIKKGILQTVKVVDELVKVMGRHKPENIVIEMARENQTTQKGQKNSRERMKRIEEGIKELGSQILKEHPVENTQLQNEKLYLYYLQNGRDMYVDQELDINRLSDYDVDHIVPQSFLKDDSIDNKVLTRSDKARGKSDNVPSEEVVKKMKNYWRQLLNAKLITQRKFDNLTKAERGGLSELDKAGFIKRQLVETRQITKHVAQILDSRMNTKYDENDKLIREVKVITLKSKLVSDFRKDFQFYKVREINNYHHAHDAYLNAVVGTALIKKYPKLESEFVYGDYKVYDVRKMIAKSEQEIGKATAKYFFYSNIMNFFKTEITLANGEIRKRPLIETNGETGEIVWDKGRDFATVRKVLSMPQVNIVKKTEVQTGGFSKESILPKRNSDKLIARKKDWDPKKYGGFDSPTVAYSVLVVAKVEKGKSKKLKSVKELLGITIMERSSFEKNPIDFLEAKGYKEVKKDLIIKLPKYSLFELENGRKRMLASAGELQKGNELALPSKYVNFLYLASHYEKLKGSPEDNEQKQLFVEQHKHYLDEIIEQISEFSKRVILADANLDKVLSAYNKHRDKPIREQAENIIHLFTLTNLGAPAAFKYFDTTIDRKRYTSTKEVLDATLIHQSITGLYETRIDLSQLGGDGGGGSGSSPAPGGTAPLEEEYRLFLEAPIQNVTLLEQWKREIPKVWAEINPPGLASTQAPIHVQLLSTALPVRVRQYPITLEAKRSLRETIRKFRAAGILRPVHSPWNTPLLPVRKSGTSEYRMVQDLREVNKRVETIHPTVPNPYTLLSLLPPDRIWYSVLDLKDAFFCIPLAPESQLIFAFEWADAEEGESGQLTWTRLPQGFKNSPTLFNEALNRDLQGFRLDHPSVSLLQYVDDLLIAADTQAACLSATRDLLMTLAELGYRVSGKKAQLCQEEVTYLGFKIHKGSRSLSNSRTQAILQIPVPKTKRQVREFLGTIGYCRLWIPGFAELAQPLYAATRPGNDPLVWGEKEEEAFQSLKLALTQPPALALPSLDKPFQLFVEETSGAAKGVLTQALGPWKRPVAYLSKRLDPVAAGWPRCLRAIAAAALLTREASKLTFGQDIEITSSHNLESLLRSPPDKWLTNARITQYQVLLLDPPRVRFKQTAALNPATLLPETDDTLPIHHCLDTLDSLTSTRPDLTDQPLAQAEATLFTDGSSYIRDGKRYAGAAVVTLDSVIWAEPLPIGTSAQKAELIALTKALEWSKDKSVNIYTDSRYAFATLHVHGMIYRERGWLTAGGKAIKNAPEILALLTAVWLPKRVAVMHCKGHQKDDAPTSTGNRRADEVAREVAIRPLSTQATISAGKRTADGSEFEKRTADGSEFESPKKKAKVE

SEQ ID NO: 7123 - protein, 2096 aa, synthetic construct
MPAAKRVKLDGGDKKYSIGLDIGTNSVGWAVITDEYKVPSKKFKVLGNTDRHSIKKNLIGALLFDSGETAEATRLKRTARRRYTRRKNRICYLQEIFSNEMAKVDDSFFHRLEESFLVEEDKKHERHPIFGNIVDEVAYHEKYPTIYHLRKKLVDSTDKADLRLIYLALAHMIKFRGHFLIEGDLNPDNSDVDKLFIQLVQTYNQLFEENPINASGVDAKAILSARLSKSRRLENLIAQLPGEKKNGLFGNLIALSLGLTPNFKSNFDLAEDAKLQLSKDTYDDDLDNLLAQIGDQYADLFLAAKNLSDAILLSDILRVNTEITKAPLSASMIKRYDEHHQDLTLLKALVRQQLPEKYKEIFFDQSKNGYAGYIDGGASQEEFYKFIKPILEKMDGTEELLVKLNREDLLRKQRTFDNGSIPHQIHLGELHAILRRQEDFYPFLKDNREKIEKILTFRIPYYVGPLARGNSRFAWMTRKSEETITPWNFEEVVDKGASAQSFIERMTNFDKNLPNEKVLPKHSLLYEYFTVYNELTKVKYVTEGMRKPAFLSGEQKKAIVDLLFKTNRKVTVKQLKEDYFKKIECFDSVEISGVEDRFNASLGTYHDLLKIIKDKDFLDNEENEDILEDIVLTLTLFEDREMIEERLKTYAHLFDDKVMKQLKRRRYTGWGRLSRKLINGIRDKQSGKTILDFLKSDGFANRNFMQLIHDDSLTFKEDIQKAQVSGQGDSLHEHIANLAGSPAIKKGILQTVKVVDELVKVMGRHKPENIVIEMARENQTTQKGQKNSRERMKRIEEGIKELGSQILKEHPVENTQLQNEKLYLYYLQNGRDMYVDQELDINRLSDYDVDHIVPQSFLKDDSIDNKVLTRSDKARGKSDNVPSEEVVKKMKNYWRQLLNAKLITQRKFDNLTKAERGGLSELDKAGFIKRQLVETRQITKHVAQILDSRMNTKYDENDKLIREVKVITLKSKLVSDFRKDFQFYKVREINNYHHAHDAYLNAVVGTALIKKYPKLESEFVYGDYKVYDVRKMIAKSEQEIGKATAKYFFYSNIMNFFKTEITLANGEIRKRPLIETNGETGEIVWDKGRDFATVRKVLSMPQVNIVKKTEVQTGGFSKESILPKRNSDKLIARKKDWDPKKYGGFDSPTVAYSVLVVAKVEKGKSKKLKSVKELLGITIMERSSFEKNPIDFLEAKGYKEVKKDLIIKLPKYSLFELENGRKRMLASAGELQKGNELALPSKYVNFLYLASHYEKLKGSPEDNEQKQLFVEQHKHYLDEIIEQISEFSKRVILADANLDKVLSAYNKHRDKPIREQAENIIHLFTLTNLGAPAAFKYFDTTIDRKRYTSTKEVLDATLIHQSITGLYETRIDLSQLGGDGGGGSGSSPAPGGTAPLEEEYRLFLEAPIQNVTLLEQWKREIPKVWAEINPPGLASTQAPIHVQLLSTALPVRVRQYPITLEAKRSLRETIRKFRAAGILRPVHSPWNTPLLPVRKSGTSEYRMVQDLREVNKRVETIHPTVPNPYTLLSLLPPDRIWYSVLDLKDAFFCIPLAPESQLIFAFEWADAEEGESGQLTWTRLPQGFKNSPTLFNEALNRDLQGFRLDHPSVSLLQYVDDLLIAADTQAACLSATRDLLMTLAELGYRVSGKKAQLCQEEVTYLGFKIHKGSRSLSNSRTQAILQIPVPKTKRQVREFLGKIGYCRLFIPGFAELAQPLYAATRPGNDPLVWGEKEEEAFQSLKLALTQPPALALPSLDKPFQLFVEETSGAAKGVLTQALGPWKRPVAYLSKRLDPVAAGWPRCLRAIAAAALLTREASKLTFGQDIEITSSHNLESLLRSPPDKWLTNARITQYQVLLLDPPRVRFKQTAALNPATLLPETDDTLPIHHCLDTLDSLTSTRPDLTDQPLAQAEATLFTDGSSYIRDGKRYAGAAVVTLDSVIWAEPLPIGTSAQKAELIALTKALEWSKDKSVNIYTDSRYAFATLHVHGMIYRERGWLTAGGKAIKNAPEILALLTAVWLPKRVAVMHCKGHQKDDAPTSTGNRRADEVAREVAIRPLSTQATISAGKRTADGSEFEKRTADGSEFESPKKKAKVE

SEQ ID NO: 7124 - protein, 2093 aa, synthetic construct
MPAAKRVKLDGGDKKYSIGLDIGTNSVGWAVITDEYKVPSKKFKVLGNTDRHSIKKNLIGALLFDSGETAEATRLKRTARRRYTRRKNRICYLQEIFSNEMAKVDDSFFHRLEESFLVEEDKKHERHPIFGNIVDEVAYHEKYPTIYHLRKKLVDSTDKADLRLIYLALAHMIKFRGHFLIEGDLNPDNSDVDKLFIQLVQTYNQLFEENPINASGVDAKAILSARLSKSRRLENLIAQLPGEKKNGLFGNLIALSLGLTPNFKSNFDLAEDAKLQLSKDTYDDDLDNLLAQIGDQYADLFLAAKNLSDAILLSDILRVNTEITKAPLSASMIKRYDEHHQDLTLLKALVRQQLPEKYKEIFFDQSKNGYAGYIDGGASQEEFYKFIKPILEKMDGTEELLVKLNREDLLRKQRTFDNGSIPHQIHLGELHAILRRQEDFYPFLKDNREKIEKILTFRIPYYVGPLARGNSRFAWMTRKSEETITPWNFEEVVDKGASAQSFIERMTNFDKNLPNEKVLPKHSLLYEYFTVYNELTKVKYVTEGMRKPAFLSGEQKKAIVDLLFKTNRKVTVKQLKEDYFKKIECFDSVEISGVEDRFNASLGTYHDLLKIIKDKDFLDNEENEDILEDIVLTLTLFEDREMIEERLKTYAHLFDDKVMKQLKRRRYTGWGRLSRKLINGIRDKQSGKTILDFLKSDGFANRNFMQLIHDDSLTFKEDIQKAQVSGQGDSLHEHIANLAGSPAIKKGILQTVKVVDELVKVMGRHKPENIVIEMARENQTTQKGQKNSRERMKRIEEGIKELGSQILKEHPVENTQLQNEKLYLYYLQNGRDMYVDQELDINRLSDYDVDHIVPQSFLKDDSIDNKVLTRSDKARGKSDNVPSEEVVKKMKNYWRQLLNAKLITQRKFDNLTKAERGGLSELDKAGFIKRQLVETRQITKHVAQILDSRMNTKYDENDKLIREVKVITLKSKLVSDFRKDFQFYKVREINNYHHAHDAYLNAVVGTALIKKYPKLESEFVYGDYKVYDVRKMIAKSEQEIGKATAKYFFYSNIMNFFKTEITLANGEIRKRPLIETNGETGEIVWDKGRDFATVRKVLSMPQVNIVKKTEVQTGGFSKESILPKRNSDKLIARKKDWDPKKYGGFDSPTVAYSVLVVAKVEKGKSKKLKSVKELLGITIMERSSFEKNPIDFLEAKGYKEVKKDLIIKLPKYSLFELENGRKRMLASAGELQKGNELALPSKYVNFLYLASHYEKLKGSPEDNEQKQLFVEQHKHYLDEIIEQISEFSKRVILADANLDKVLSAYNKHRDKPIREQAENIIHLFTLTNLGAPAAFKYFDTTIDRKRYTSTKEVLDATLIHQSITGLYETRIDLSQLGGDGGGGSGSSPAPGGTLQLEEEYRLFEPESTQKQEMDIWLKNFPQAWAETGGMGTAHCQAPVLIQLKATATPISIRQYPMPHEAYQGIKPHIRRMLDQGILKPCQSPWNTPLLPVKKPGTEDYRPVQDLREVNKRVEDIHPTVPNPYNLLSTLPPSHPWYTVLDLKDAFFCLRLHSESQLLFAFEWRDPEIGLSGQLTWTRLPQGFKNSPTLFNEALHSDLADFRVRYPALVLLQYVDDLLLAAATRTECLEGTKALLETLGNKGYRASAKKAQICLQEVTYLGYSLKDGQRWLTKARKEAILSIPVPKNSRQVREFLGTAGYCRLWIPGFAELAAPLYPLTRPGTLFQWGTEQQLAFEDIKKALLSSPALGLPDITKPFELFIDENSGFAKGVLVQKLGPWKRPVAYLSKKLDTVASGWPPCLRMVAAIAILVKDAGKLTLGQPLTILTSHPVEALVRQPPNKWLSNARMTHYQAMLLDAERVHFGPTVSLNPATLLPLPSGGNHHDCLQILAETHGTRPDLTDQPLPDADLTWYTDGSSFIRNGEREAGAAVTTESEVIWAAPLPPGTSAQRAELIALTQALKMAEGKKLTVYTDSRYAFATTHVHGEIYRRRGWLTSEGKEIKNKNEILALLEALFLPKRLSIIHCPGHQKGDSPQAKGNRLADDTAKKAATETHSSLTVLPAGKRTADGSEFEKRTADGSEFESPKKKAKVE

SEQ ID NO: 7125 - protein, 2085 aa, synthetic construct
MPAAKRVKLDGGDKKYSIGLDIGTNSVGWAVITDEYKVPSKKFKVLGNTDRHSIKKNLIGALLFDSGETAEATRLKRTARRRYTRRKNRICYLQEIFSNEMAKVDDSFFHRLEESFLVEEDKKHERHPIFGNIVDEVAYHEKYPTIYHLRKKLVDSTDKADLRLIYLALAHMIKFRGHFLIEGDLNPDNSDVDKLFIQLVQTYNQLFEENPINASGVDAKAILSARLSKSRRLENLIAQLPGEKKNGLFGNLIALSLGLTPNFKSNFDLAEDAKLQLSKDTYDDDLDNLLAQIGDQYADLFLAAKNLSDAILLSDILRVNTEITKAPLSASMIKRYDEHHQDLTLLKALVRQQLPEKYKEIFFDQSKNGYAGYIDGGASQEEFYKFIKPILEKMDGTEELLVKLNREDLLRKQRTFDNGSIPHQIHLGELHAILRRQEDFYPFLKDNREKIEKILTFRIPYYVGPLARGNSRFAWMTRKSEETITPWNFEEVVDKGASAQSFIERMTNFDKNLPNEKVLPKHSLLYEYFTVYNELTKVKYVTEGMRKPAFLSGEQKKAIVDLLFKTNRKVTVKQLKEDYFKKIECFDSVEISGVEDRFNASLGTYHDLLKIIKDKDFLDNEENEDILEDIVLTLTLFEDREMIEERLKTYAHLFDDKVMKQLKRRRYTGWGRLSRKLINGIRDKQSGKTILDFLKSDGFANRNFMQLIHDDSLTFKEDIQKAQVSGQGDSLHEHIANLAGSPAIKKGILQTVKVVDELVKVMGRHKPENIVIEMARENQTTQKGQKNSRERMKRIEEGIKELGSQILKEHPVENTQLQNEKLYLYYLQNGRDMYVDQELDINRLSDYDVDHIVPQSFLKDDSIDNKVLTRSDKARGKSDNVPSEEVVKKMKNYWRQLLNAKLITQRKFDNLTKAERGGLSELDKAGFIKRQLVETRQITKHVAQILDSRMNTKYDENDKLIREVKVITLKSKLVSDFRKDFQFYKVREINNYHHAHDAYLNAVVGTALIKKYPKLESEFVYGDYKVYDVRKMIAKSEQEIGKATAKYFFYSNIMNFFKTEITLANGEIRKRPLIETNGETGEIVWDKGRDFATVRKVLSMPQVNIVKKTEVQTGGFSKESILPKRNSDKLIARKKDWDPKKYGGFDSPTVAYSVLVVAKVEKGKSKKLKSVKELLGITIMERSSFEKNPIDFLEAKGYKEVKKDLIIKLPKYSLFELENGRKRMLASAGELQKGNELALPSKYVNFLYLASHYEKLKGSPEDNEQKQLFVEQHKHYLDEIIEQISEFSKRVILADANLDKVLSAYNKHRDKPIREQAENIIHLFTLTNLGAPAAFKYFDTTIDRKRYTSTKEVLDATLIHQSITGLYETRIDLSQLGGDGGGGSGSSPAPGGVPWLTQQPLQLTILVPLQEYQEKILSKTALPEDQKQQLKTLFVKYDNLWQHWENQVGHRKIRPHNIATGDYPPRPQKQYPINPKAKPSIQIVIDDLLKQGVLTPQNSTMNTPVYPVPKPDGRWRMVLDYREVNKTIPLTAAQNQHSAGILATIVRQKYKTTLDLANGFWAHPITPESYWLTAFTWQGKQYCWTRLPQGFLNSPALFNADVVDLLKEIPNVQVYVDDIYLSHDDPKEHVQQLEKVFQILLQAGYVVSLKKSEIGQKTVEFLGFNITKEGRGLTDTFKTKLLNITPPKDLKQLQSILGLLNFARNFIPNFAELVQPLYNLIAPAKGKYIEWSEENTKQLNMVIEALNTASNLEERLPEQRLVIKVNTSPSAGYVRYYNETGKKPIMYLNYVFSKAELKFSMLEKLLTTMHKALIKAMDLAMGQEILVYSPIVSMTKIQKTPLPERKALPIRWITWMTYLEDPRIQFHYDKTLPELKHIPDVYTSSQSPVKHPSQYEGVFYTDGSAIKSPDPTKSNNAGMGIVHATYKPEYQVLNQWSIPLGNHTAQMAEIAAVEFACKKALKIPGPVLVITDSFYVAESANKELPYWKSNGFVNNKKKPLKHISKWKSIAECLSMKPDITIQHEKGISLQIPVFILKGNALADKLATQGSYVVNAGKRTADGSEFEKRTADGSEFESPKKKAKVE

SEQ ID NO: 7126 - protein, 2216 aa, synthetic construct
MPAAKRVKLDGGDKKYSIGLDIGTNSVGWAVITDEYKVPSKKFKVLGNTDRHSIKKNLIGALLFDSGETAEATRLKRTARRRYTRRKNRICYLQEIFSNEMAKVDDSFFHRLEESFLVEEDKKHERHPIFGNIVDEVAYHEKYPTIYHLRKKLVDSTDKADLRLIYLALAHMIKFRGHFLIEGDLNPDNSDVDKLFIQLVQTYNQLFEENPINASGVDAKAILSARLSKSRRLENLIAQLPGEKKNGLFGNLIALSLGLTPNFKSNFDLAEDAKLQLSKDTYDDDLDNLLAQIGDQYADLFLAAKNLSDAILLSDILRVNTEITKAPLSASMIKRYDEHHQDLTLLKALVRQQLPEKYKEIFFDQSKNGYAGYIDGGASQEEFYKFIKPILEKMDGTEELLVKLNREDLLRKQRTFDNGSIPHQIHLGELHAILRRQEDFYPFLKDNREKIEKILTFRIPYYVGPLARGNSRFAWMTRKSEETITPWNFEEVVDKGASAQSFIERMTNFDKNLPNEKVLPKHSLLYEYFTVYNELTKVKYVTEGMRKPAFLSGEQKKAIVDLLFKTNRKVTVKQLKEDYFKKIECFDSVEISGVEDRFNASLGTYHDLLKIIKDKDFLDNEENEDILEDIVLTLTLFEDREMIEERLKTYAHLFDDKVMKQLKRRRYTGWGRLSRKLINGIRDKQSGKTILDFLKSDGFANRNFMQLIHDDSLTFKEDIQKAQVSGQGDSLHEHIANLAGSPAIKKGILQTVKVVDELVKVMGRHKPENIVIEMARENQTTQKGQKNSRERMKRIEEGIKELGSQILKEHPVENTQLQNEKLYLYYLQNGRDMYVDQELDINRLSDYDVDHIVPQSFLKDDSIDNKVLTRSDKARGKSDNVPSEEVVKKMKNYWRQLLNAKLITQRKFDNLTKAERGGLSELDKAGFIKRQLVETRQITKHVAQILDSRMNTKYDENDKLIREVKVITLKSKLVSDFRKDFQFYKVREINNYHHAHDAYLNAVVGTALIKKYPKLESEFVYGDYKVYDVRKMIAKSEQEIGKATAKYFFYSNIMNFFKTEITLANGEIRKRPLIETNGETGEIVWDKGRDFATVRKVLSMPQVNIVKKTEVQTGGFSKESILPKRNSDKLIARKKDWDPKKYGGFDSPTVAYSVLVVAKVEKGKSKKLKSVKELLGITIMERSSFEKNPIDFLEAKGYKEVKKDLIIKLPKYSLFELENGRKRMLASAGELQKGNELALPSKYVNFLYLASHYEKLKGSPEDNEQKQLFVEQHKHYLDEIIEQISEFSKRVILADANLDKVLSAYNKHRDKPIREQAENIIHLFTLTNLGAPAAFKYFDTTIDRKRYTSTKEVLDATLIHQSITGLYETRIDLSQLGGDGGGGSGSSPAPGGTLGDQGSRGSDPLPEPRVTLTVEGIPTEFLVNTGAEHSVLTKPMGKMGSKRTVVAGATGSKVYPWTTKRLLKIGQKQVTHSFLVIPECPAPLLGRDLLTKLKAQIQFSTEGPQVTWEDRPAMCLVLNLEEEYRLHEKPVPPSIDPSWLQLFPMVWAEKAGMGLANQVPPVVVELKSDASPVAVRQYPMSKEAREGIRPHIQRFLDLGILVPCQSPWNTPLLPVKKPGTNDYRPVQDLREVNKRVQDIHPTVPNPYNLLSSLPPSHTWYSVLDLKDAFFCLKLHPNSQPLFAFEWRDPEKGNTGQLTWTRLPQGFKNSPTLFDEALHRDLASFRALNPQVVMLQYVDDLLVAAPTYRDCKEGTRRLLQELSKLGYRVSAKKAQLCREEVTYLGYLLKGGKRWLTPARKATVMKIPTPTTPRQVREFLGTAGFCRLWIPGFASLAAPLYPLTREKVPFTWTEAHQEAFGRIKEALLSAPALALPDLTKPFALYVDEKEGVARGVLTQTLGPWRRPVAYLSKKLDPVASGWPTCLKAIAAVALLLKDADKLTLGQNVLVIAPHNLESIVRQPPDRWMTNARMTHYQSLLLNERVSFAPPAILNPATLLPVESDDTPIHICSEILAEETGTRPDLRDQPLPGVPAWYTDGSSFIMDGRRQAGAAIVDNKRTVWASNLPEGTSAQKAELIALTQALRLAEGKSINIYTDSRYAFATAHVHGAIYKQRGLLTSAGKDIKNKEEILALLEAIHLPKRVAIIHCPGHQRGTDPVATGNRKADEAAKQAAQSTRILTETTKNAGKRTADGSEFEKRTADGSEFESPKKKAKVE

SEQ ID NO: 7127 - protein, 2125 aa, synthetic construct
MPAAKRVKLDGGDKKYSIGLDIGTNSVGWAVITDEYKVPSKKFKVLGNTDRHSIKKNLIGALLFDSGETAEATRLKRTARRRYTRRKNRICYLQEIFSNEMAKVDDSFFHRLEESFLVEEDKKHERHPIFGNIVDEVAYHEKYPTIYHLRKKLVDSTDKADLRLIYLALAHMIKFRGHFLIEGDLNPDNSDVDKLFIQLVQTYNQLFEENPINASGVDAKAILSARLSKSRRLENLIAQLPGEKKNGLFGNLIALSLGLTPNFKSNFDLAEDAKLQLSKDTYDDDLDNLLAQIGDQYADLFLAAKNLSDAILLSDILRVNTEITKAPLSASMIKRYDEHHQDLTLLKALVRQQLPEKYKEIFFDQSKNGYAGYIDGGASQEEFYKFIKPILEKMDGTEELLVKLNREDLLRKQRTFDNGSIPHQIHLGELHAILRRQEDFYPFLKDNREKIEKILTFRIPYYVGPLARGNSRFAWMTRKSEETITPWNFEEVVDKGASAQSFIERMTNFDKNLPNEKVLPKHSLLYEYFTVYNELTKVKYVTEGMRKPAFLSGEQKKAIVDLLFKTNRKVTVKQLKEDYFKKIECFDSVEISGVEDRFNASLGTYHDLLKIIKDKDFLDNEENEDILEDIVLTLTLFEDREMIEERLKTYAHLFDDKVMKQLKRRRYTGWGRLSRKLINGIRDKQSGKTILDFLKSDGFANRNFMQLIHDDSLTFKEDIQKAQVSGQGDSLHEHIANLAGSPAIKKGILQTVKVVDELVKVMGRHKPENIVIEMARENQTTQKGQKNSRERMKRIEEGIKELGSQILKEHPVENTQLQNEKLYLYYLQNGRDMYVDQELDINRLSDYDVDHIVPQSFLKDDSIDNKVLTRSDKARGKSDNVPSEEVVKKMKNYWRQLLNAKLITQRKFDNLTKAERGGLSELDKAGFIKRQLVETRQITKHVAQILDSRMNTKYDENDKLIREVKVITLKSKLVSDFRKDFQFYKVREINNYHHAHDAYLNAVVGTALIKKYPKLESEFVYGDYKVYDVRKMIAKSEQEIGKATAKYFFYSNIMNFFKTEITLANGEIRKRPLIETNGETGEIVWDKGRDFATVRKVLSMPQVNIVKKTEVQTGGFSKESILPKRNSDKLIARKKDWDPKKYGGFDSPTVAYSVLVVAKVEKGKSKKLKSVKELLGITIMERSSFEKNPIDFLEAKGYKEVKKDLIIKLPKYSLFELENGRKRMLASAGELQKGNELALPSKYVNFLYLASHYEKLKGSPEDNEQKQLFVEQHKHYLDEIIEQISEFSKRVILADANLDKVLSAYNKHRDKPIREQAENIIHLFTLTNLGAPAAFKYFDTTIDRKRYTSTKEVLDATLIHQSITGLYETRIDLSQLGGDGGGGSGSSPAPGGLLGRDLLTKLKAQIQFSTEGPQVTWEDRPAMCLVLNLEEEYRLHEKPVPPSIDPSWLQLFPMVWAEKAGMGLANQVPPVVVELKSDASPVAVRQYPMSKEAREGIRPHIQRFLDLGILVPCQSPWNTPLLPVKKPGTNDYRPVQDLREVNKRVQDIHPTVPNPYNLLSSLPPSHTWYSVLDLKDAFFCLKLHPNSQPLFAFEWRDPEKGNTGQLTWTRLPQGFKNSPTLFNEALHRDLASFRALNPQVVMLQYVDDLLVAAPTYRDCKEGTRRLLQELSKLGYRVSAKKAQLCREEVTYLGYLLKGGKRWLTPARKATVMKIPTPTTPRQVREFLGKAGFCRLFIPGFASLAAPLYPLTRPKVPFTWTEAHQEAFGRIKEALLSAPALALPDLTKPFALYVDEKEGVARGVLTQTLGPWRRPVAYLSKKLDPVASGWPTCLKAIAAVALLLKDADKLTLGQNVLVIAPHNLESIVRQPPDRWMTNARMTHYQSLLLNERVSFAPPAILNPATLLPVESDDTPIHICSEILAEETGTRPDLRDQPLPGVPAWYTDGSSFIMDGRRQAGAAIVDNKRTVWASNLPEGTSAQKAELIALTQALRLAEGKSINIYTDSRYAFATAHVHGAIYKQRGWLTSAGKDIKNKEEILALLEAIHLPKRVAIIHCPGHQRGTDPVATGNRKADEAAKQAAQSTRILTETTKNAGKRTADGSEFEKRTADGSEFESPKKKAKVE

SEQ ID NO: 7128 - protein, 2216 aa, synthetic construct
MPAAKRVKLDGGDKKYSIGLDIGTNSVGWAVITDEYKVPSKKFKVLGNTDRHSIKKNLIGALLFDSGETAEATRLKRTARRRYTRRKNRICYLQEIFSNEMAKVDDSFFHRLEESFLVEEDKKHERHPIFGNIVDEVAYHEKYPTIYHLRKKLVDSTDKADLRLIYLALAHMIKFRGHFLIEGDLNPDNSDVDKLFIQLVQTYNQLFEENPINASGVDAKAILSARLSKSRRLENLIAQLPGEKKNGLFGNLIALSLGLTPNFKSNFDLAEDAKLQLSKDTYDDDLDNLLAQIGDQYADLFLAAKNLSDAILLSDILRVNTEITKAPLSASMIKRYDEHHQDLTLLKALVRQQLPEKYKEIFFDQSKNGYAGYIDGGASQEEFYKFIKPILEKMDGTEELLVKLNREDLLRKQRTFDNGSIPHQIHLGELHAILRRQEDFYPFLKDNREKIEKILTFRIPYYVGPLARGNSRFAWMTRKSEETITPWNFEEVVDKGASAQSFIERMTNFDKNLPNEKVLPKHSLLYEYFTVYNELTKVKYVTEGMRKPAFLSGEQKKAIVDLLFKTNRKVTVKQLKEDYFKKIECFDSVEISGVEDRFNASLGTYHDLLKIIKDKDFLDNEENEDILEDIVLTLTLFEDREMIEERLKTYAHLFDDKVMKQLKRRRYTGWGRLSRKLINGIRDKQSGKTILDFLKSDGFANRNFMQLIHDDSLTFKEDIQKAQVSGQGDSLHEHIANLAGSPAIKKGILQTVKVVDELVKVMGRHKPENIVIEMARENQTTQKGQKNSRERMKRIEEGIKELGSQILKEHPVENTQLQNEKLYLYYLQNGRDMYVDQELDINRLSDYDVDHIVPQSFLKDDSIDNKVLTRSDKARGKSDNVPSEEVVKKMKNYWRQLLNAKLITQRKFDNLTKAERGGLSELDKAGFIKRQLVETRQITKHVAQILDSRMNTKYDENDKLIREVKVITLKSKLVSDFRKDFQFYKVREINNYHHAHDAYLNAVVGTALIKKYPKLESEFVYGDYKVYDVRKMIAKSEQEIGKATAKYFFYSNIMNFFKTEITLANGEIRKRPLIETNGETGEIVWDKGRDFATVRKVLSMPQVNIVKKTEVQTGGFSKESILPKRNSDKLIARKKDWDPKKYGGFDSPTVAYSVLVVAKVEKGKSKKLKSVKELLGITIMERSSFEKNPIDFLEAKGYKEVKKDLIIKLPKYSLFELENGRKRMLASAGELQKGNELALPSKYVNFLYLASHYEKLKGSPEDNEQKQLFVEQHKHYLDEIIEQISEFSKRVILADANLDKVLSAYNKHRDKPIREQAENIIHLFTLTNLGAPAAFKYFDTTIDRKRYTSTKEVLDATLIHQSITGLYETRIDLSQLGGDGGGGSGSSPAPGGTLGDQGSRGSDPLPEPRVTLTVEGIPTEFLVNTGAEHSVLTKPMGKMGSKRTVVAGATGSKVYPWTTKRLLKIGQKQVTHSFLVIPECPAPLLGRDLLTKLKAQIQFSTEGPQVTWEDRPAMCLVLNLEEEYRLHEKPVPPSIDPSWLQLFPMVWAEKAGMGLANQVPPVVVELKSDASPVAVRQYPMSKEAREGIRPHIQRFLDLGILVPCQSPWNTPLLPVKKPGTNDYRPVQDLREVNKRVQDIHPTVPNPYNLLSSLPPSHTWYSVLDLKDAFFCLKLHPNSQPLFAFEWRDPEKGNTGQLTWTRLPQGFKNSPTLFNEALHRDLASFRALNPQVVMLQYVDDLLVAAPTYRDCKEGTRRLLQELSKLGYRVSAKKAQLCREEVTYLGYLLKGGKRWLTPARKATVMKIPTPTTPRQVREFLGKAGFCRLFIPGFASLAAPLYPLTRPKVPFTWTEAHQEAFGRIKEALLSAPALALPDLTKPFALYVDEKEGVARGVLTQTLGPWRRPVAYLSKKLDPVASGWPTCLKAIAAVALLLKDADKLTLGQNVLVIAPHNLESIVRQPPDRWMTNARMTHYQSLLLNERVSFAPPAILNPATLLPVESDDTPIHICSEILAEETGTRPDLRDQPLPGVPAWYTDGSSFIMDGRRQAGAAIVDNKRTVWASNLPEGTSAQKAELIALTQALRLAEGKSINIYTDSRYAFATAHVHGAIYKQRGWLTSAGKDIKNKEEILALLEAIHLPKRVAIIHCPGHQRGTDPVATGNRKADEAAKQAAQSTRILTETTKNAGKRTADGSEFEKRTADGSEFESPKKKAKVE

SEQ ID NO: 7129 - protein, 2094 aa, synthetic construct
MPAAKRVKLDGGDKKYSIGLDIGTNSVGWAVITDEYKVPSKKFKVLGNTDRHSIKKNLIGALLFDSGETAEATRLKRTARRRYTRRKNRICYLQEIFSNEMAKVDDSFFHRLEESFLVEEDKKHERHPIFGNIVDEVAYHEKYPTIYHLRKKLVDSTDKADLRLIYLALAHMIKFRGHFLIEGDLNPDNSDVDKLFIQLVQTYNQLFEENPINASGVDAKAILSARLSKSRRLENLIAQLPGEKKNGLFGNLIALSLGLTPNFKSNFDLAEDAKLQLSKDTYDDDLDNLLAQIGDQYADLFLAAKNLSDAILLSDILRVNTEITKAPLSASMIKRYDEHHQDLTLLKALVRQQLPEKYKEIFFDQSKNGYAGYIDGGASQEEFYKFIKPILEKMDGTEELLVKLNREDLLRKQRTFDNGSIPHQIHLGELHAILRRQEDFYPFLKDNREKIEKILTFRIPYYVGPLARGNSRFAWMTRKSEETITPWNFEEVVDKGASAQSFIERMTNFDKNLPNEKVLPKHSLLYEYFTVYNELTKVKYVTEGMRKPAFLSGEQKKAIVDLLFKTNRKVTVKQLKEDYFKKIECFDSVEISGVEDRFNASLGTYHDLLKIIKDKDFLDNEENEDILEDIVLTLTLFEDREMIEERLKTYAHLFDDKVMKQLKRRRYTGWGRLSRKLINGIRDKQSGKTILDFLKSDGFANRNFMQLIHDDSLTFKEDIQKAQVSGQGDSLHEHIANLAGSPAIKKGILQTVKVVDELVKVMGRHKPENIVIEMARENQTTQKGQKNSRERMKRIEEGIKELGSQILKEHPVENTQLQNEKLYLYYLQNGRDMYVDQELDINRLSDYDVDHIVPQSFLKDDSIDNKVLTRSDKARGKSDNVPSEEVVKKMKNYWRQLLNAKLITQRKFDNLTKAERGGLSELDKAGFIKRQLVETRQITKHVAQILDSRMNTKYDENDKLIREVKVITLKSKLVSDFRKDFQFYKVREINNYHHAHDAYLNAVVGTALIKKYPKLESEFVYGDYKVYDVRKMIAKSEQEIGKATAKYFFYSNIMNFFKTEITLANGEIRKRPLIETNGETGEIVWDKGRDFATVRKVLSMPQVNIVKKTEVQTGGFSKESILPKRNSDKLIARKKDWDPKKYGGFDSPTVAYSVLVVAKVEKGKSKKLKSVKELLGITIMERSSFEKNPIDFLEAKGYKEVKKDLIIKLPKYSLFELENGRKRMLASAGELQKGNELALPSKYVNFLYLASHYEKLKGSPEDNEQKQLFVEQHKHYLDEIIEQISEFSKRVILADANLDKVLSAYNKHRDKPIREQAENIIHLFTLTNLGAPAAFKYFDTTIDRKRYTSTKEVLDATLIHQSITGLYETRIDLSQLGGDGGGGSGSSPAPGGTLNLEDEYRLYETSAEPEVSPGSTWLSDFPQAWAETGGMGLAVRQAPLIIPLKATSTPVSIKQYPMSQEAKLGIKPHIQRLLDQGILVPCQSPWNTPLLPVKKPGTNDYRPVQDLREVNKRVEDIHPTVPNPYNLLSGLPPSHRWYTVLDLKDAFFCLRLHPTSQPLFAFEWRDPGMGISGQLTWTRLPQGFKNSPTLFNEALHRDLADFRIQHPDLILLQYVDDILLAATSELDCQQGTRALLLTLGNLGYRASAKKAQLCQKQVKYLGYLLKEGQRWLTEARKETVMGQPTPKTPRQLREFLGKAGFCRLFIPGFAEMAAPLYPLTKPGTLFNWGPDQQKAYQEIKQALLTAPALGLPDLTKPFELFVDEKQGYAKGVLTQKLGPWRRPVAYLSKKLDPVAAGWPPCLRMVAAIAVLRKDAGKLTMGQPLVILAPHAVEALVKQPPDRWLSNARMTHYQAMLLDTDRVQFGPVVALNPATLLPLPEEGAPHDCLEILAETHGTRPDLTDQPIPDADHTWYTDGSSFLQEGQRKAGAAVTTETEVIWARALPAGTSAQRAELIALTQALKMAEGKRLNVYTDSRYAFATAHIHGEIYRRRGWLTSEGREIKNKSEILALLKALFLPKRLSIIHCLGHQKGDSAEARGNRLADQAAREAAIKTPPDTSTLLAGKRTADGSEFEKRTADGSEFESPKKKAKVE

SEQ ID NO: 7130 - protein, 2094 aa, synthetic construct
MPAAKRVKLDGGDKKYSIGLDIGTNSVGWAVITDEYKVPSKKFKVLGNTDRHSIKKNLIGALLFDSGETAEATRLKRTARRRYTRRKNRICYLQEIFSNEMAKVDDSFFHRLEESFLVEEDKKHERHPIFGNIVDEVAYHEKYPTIYHLRKKLVDSTDKADLRLIYLALAHMIKFRGHFLIEGDLNPDNSDVDKLFIQLVQTYNQLFEENPINASGVDAKAILSARLSKSRRLENLIAQLPGEKKNGLFGNLIALSLGLTPNFKSNFDLAEDAKLQLSKDTYDDDLDNLLAQIGDQYADLFLAAKNLSDAILLSDILRVNTEITKAPLSASMIKRYDEHHQDLTLLKALVRQQLPEKYKEIFFDQSKNGYAGYIDGGASQEEFYKFIKPILEKMDGTEELLVKLNREDLLRKQRTFDNGSIPHQIHLGELHAILRRQEDFYPFLKDNREKIEKILTFRIPYYVGPLARGNSRFAWMTRKSEETITPWNFEEVVDKGASAQSFIERMTNFDKNLPNEKVLPKHSLLYEYFTVYNELTKVKYVTEGMRKPAFLSGEQKKAIVDLLFKTNRKVTVKQLKEDYFKKIECFDSVEISGVEDRFNASLGTYHDLLKIIKDKDFLDNEENEDILEDIVLTLTLFEDREMIEERLKTYAHLFDDKVMKQLKRRRYTGWGRLSRKLINGIRDKQSGKTILDFLKSDGFANRNFMQLIHDDSLTFKEDIQKAQVSGQGDSLHEHIANLAGSPAIKKGILQTVKVVDELVKVMGRHKPENIVIEMARENQTTQKGQKNSRERMKRIEEGIKELGSQILKEHPVENTQLQNEKLYLYYLQNGRDMYVDQELDINRLSDYDVDHIVPQSFLKDDSIDNKVLTRSDKARGKSDNVPSEEVVKKMKNYWRQLLNAKLITQRKFDNLTKAERGGLSELDKAGFIKRQLVETRQITKHVAQILDSRMNTKYDENDKLIREVKVITLKSKLVSDFRKDFQFYKVREINNYHHAHDAYLNAVVGTALIKKYPKLESEFVYGDYKVYDVRKMIAKSEQEIGKATAKYFFYSNIMNFFKTEITLANGEIRKRPLIETNGETGEIVWDKGRDFATVRKVLSMPQVNIVKKTEVQTGGFSKESILPKRNSDKLIARKKDWDPKKYGGFDSPTVAYSVLVVAKVEKGKSKKLKSVKELLGITIMERSSFEKNPIDFLEAKGYKEVKKDLIIKLPKYSLFELENGRKRMLASAGELQKGNELALPSKYVNFLYLASHYEKLKGSPEDNEQKQLFVEQHKHYLDEIIEQISEFSKRVILADANLDKVLSAYNKHRDKPIREQAENIIHLFTLTNLGAPAAFKYFDTTIDRKRYTSTKEVLDATLIHQSITGLYETRIDLSQLGGDGGGGSGSSPAPGGLGIEDEYRLHETSTEPDVSLGSTWLSDFPQAWAETGGMGLAVRQAPLIIPLKATSTPVSIQQYPMSHEARLGIKPHIQRLLDQGILVPCQSPWNTPLLPVKKPGTNDYRPVQDLREVNKRVEDIHPTVPNPYNLLSGLPPSHQWYTVLDLKDAFFCLRLHPTSQPLFAFEWRDPGMGISGQLTWTRLPQGFKNSPTLFNEALHRDLADFRIQHPDLILLQYVDDILLAATSELDCQQGTRALLQTLGDLGYRASAKKAQICQKQVKYLGYLLREGQRWLTEARKETVMGQPVPKTPRQLREFLGKAGFCRLFIPGFAEMAAPLYPLTKPGTLFSWGPDQQKAYQEIKQALLTAPALGLPDLTKPFELFVDEKQGYAKGVLTQKLGPWRRPVAYLSKKLDPVAAGWPPCLRMVAAIAVLTKDAGKLTMGQPLVILAPHAVEALVKQPPDRWLSNARMTHYQAMLLDTDRVQFGPVVALNPATLLPLPEEGAPHDCLEILAETHGTRPDLTDQPIPDADHTWYTDGSSFLQEGQRKAGAAVTTETEVIWAGALPAGTSAQRAELIALTQALKMAEGKRLNVYTDSRYAFATAHIHGEIYRRRGWLTSEGREIKNKSEILALLKALFLPKRLSIIHCLGHQKGDSAEARGNRLADQAAREAAIKTPPDTSTLLIAGKRTADGSEFEKRTADGSEFESPKKKAKVE

SEQ ID NO: 7131 - protein, 2094 aa, synthetic construct; identical to SEQ ID NO: 7130

SEQ ID NO: 7132 - protein, 2094 aa, synthetic construct
MPAAKRVKLDGGDKKYSIGLDIGTNSVGWAVITDEYKVPSKKFKVLGNTDRHSIKKNLIGALLFDSGETAEATRLKRTARRRYTRRKNRICYLQEIFSNEMAKVDDSFFHRLEESFLVEEDKKHERHPIFGNIVDEVAYHEKYPTIYHLRKKLVDSTDKADLRLIYLALAHMIKFRGHFLIEGDLNPDNSDVDKLFIQLVQTYNQLFEENPINASGVDAKAILSARLSKSRRLENLIAQLPGEKKNGLFGNLIALSLGLTPNFKSNFDLAEDAKLQLSKDTYDDDLDNLLAQIGDQYADLFLAAKNLSDAILLSDILRVNTEITKAPLSASMIKRYDEHHQDLTLLKALVRQQLPEKYKEIFFDQSKNGYAGYIDGGASQEEFYKFIKPILEKMDGTEELLVKLNREDLLRKQRTFDNGSIPHQIHLGELHAILRRQEDFYPFLKDNREKIEKILTFRIPYYVGPLARGNSRFAWMTRKSEETITPWNFEEVVDKGASAQSFIERMTNFDKNLPNEKVLPKHSLLYEYFTVYNELTKVKYVTEGMRKPAFLSGEQKKAIVDLLFKTNRKVTVKQLKEDYFKKIECFDSVEISGVEDRFNASLGTYHDLLKIIKDKDFLDNEENEDILEDIVLTLTLFEDREMIEERLKTYAHLFDDKVMKQLKRRRYTGWGRLSRKLINGIRDKQSGKTILDFLKSDGFANRNFMQLIHDDSLTFKEDIQKAQVSGQGDSLHEHIANLAGSPAIKKGILQTVKVVDELVKVMGRHKPENIVIEMARENQTTQKGQKNSRERMKRIEEGIKELGSQILKEHPVENTQLQNEKLYLYYLQNGRDMYVDQELDINRLSDYDVDHIVPQSFLKDDSIDNKVLTRSDKARGKSDNVPSEEVVKKMKNYWRQLLNAKLITQRKFDNLTKAERGGLSELDKAGFIKRQLVETRQITKHVAQILDSRMNTKYDENDKLIREVKVITLKSKLVSDFRKDFQFYKVREINNYHHAHDAYLNAVVGTALIKKYPKLESEFVYGDYKVYDVRKMIAKSEQEIGKATAKYFFYSNIMNFFKTEITLANGEIRKRPLIETNGETGEIVWDKGRDFATVRKVLSMPQVNIVKKTEVQTGGFSKESILPKRNSDKLIARKKDWDPKKYGGFDSPTVAYSVLVVAKVEKGKSKKLKSVKELLGITIMERSSFEKNPIDFLEAKGYKEVKKDLIIKLPKYSLFELENGRKRMLASAGELQKGNELALPSKYVNFLYLASHYEKLKGSPEDNEQKQLFVEQHKHYLDEIIEQISEFSKRVILADANLDKVLSAYNKHRDKPIREQAENIIHLFTLTNLGAPAAFKYFDTTIDRKRYTSTKEVLDATLIHQSITGLYETRIDLSQLGGDGGGGSGSSPAPGGTLNIEDEYRLHETSKGPDVPLGSTWLSDFPQAWAETGGMGLAVRQAPLIIPLKATSTPVSIKQYPMSQEARLGIKPHIQRLLDQGILVPCQSPWNTPLLPVKKPGTNDYRPVQDLREVNKRVEDIHPTVPNPYNLLSGLPPSHQWYTVLDLKDAFFCLRLHPTSQSLFAFEWRDPEMGISGQLTWTRLPQGFKNSPTLFNEALHRDLADFRIQHPDLILLQYVDDLLLAATSELDCQQGTRALLQTLGDLGYRASAKKAQICQKQVKYLGYLLKEGQRWLTEARKETVMGQPTPKTPRQLREFLGTAGFCRLWIPGFAEMAAPLYPLTKPGTLFEWGPDQQKAYQEIKQALLTAPALGLPDLTKPFELFVDEKQGYAKGVLTQKLGPWRRPVAYLSKKLDPVAAGWPPCLRMVAAIAVLTKDAGKLTMGQPLVILAPHAVEALVKQPPDRWLSNARMTHYQALLLDTDRVQFGPIVALNPATLLPLPEEGLQHDCLDILAEAHGTRPDLTDQPLPDADHTWYTDGSSFLQEGQRKAGAAVTTETEVVWAKALPAGTSAQRAELIALTQALKMAEGKKLNVYTDSRYAFATAHIHGEIYRRRGWLTSEGKEIKNKDEILALLKALFLPKRLSIIHCPGHQKGNRAEARGNRMADQAAREVATRETPETSTLLAGKRTADGSEFEKRTADGSEFESPKKKAKVE

SEQ ID NO: 7133 - protein, 2094 aa, synthetic construct
MPAAKRVKLDGGDKKYSIGLDIGTNSVGWAVITDEYKVPSKKFKVLGNTDRHSIKKNLIGALLFDSGETAEATRLKRTARRRYTRRKNRICYLQEIFSNEMAKVDDSFFHRLEESFLVEEDKKHERHPIFGNIVDEVAYHEKYPTIYHLRKKLVDSTDKADLRLIYLALAHMIKFRGHFLIEGDLNPDNSDVDKLFIQLVQTYNQLFEENPINASGVDAKAILSARLSKSRRLENLIAQLPGEKKNGLFGNLIALSLGLTPNFKSNFDLAEDAKLQLSKDTYDDDLDNLLAQIGDQYADLFLAAKNLSDAILLSDILRVNTEITKAPLSASMIKRYDEHHQDLTLLKALVRQQLPEKYKEIFFDQSKNGYAGYIDGGASQEEFYKFIKPILEKMDGTEELLVKLNREDLLRKQRTFDNGSIPHQIHLGELHAILRRQEDFYPFLKDNREKIEKILTFRIPYYVGPLARGNSRFAWMTRKSEETITPWNFEEVVDKGASAQSFIERMTNFDKNLPNEKVLPKHSLLYEYFTVYNELTKVKYVTEGMRKPAFLSGEQKKAIVDLLFKTNRKVTVKQLKEDYFKKIECFDSVEISGVEDRFNASLGTYHDLLKIIKDKDFLDNEENEDILEDIVLTLTLFEDREMIEERLKTYAHLFDDKVMKQLKRRRYTGWGRLSRKLINGIRDKQSGKTILDFLKSDGFANRNFMQLIHDDSLTFKEDIQKAQVSGQGDSLHEHIANLAGSPAIKKGILQTVKVVDELVKVMGRHKPENIVIEMARENQTTQKGQKNSRERMKRIEEGIKELGSQILKEHPVENTQLQNEKLYLYYLQNGRDMYVDQELDINRLSDYDVDHIVPQSFLKDDSIDNKVLTRSDKARGKSDNVPSEEVVKKMKNYWRQLLNAKLITQRKFDNLTKAERGGLSELDKAGFIKRQLVETRQITKHVAQILDSRMNTKYDENDKLIREVKVITLKSKLVSDFRKDFQFYKVREINNYHHAHDAYLNAVVGTALIKKYPKLESEFVYGDYKVYDVRKMIAKSEQEIGKATAKYFFYSNIMNFFKTEITLANGEIRKRPLIETNGETGEIVWDKGRDFATVRKVLSMPQVNIVKKTEVQTGGFSKESILPKRNSDKLIARKKDWDPKKYGGFDSPTVAYSVLVVAKVEKGKSKKLKSVKELLGITIMERSSFEKNPIDFLEAKGYKEVKKDLIIKLPKYSLFELENGRKRMLASAGELQKGNELALPSKYVNFLYLASHYEKLKGSPEDNEQKQLFVEQHKHYLDEIIEQISEFSKRVILADANLDKVLSAYNKHRDKPIREQAENIIHLFTLTNLGAPAAFKYFDTTIDRKRYTSTKEVLDATLIHQSITGLYETRIDLSQLGGDGGGGSGSSPAPGGTLNIEDEYRLHEISTEPDVSPGSTWLSDFPQAWAETGGMGLAVRQAPLIIPLKATSTPVSIKQYPMSQEAKLGIKPHIQRLLDQGILVPCQSPWNTPLLPVKKPGTNDYRPVQGLREVNKRVEDIHPTVPNPYNLLSGLPTSHRWYTVLDLKDAFFCLRLHPTSQPLFASEWRDPGMGISGQLTWTRLPQGFKNSPTLFNEALHRGLADFRIQHPDLILLQYVDDLLLAATSELDCQQGTRALLKTLGNLGYRASAKKAQICQKQVKYLGYLLREGQRWLTEARKETVMGQPTPKTPRQLREFLGTAGFCRLWIPRFAEMAAPLYPLTKPGTLFNWGPDQQKAYHEIKQALLTAPALGLPDLTKPFELFVDEKQGYAKGVLTQKLGPWRRPVAYLSKKLDPVAAGWPPCLRMVAAIAVLTKDAGKLTMGQPLVILAPHAVEALVKQPPDRWLSNARMTHYQAMLLDTDRVQFGPVVALNPATLLPLPEEGAPHDCLEILAETHGTEPDLTDQPIPDADHTWYTDGSSFLQEGQRKAGAAVTTETEVIWARALPAGTSAQRAELIALTQALKMAEGKRLNVYTDSRYAFATAHIHGEIYKRRGWLTSEGREIKNKSEILALLKALFLPKRLSIIHCLGHQKGDSAEARGNRLADQAAREAAIKTPPDTSTLLAGKRTADGSEFEKRTADGSEFESPKKKAKVE

SEQ ID NO: 7134 - protein, 2088 aa, synthetic construct
MPAAKRVKLDGGDKKYSIGLDIGTNSVGWAVITDEYKVPSKKFKVLGNTDRHSIKKNLIGALLFDSGETAEATRLKRTARRRYTRRKNRICYLQEIFSNEMAKVDDSFFHRLEESFLVEEDKKHERHPIFGNIVDEVAYHEKYPTIYHLRKKLVDSTDKADLRLIYLALAHMIKFRGHFLIEGDLNPDNSDVDKLFIQLVQTYNQLFEENPINASGVDAKAILSARLSKSRRLENLIAQLPGEKKNGLFGNLIALSLGLTPNFKSNFDLAEDAKLQLSKDTYDDDLDNLLAQIGDQYADLFLAAKNLSDAILLSDILRVNTEITKAPLSASMIKRYDEHHQDLTLLKALVRQQLPEKYKEIFFDQSKNGYAGYIDGGASQEEFYKFIKPILEKMDGTEELLVKLNREDLLRKQRTFDNGSIPHQIHLGELHAILRRQEDFYPFLKDNREKIEKILTFRIPYYVGPLARGNSRFAWMTRKSEETITPWNFEEVVDKGASAQSFIERMTNFDKNLPNEKVLPKHSLLYEYFTVYNELTKVKYVTEGMRKPAFLSGEQKKAIVDLLFKTNRKVTVKQLKEDYFKKIECFDSVEISGVEDRFNASLGTYHDLLKIIKDKDFLDNEENEDILEDIVLTLTLFEDREMIEERLKTYAHLFDDKVMKQLKRRRYTGWGRLSRKLINGIRDKQSGKTILDFLKSDGFANRNFMQLIHDDSLTFKEDIQKAQVSGQGDSLHEHIANLAGSPAIKKGILQTVKVVDELVKVMGRHKPENIVIEMARENQTTQKGQKNSRERMKRIEEGIKELGSQILKEHPVENTQLQNEKLYLYYLQNGRDMYVDQELDINRLSDYDVDHIVPQSFLKDDSIDNKVLTRSDKARGKSDNVPSEEVVKKMKNYWRQLLNAKLITQRKFDNLTKAERGGLSELDKAGFIKRQLVETRQITKHVAQILDSRMNTKYDENDKLIREVKVITLKSKLVSDFRKDFQFYKVREINNYHHAHDAYLNAVVGTALIKKYPKLESEFVYGDYKVYDVRKMIAKSEQEIGKATAKYFFYSNIMNFFKTEITLANGEIRKRPLIETNGETGEIVWDKGRDFATVRKVLSMPQVNIVKKTEVQTGGFSKESILPKRNSDKLIARKKDWDPKKYGGFDSPTVAYSVLVVAKVEKGKSKKLKSVKELLGITIMERSSFEKNPIDFLEAKGYKEVKKDLIIKLPKYSLFELENGRKRMLASAGELQKGNELALPSKYVNFLYLASHYEKLKGSPEDNEQKQLFVEQHKHYLDEIIEQISEFSKRVILADANLDKVLSAYNKHRDKPIREQAENIIHLFTLTNLGAPAAFKYFDTTIDRKRYTSTKEVLDATLIHQSITGLYETRIDLSQLGGDGGGGSGSSPAPGGTLQLDDEYRLYSPLVKPDQNIQFWLEQFPQAWAETAGMGLAKQVPPQVIQLKASATPVSVRQYPLSKEAQEGIRPHVQRLIQQGILVPVQSPWNTPLLPVRKPGTNDYRPVQDLREVNKRVQDIHPTVPNPYNLLCALPPQRSWYTVLDLKDAFFCLRLHPTSQPLFAFEWRDPGTGRTGQLTWTRLPQGFKNSPTIFDEALHRDLANFRIQHPQVTLLQYVDDLLLAGATKQDCLEGTKALLLELSDLGYRASAKKAQICRREVTYLGYSLRDGQRWLTEARKKTVVQIPAPTTAKQVREFLGTAGFCRLWIPGFATLAAPLYPLTKEKGEFSWAPEHQKAFDAIKKALLSAPALALPDVTKPFTLYVDERKGVARGVLTQTLGPWRRPVAYLSKKLDPVASGWPVCLKAIAAVAILVKDADKLTLGQNITVIAPHALENIVRQPPDRWMTNARMTHYQSLLLTERVTFAPPAALNPATLLPEETDEPVTHDCHQLLIEETGVRKDLTDIPLTGEVLTWFTDGSSYVVEGKRMAGAAVVDGTRTIWASSLPEGTSAQKAELMALTQALRLAEGKSINIYTDSRYAFATAHVHGAIYKQRGLLTSAGREIKNKEEILSLLEALHLPKRLAIIHCPGHQKAKDPISRGNQMADRVAKQAAQGVNLLAGKRTADGSEFEKRTADGSEFESPKKKAKVE

SEQ ID NO: 7135 - protein, 2092 aa, synthetic construct
MPAAKRVKLDGGDKKYSIGLDIGTNSVGWAVITDEYKVPSKKFKVLGNTDRHSIKKNLIGALLFDSGETAEATRLKRTARRRYTRRKNRICYLQEIFSNEMAKVDDSFFHRLEESFLVEEDKKHERHPIFGNIVDEVAYHEKYPTIYHLRKKLVDSTDKADLRLIYLALAHMIKFRGHFLIEGDLNPDNSDVDKLFIQLVQTYNQLFEENPINASGVDAKAILSARLSKSRRLENLIAQLPGEKKNGLFGNLIALSLGLTPNFKSNFDLAEDAKLQLSKDTYDDDLDNLLAQIGDQYADLFLAAKNLSDAILLSDILRVNTEITKAPLSASMIKRYDEHHQDLTLLKALVRQQLPEKYKEIFFDQSKNGYAGYIDGGASQEEFYKFIKPILEKMDGTEELLVKLNREDLLRKQRTFDNGSIPHQIHLGELHAILRRQEDFYPFLKDNREKIEKILTFRIPYYVGPLARGNSRFAWMTRKSEETITPWNFEEVVDKGASAQSFIERMTNFDKNLPNEKVLPKHSLLYEYFTVYNELTKVKYVTEGMRKPAFLSGEQKKAIVDLLFKTNRKVTVKQLKEDYFKKIECFDSVEISGVEDRFNASLGTYHDLLKIIKDKDFLDNEENEDILEDIVLTLTLFEDREMIEERLKTYAHLFDDKVMKQLKRRRYTGWGRLSRKLINGIRDKQSGKTILDFLKSDGFANRNFMQLIHDDSLTFKEDIQKAQVSGQGDSLHEHIANLAGSPAIKKGILQTVKVVDELVKVMGRHKPENIVIEMARENQTTQKGQKNSRERMKRIEEGIKELGSQILKEHPVENTQLQNEKLYLYYLQNGRDMYVDQELDINRLSDYDVDHIVPQSFLKDDSIDNKVLTRSDKARGKSDNVPSEEVVKKMKNYWRQLLNAKLITQRKFDNLTKAERGGLSELDKAGFIKRQLVETRQITKHVAQILDSRMNTKYDENDKLIREVKVITLKSKLVSDFRKDFQFYKVREINNYHHAHDAYLNAVVGTALIKKYPKLESEFVYGDYKVYDVRKMIAKSEQEIGKATAKYFFYSNIMNFFKTEITLANGEIRKRPLIETNGETGEIVWDKGRDFATVRKVLSMPQVNIVKKTEVQTGGFSKESILPKRNSDKLIARKKDWDPKKYGGFDSPTVAYSVLVVAKVEKGKSKKLKSVKELLGITIMERSSFEKNPIDFLEAKGYKEVKKDLIIKLPKYSLFELENGRKRMLASAGELQKGNELALPSKYVNFLYLASHYEKLKGSPEDNEQKQLFVEQHKHYLDEIIEQISEFSKRVILADANLDKVLSAYNKHRDKPIREQAENIIHLFTLTNLGAPAAFKYFDTTIDRKRYTSTKEVLDATLIHQSITGLYETRIDLSQLGGDGGGGSGSSPAPGGVLNLEEEYRLHEKPVPSSIDPSWLQLFPTVWAERAGMGLANQVPPVVVELRSGASPVAVRQYPMSKEAREGIRPHIQRFLDLGVLVPCQSPWNTPLLPVKKPGTNDYRPVQDLREINKRVQDIHPTVPNPYNLLSSLPPSHTWYSVLDLKDAFFCLKLHPNSQPLFAFEWRDPEKGNTGQLTWTRLPQGFKNSPTLFNEALHRDLAPFRALNPQVVLLQYVDDLLVAAPTYRDCKEGTQKLLQELSKLGYRVSAKKAQLCQKEVTYLGYLLKEGKRWLTPARKATVMKIPPPTTPRQVREFLGTAGFCRLWIPGFASLAAPLYPLTKPSIPFIWTEEHQKAFDRIKEALLSAPALALPDLTKPFTLYVDERAGVARGVLTQTLGPWRRPVAYLSKKLDPVASGWPTCLKAVAAVALLLKDADKLTLGQNVTVIASHSLESIVRQPPDRWMTNARMTHYQSLLLNERVSFAPPAVLNPATLLPVESEATPVHRCSEILAEETGTRRDLKDQPLPGVPAWYTDGSSFIAEGKRRAGAAIVDGKRTVWASSLPEGTSAQKAELVALTQALRLAEGKDINIYTDSRYAFATAHIHGAIYKQRGWLTSAGKDIKNKEEILALLEAIHLPKRVAIIHCPGHQKGNDPVATGNRRADEAAKQAALSTRVLAETTKPAGKRTADGSEFEKRTADGSEFESPKKKAKVE

SEQ ID NO: 7136 - protein, 2094 aa, synthetic construct
MPAAKRVKLDGGDKKYSIGLDIGTNSVGWAVITDEYKVPSKKFKVLGNTDRHSIKKNLIGALLFDSGETAEATRLKRTARRRYTRRKNRICYLQEIFSNEMAKVDDSFFHRLEESFLVEEDKKHERHPIFGNIVDEVAYHEKYPTIYHLRKKLVDSTDKADLRLIYLALAHMIKFRGHFLIEGDLNPDNSDVDKLFIQLVQTYNQLFEENPINASGVDAKAILSARLSKSRRLENLIAQLPGEKKNGLFGNLIALSLGLTPNFKSNFDLAEDAKLQLSKDTYDDDLDNLLAQIGDQYADLFLAAKNLSDAILLSDILRVNTEITKAPLSASMIKRYDEHHQDLTLLKALVRQQLPEKYKEIFFDQSKNGYAGYIDGGASQEEFYKFIKPILEKMDGTEELLVKLNREDLLRKQRTFDNGSIPHQIHLGELHAILRRQEDFYPFLKDNREKIEKILTFRIPYYVGPLARGNSRFAWMTRKSEETITPWNFEEVVDKGASAQSFIERMTNFDKNLPNEKVLPKHSLLYEYFTVYNELTKVKYVTEGMRKPAFLSGEQKKAIVDLLFKTNRKVTVKQLKEDYFKKIECFDSVEISGVEDRFNASLGTYHDLLKIIKDKDFLDNEENEDILEDIVLTLTLFEDREMIEERLKTYAHLFDDKVMKQLKRRRYTGWGRLSRKLINGIRDKQSGKTILDFLKSDGFANRNFMQLIHDDSLTFKEDIQKAQVSGQGDSLHEHIANLAGSPAIKKGILQTVKVVDELVKVMGRHKPENIVIEMARENQTTQKGQKNSRERMKRIEEGIKELGSQILKEHPVENTQLQNEKLYLYYLQNGRDMYVDQELDINRLSDYDVDHIVPQSFLKDDSIDNKVLTRSDKARGKSDNVPSEEVVKKMKNYWRQLLNAKLITQRKFDNLTKAERGGLSELDKAGFIKRQLVETRQITKHVAQILDSRMNTKYDENDKLIREVKVITLKSKLVSDFRKDFQFYKVREINNYHHAHDAYLNAVVGTALIKKYPKLESEFVYGDYKVYDVRKMIAKSEQEIGKATAKYFFYSNIMNFFKTEITLANGEIRKRPLIETNGETGEIVWDKGRDFATVRKVLSMPQVNIVKKTEVQTGGFSKESILPKRNSDKLIARKKDWDPKKYGGFDSPTVAYSVLVVAKVEKGKSKKLKSVKELLGITIMERSSFEKNPIDFLEAKGYKEVKKDLIIKLPKYSLFELENGRKRMLASAGELQKGNELALPSKYVNFLYLASHYEKLKGSPEDNEQKQLFVEQHKHYLDEIIEQISEFSKRVILADANLDKVLSAYNKHRDKPIREQAENIIHLFTLTNLGAPAAFKYFDTTIDRKRYTSTKEVLDATLIHQSITGLYETRIDLSQLGGDGGGGSGSSPAPGGTLNIEDEYRLHETSKEPDVPLGSTWLSDFPQAWAETGGMGLAVRQAPLIIPLKATSTPVSIKQYPMSQEARLGIKPHIQRLLDQGILVPCQSPWNTPLLPVKKPGTNDYRPVQDLREVNKRVEDIHPTVPNPYNLLSGLPPSHQWYTVLDLKDAFFCLRLHPTSQPLFAFEWRDPEMGISGQLTWTRLPQGFKNSPTLFDEALHRDLADFRIQHPDLILLQYVDDLLLAATSEQDCQRGTRALLQTLGNLGYRASAKKAQICQKQVKYLGYLLKEGQRWLTEARKETVMGQPTPKTPRQLREFLGTAGFCRLWIPGFAEMAAPLYPLTKTGTLFNWGPDQQKAYQEIKQALLTAPALGLPDLTKPFELFVDEKQGYAKGVLTQKLGPWRRPVAYLSKKLDPVAAGWPPCLRMVAAIAVLTKDAGKLTMGQPLVILAPHAVEALVKQPPDRWLSNARMTHYQAMLLDTDRVQFGPVVALNPATLLPLPEKEAPHDCLEILAETHGTRPDLTDQPIPDADYTWYTDGSSFLQEGQRRAGAAVTTETEVIWARALPAGTSAQRAELIALTQALKMAEGKKLNVYTDSRYAFATAHVHGEIYRRRGLLTSEGREIKNKNEILALLKALFLPKRLSIIHCPGHQKGNSAEARGNRMADQAAREAAMKAVLETSTLLAGKRTADGSEFEKRTADGSEFESPKKKAKVE

SEQ ID NO: 7137 - protein, 2094 aa, synthetic construct
MPAAKRVKLDGGDKKYSIGLDIGTNSVGWAVITDEYKVPSKKFKVLGNTDRHSIKKNLIGALLFDSGETAEATRLKRTARRRYTRRKNRICYLQEIFSNEMAKVDDSFFHRLEESFLVEEDKKHERHPIFGNIVDEVAYHEKYPTIYHLRKKLVDSTDKADLRLIYLALAHMIKFRGHFLIEGDLNPDNSDVDKLFIQLVQTYNQLFEENPINASGVDAKAILSARLSKSRRLENLIAQLPGEKKNGLFGNLIALSLGLTPNFKSNFDLAEDAKLQLSKDTYDDDLDNLLAQIGDQYADLFLAAKNLSDAILLSDILRVNTEITKAPLSASMIKRYDEHHQDLTLLKALVRQQLPEKYKEIFFDQSKNGYAGYIDGGASQEEFYKFIKPILEKMDGTEELLVKLNREDLLRKQRTFDNGSIPHQIHLGELHAILRRQEDFYPFLKDNREKIEKILTFRIPYYVGPLARGNSRFAWMTRKSEETITPWNFEEVVDKGASAQSFIERMTNFDKNLPNEKVLPKHSLLYEYFTVYNELTKVKYVTEGMRKPAFLSGEQKKAIVDLLFKTNRKVTVKQLKEDYFKKIECFDSVEISGVEDRFNASLGTYHDLLKIIKDKDFLDNEENEDILEDIVLTLTLFEDREMIEERLKTYAHLFDDKVMKQLKRRRYTGWGRLSRKLINGIRDKQSGKTILDFLKSDGFANRNFMQLIHDDSLTFKEDIQKAQVSGQGDSLHEHIANLAGSPAIKKGILQTVKVVDELVKVMGRHKPENIVIEMARENQTTQKGQKNSRERMKRIEEGIKELGSQILKEHPVENTQLQNEKLYLYYLQNGRDMYVDQELDINRLSDYDVDHIVPQSFLKDDSIDNKVLTRSDKARGKSDNVPSEEVVKKMKNYWRQLLNAKLITQRKFDNLTKAERGGLSELDKAGFIKRQLVETRQITKHVAQILDSRMNTKYDENDKLIREVKVITLKSKLVSDFRKDFQFYKVREINNYHHAHDAYLNAVVGTALIKKYPKLESEFVYGDYKVYDVRKMIAKSEQEIGKATAKYFFYSNIMNFFKTEITLANGEIRKRPLIETNGETGEIVWDKGRDFATVRKVLSMPQVNIVKKTEVQTGGFSKESILPKRNSDKLIARKKDWDPKKYGGFDSPTVAYSVLVVAKVEKGKSKKLKSVKELLGITIMERSSFEKNPIDFLEAKGYKEVKKDLIIKLPKYSLFELENGRKRMLASAGELQKGNELALPSKYVNFLYLASHYEKLKGSPEDNEQKQLFVEQHKHYLDEIIEQISEFSKRVILADANLDKVLSAYNKHRDKPIREQAENIIHLFTLTNLGAPAAFKYFDTTIDRKRYTSTKEVLDATLIHQSITGLYETRIDLSQLGGDGGGGSGSSPAPGGTLNIEDEYRLHETSKEPDVPLGSTWLSDFPQAWAETGGMGLAVRQAPLIIPLKATSTPVSIKQYPMSQEARLGIKPHIQRLLDQGILVPCQSPWNTPLLPVKKPGTNDYRPVQDLREVNKRVEDIHPTVPNPYNLLSGLPPSHQWYTVLDLKDAFFCLRLHPTSQPLFAFEWRDPEMGISGQLTWTRLPQGFKNSPTLFNEALHRDLADFRIQHPDLILLQYVDDLLLAATSEQDCQRGTRALLQTLGNLGYRASAKKAQICQKQVKYLGYLLKEGQRWLTEARKETVMGQPTPKTPRQLREFLGTAGFCRLWIPGFAEMAAPLYPLTKPGTLFNWGPDQQKAYQEIKQALLTAPALGLPDLTKPFELFVDEKQGYAKGVLTQKLGPWRRPVAYLSKKLDPVAAGWPPCLRMVAAIAVLTKDAGKLTMGQPLVILAPHAVEALVKQPPDRWLSNARMTHYQAMLLDTDRVQFGPVVALNPATLLPLPEKEAPHDCLEILAETHGTRPDLTDQPIPDADYTWYTDGSSFLQEGQRRAGAAVTTETEVIWARALPAGTSAQRAELIALTQALKMAEGKKLNVYTDSRYAFATAHVHGEIYRRRGWLTSEGREIKNKNEILALLKALFLPKRLSIIHCPGHQKGNSAEARGNRMADQAAREAAMKAVLETSTLLAGKRTADGSEFEKRTADGSEFESPKKKAKVE

SEQ ID NO: 7138 - protein, 2093 aa, synthetic construct
MPAAKRVKLDGGDKKYSIGLDIGTNSVGWAVITDEYKVPSKKFKVLGNTDRHSIKKNLIGALLFDSGETAEATRLKRTARRRYTRRKNRICYLQEIFSNEMAKVDDSFFHRLEESFLVEEDKKHERHPIFGNIVDEVAYHEKYPTIYHLRKKLVDSTDKADLRLIYLALAHMIKFRGHFLIEGDLNPDNSDVDKLFIQLVQTYNQLFEENPINASGVDAKAILSARLSKSRRLENLIAQLPGEKKNGLFGNLIALSLGLTPNFKSNFDLAEDAKLQLSKDTYDDDLDNLLAQIGDQYADLFLAAKNLSDAILLSDILRVNTEITKAPLSASMIKRYDEHHQDLTLLKALVRQQLPEKYKEIFFDQSKNGYAGYIDGGASQEEFYKFIKPILEKMDGTEELLVKLNREDLLRKQRTFDNGSIPHQIHLGELHAILRRQEDFYPFLKDNREKIEKILTFRIPYYVGPLARGNSRFAWMTRKSEETITPWNFEEVVDKGASAQSFIERMTNFDKNLPNEKVLPKHSLLYEYFTVYNELTKVKYVTEGMRKPAFLSGEQKKAIVDLLFKTNRKVTVKQLKEDYFKKIECFDSVEISGVEDRFNASLGTYHDLLKIIKDKDFLDNEENEDILEDIVLTLTLFEDREMIEERLKTYAHLFDDKVMKQLKRRRYTGWGRLSRKLINGIRDKQSGKTILDFLKSDGFANRNFMQLIHDDSLTFKEDIQKAQVSGQGDSLHEHIANLAGSPAIKKGILQTVKVVDELVKVMGRHKPENIVIEMARENQTTQKGQKNSRERMKRIEEGIKELGSQILKEHPVENTQLQNEKLYLYYLQNGRDMYVDQELDINRLSDYDVDHIVPQSFLKDDSIDNKVLTRSDKARGKSDNVPSEEVVKKMKNYWRQLLNAKLITQRKFDNLTKAERGGLSELDKAGFIKRQLVETRQITKHVAQILDSRMNTKYDENDKLIREVKVITLKSKLVSDFRKDFQFYKVREINNYHHAHDAYLNAVVGTALIKKYPKLESEFVYGDYKVYDVRKMIAKSEQEIGKATAKYFFYSNIMNFFKTEITLANGEIRKRPLIETNGETGEIVWDKGRDFATVRKVLSMPQVNIVKKTEVQTGGFSKESILPKRNSDKLIARKKDWDPKKYGGFDSPTVAYSVLVVAKVEKGKSKKLKSVKELLGITIMERSSFEKNPIDFLEAKGYKEVKKDLIIKLPKYSLFELENGRKRMLASAGELQKGNELALPSKYVNFLYLASHYEKLKGSPEDNEQKQLFVEQHKHYLDEIIEQISEFSKRVILADANLDKVLSAYNKHRDKPIREQAENIIHLFTLTNLGAPAAFKYFDTTIDRKRYTSTKEVLDATLIHQSITGLYETRIDLSQLGGDGGGGSPAPGSSGGTLQLEEEYRLFEPESTQKQEMDIWLKNFPQAWAETGGMGTAHCQAPVLIQLKATATPISIRQYPMPHEAYQGIKPHIRRMLDQGILKPCQSPWNTPLLPVKKPGTEDYRPVQDLREVNKRVEDIHPTVPNPYNLLSTLPPSHPWYTVLDLKDAFFCLRLHSESQLLFAFEWRDPEIGLSGQLTWTRLPQGFKNSPTLFNEALHSDLADFRVRYPALVLLQYVDDLLLAAATRTECLEGTKALLETLGNKGYRASAKKAQICLQEVTYLGYSLKDGQRWLTKARKEAILSIPVPKNSRQVREFLGTAGYCRLWIPGFAELAAPLYPLTRPGTLFQWGTEQQLAFEDIKKALLSSPALGLPDITKPFELFIDENSGFAKGVLVQKLGPWKRPVAYLSKKLDTVASGWPPCLRMVAAIAILVKDAGKLTLGQPLTILTSHPVEALVRQPPNKWLSNARMTHYQAMLLDAERVHFGPTVSLNPATLLPLPSGGNHHDCLQILAETHGTRPDLTDQPLPDADLTWYTDGSSFIRNGEREAGAAVTTESEVIWAAPLPPGTSAQRAELIALTQALKMAEGKKLTVYTDSRYAFATTHVHGEIYRRRGWLTSEGKEIKNKNEILALLEALFLPKRLSIIHCPGHQKGDSPQAKGNRLADDTAKKAATETHSSLTVLPAGKRTADGSEFEKRTADGSEFESPKKKAKVE

SEQ ID NO: 7139 - protein, 2094 aa, synthetic construct
MPAAKRVKLDGGDKKYSIGLDIGTNSVGWAVITDEYKVPSKKFKVLGNTDRHSIKKNLIGALLFDSGETAEATRLKRTARRRYTRRKNRICYLQEIFSNEMAKVDDSFFHRLEESFLVEEDKKHERHPIFGNIVDEVAYHEKYPTIYHLRKKLVDSTDKADLRLIYLALAHMIKFRGHFLIEGDLNPDNSDVDKLFIQLVQTYNQLFEENPINASGVDAKAILSARLSKSRRLENLIAQLPGEKKNGLFGNLIALSLGLTPNFKSNFDLAEDAKLQLSKDTYDDDLDNLLAQIGDQYADLFLAAKNLSDAILLSDILRVNTEITKAPLSASMIKRYDEHHQDLTLLKALVRQQLPEKYKEIFFDQSKNGYAGYIDGGASQEEFYKFIKPILEKMDGTEELLVKLNREDLLRKQRTFDNGSIPHQIHLGELHAILRRQEDFYPFLKDNREKIEKILTFRIPYYVGPLARGNSRFAWMTRKSEETITPWNFEEVVDKGASAQSFIERMTNFDKNLPNEKVLPKHSLLYEYFTVYNELTKVKYVTEGMRKPAFLSGEQKKAIVDLLFKTNRKVTVKQLKEDYFKKIECFDSVEISGVEDRFNASLGTYHDLLKIIKDKDFLDNEENEDILEDIVLTLTLFEDREMIEERLKTYAHLFDDKVMKQLKRRRYTGWGRLSRKLINGIRDKQSGKTILDFLKSDGFANRNFMQLIHDDSLTFKEDIQKAQVSGQGDSLHEHIANLAGSPAIKKGILQTVKVVDELVKVMGRHKPENIVIEMARENQTTQKGQKNSRERMKRIEEGIKELGSQILKEHPVENTQLQNEKLYLYYLQNGRDMYVDQELDINRLSDYDVDHIVPQSFLKDDSIDNKVLTRSDKARGKSDNVPSEEVVKKMKNYWRQLLNAKLITQRKFDNLTKAERGGLSELDKAGFIKRQLVETRQITKHVAQILDSRMNTKYDENDKLIREVKVITLKSKLVSDFRKDFQFYKVREINNYHHAHDAYLNAVVGTALIKKYPKLESEFVYGDYKVYDVRKMIAKSEQEIGKATAKYFFYSNIMNFFKTEITLANGEIRKRPLIETNGETGEIVWDKGRDFATVRKVLSMPQVNIVKKTEVQTGGFSKESILPKRNSDKLIARKKDWDPKKYGGFDSPTVAYSVLVVAKVEKGKSKKLKSVKELLGITIMERSSFEKNPIDFLEAKGYKEVKKDLIIKLPKYSLFELENGRKRMLASAGELQKGNELALPSKYVNFLYLASHYEKLKGSPEDNEQKQLFVEQHKHYLDEIIEQISEFSKRVILADANLDKVLSAYNKHRDKPIREQAENIIHLFTLTNLGAPAAFKYFDTTIDRKRYTSTKEVLDATLIHQSITGLYETRIDLSQLGGDGGGGSPAPGSSGGTLNLEDEYRLYETSAEPEVSPGSTWLSDFPQAWAETGGMGLAVRQAPLIIPLKATSTPVSIKQYPMSQEAKLGIKPHIQRLLDQGILVPCQSPWNTPLLPVKKPGTNDYRPVQDLREVNKRVEDIHPTVPNPYNLLSGLPPSHRWYTVLDLKDAFFCLRLHPTSQPLFAFEWRDPGMGISGQLTWTRLPQGFKNSPTLFNEALHRDLADFRIQHPDLILLQYVDDILLAATSELDCQQGTRALLLTLGNLGYRASAKKAQLCQKQVKYLGYLLKEGQRWLTEARKETVMGQPTPKTPRQLREFLGTAGFCRLWIPGFAEMAAPLYPLTKPGTLFNWGPDQQKAYQEIKQALLTAPALGLPDLTKPFELFVDEKQGYAKGVLTQKLGPWRRPVAYLSKKLDPVAAGWPPCLRMVAAIAVLRKDAGKLTMGQPLVILAPHAVEALVKQPPDRWLSNARMTHYQAMLLDTDRVQFGPVVALNPATLLPLPEEGAPHDCLEILAETHGTRPDLTDQPIPDADHTWYTDGSSFLQEGQRKAGAAVTTETEVIWARALPAGTSAQRAELIALTQALKMAEGKRLNVYTDSRYAFATAHIHGEIYRRRGWLTSEGREIKNKSEILALLKALFLPKRLSIIHCLGHQKGDSAEARGNRLADQAAREAAIKTPPDTSTLLAGKRTADGSEFEKRTADGSEFESPKKKAKVE

SEQ ID NO: 7140 - protein, 2094 aa, synthetic construct
MPAAKRVKLDGGDKKYSIGLDIGTNSVGWAVITDEYKVPSKKFKVLGNTDRHSIKKNLIGALLFDSGETAEATRLKRTARRRYTRRKNRICYLQEIFSNEMAKVDDSFFHRLEESFLVEEDKKHERHPIFGNIVDEVAYHEKYPTIYHLRKKLVDSTDKADLRLIYLALAHMIKFRGHFLIEGDLNPDNSDVDKLFIQLVQTYNQLFEENPINASGVDAKAILSARLSKSRRLENLIAQLPGEKKNGLFGNLIALSLGLTPNFKSNFDLAEDAKLQLSKDTYDDDLDNLLAQIGDQYADLFLAAKNLSDAILLSDILRVNTEITKAPLSASMIKRYDEHHQDLTLLKALVRQQLPEKYKEIFFDQSKNGYAGYIDGGASQEEFYKFIKPILEKMDGTEELLVKLNREDLLRKQRTFDNGSIPHQIHLGELHAILRRQEDFYPFLKDNREKIEKILTFRIPYYVGPLARGNSRFAWMTRKSEETITPWNFEEVVDKGASAQSFIERMTNFDKNLPNEKVLPKHSLLYEYFTVYNELTKVKYVTEGMRKPAFLSGEQKKAIVDLLFKTNRKVTVKQLKEDYFKKIECFDSVEISGVEDRFNASLGTYHDLLKIIKDKDFLDNEENEDILEDIVLTLTLFEDREMIEERLKTYAHLFDDKVMKQLKRRRYTGWGRLSRKLINGIRDKQSGKTILDFLKSDGFANRNFMQLIHDDSLTFKEDIQKAQVSGQGDSLHEHIANLAGSPAIKKGILQTVKVVDELVKVMGRHKPENIVIEMARENQTTQKGQKNSRERMKRIEEGIKELGSQILKEHPVENTQLQNEKLYLYYLQNGRDMYVDQELDINRLSDYDVDHIVPQSFLKDDSIDNKVLTRSDKARGKSDNVPSEEVVKKMKNYWRQLLNAKLITQRKFDNLTKAERGGLSELDKAGFIKRQLVETRQITKHVAQILDSRMNTKYDENDKLIREVKVITLKSKLVSDFRKDFQFYKVREINNYHHAHDAYLNAVVGTALIKKYPKLESEFVYGDYKVYDVRKMIAKSEQEIGKATAKYFFYSNIMNFFKTEITLANGEIRKRPLIETNGETGEIVWDKGRDFATVRKVLSMPQVNIVKKTEVQTGGFSKESILPKRNSDKLIARKKDWDPKKYGGFDSPTVAYSVLVVAKVEKGKSKKLKSVKELLGITIMERSSFEKNPIDFLEAKGYKEVKKDLIIKLPKYSLFELENGRKRMLASAGELQKGNELALPSKYVNFLYLASHYEKLKGSPEDNEQKQLFVEQHKHYLDEIIEQISEFSKRVILADANLDKVLSAYNKHRDKPIREQAENIIHLFTLTNLGAPAAFKYFDTTIDRKRYTSTKEVLDATLIHQSITGLYETRIDLSQLGGDGGGGSPAPGSSGGTLNIEDEYRLHETSKGPDVPLGSTWLSDFPQAWAETGGMGLAVRQAPLIIPLKATSTPVSIKQYPMSQEARLGIKPHIQRLLDQGILVPCQSPWNTPLLPVKKPGTNDYRPVQDLREVNKRVEDIHPTVPNPYNLLSGLPPSHQWYTVLDLKDAFFCLRLHPTSQSLFAFEWRDPEMGISGQLTWTRLPQGFKNSPTLFNEALHRDLADFRIQHPDLILLQYVDDLLLAATSELDCQQGTRALLQTLGDLGYRASAKKAQICQKQVKYLGYLLKEGQRWLTEARKETVMGQPTPKTPRQLREFLGTAGFCRLWIPGFAEMAAPLYPLTKPGTLFEWGPDQQKAYQEIKQALLTAPALGLPDLTKPFELFVDEKQGYAKGVLTQKLGPWRRPVAYLSKKLDPVAAGWPPCLRMVAAIAVLTKDAGKLTMGQPLVILAPHAVEALVKQPPDRWLSNARMTHYQALLLDTDRVQFGPIVALNPATLLPLPEEGLQHDCLDILAEAHGTRPDLTDQPLPDADHTWYTDGSSFLQEGQRKAGAAVTTETEVVWAKALPAGTSAQRAELIALTQALKMAEGKKLNVYTDSRYAFATAHIHGEIYRRRGWLTSEGKEIKNKDEILALLKALFLPKRLSIIHCPGHQKGNRAEARGNRMADQAAREVATRETPETSTLLAGKRTADGSEFEKRTADGSEFESPKKKAKVE

SEQ ID NO: 7141 - protein, 2092 aa, synthetic construct
MPAAKRVKLDGGDKKYSIGLDIGTNSVGWAVITDEYKVPSKKFKVLGNTDRHSIKKNLIGALLFDSGETAEATRLKRTARRRYTRRKNRICYLQEIFSNEMAKVDDSFFHRLEESFLVEEDKKHERHPIFGNIVDEVAYHEKYPTIYHLRKKLVDSTDKADLRLIYLALAHMIKFRGHFLIEGDLNPDNSDVDKLFIQLVQTYNQLFEENPINASGVDAKAILSARLSKSRRLENLIAQLPGEKKNGLFGNLIALSLGLTPNFKSNFDLAEDAKLQLSKDTYDDDLDNLLAQIGDQYADLFLAAKNLSDAILLSDILRVNTEITKAPLSASMIKRYDEHHQDLTLLKALVRQQLPEKYKEIFFDQSKNGYAGYIDGGASQEEFYKFIKPILEKMDGTEELLVKLNREDLLRKQRTFDNGSIPHQIHLGELHAILRRQEDFYPFLKDNREKIEKILTFRIPYYVGPLARGNSRFAWMTRKSEETITPWNFEEVVDKGASAQSFIERMTNFDKNLPNEKVLPKHSLLYEYFTVYNELTKVKYVTEGMRKPAFLSGEQKKAIVDLLFKTNRKVTVKQLKEDYFKKIECFDSVEISGVEDRFNASLGTYHDLLKIIKDKDFLDNEENEDILEDIVLTLTLFEDREMIEERLKTYAHLFDDKVMKQLKRRRYTGWGRLSRKLINGIRDKQSGKTILDFLKSDGFANRNFMQLIHDDSLTFKEDIQKAQVSGQGDSLHEHIANLAGSPAIKKGILQTVKVVDELVKVMGRHKPENIVIEMARENQTTQKGQKNSRERMKRIEEGIKELGSQILKEHPVENTQLQNEKLYLYYLQNGRDMYVDQELDINRLSDYDVDHIVPQSFLKDDSIDNKVLTRSDKARGKSDNVPSEEVVKKMKNYWRQLLNAKLITQRKFDNLTKAERGGLSELDKAGFIKRQLVETRQITKHVAQILDSRMNTKYDENDKLIREVKVITLKSKLVSDFRKDFQFYKVREINNYHHAHDAYLNAVVGTALIKKYPKLESEFVYGDYKVYDVRKMIAKSEQEIGKATAKYFFYSNIMNFFKTEITLANGEIRKRPLIETNGETGEIVWDKGRDFATVRKVLSMPQVNIVKKTEVQTGGFSKESILPKRNSDKLIARKKDWDPKKYGGFDSPTVAYSVLVVAKVEKGKSKKLKSVKELLGITIMERSSFEKNPIDFLEAKGYKEVKKDLIIKLPKYSLFELENGRKRMLASAGELQKGNELALPSKYVNFLYLASHYEKLKGSPEDNEQKQLFVEQHKHYLDEIIEQISEFSKRVILADANLDKVLSAYNKHRDKPIREQAENIIHLFTLTNLGAPAAFKYFDTTIDRKRYTSTKEVLDATLIHQSITGLYETRIDLSQLGGDGGGGSPAPGSSGGVLNLEEEYRLHEKPVPSSIDPSWLQLFPTVWAERAGMGLANQVPPVVVELRSGASPVAVRQYPMSKEAREGIRPHIQRFLDLGVLVPCQSPWNTPLLPVKKPGTNDYRPVQDLREINKRVQDIHPTVPNPYNLLSSLPPSHTWYSVLDLKDAFFCLKLHPNSQPLFAFEWRDPEKGNTGQLTWTRLPQGFKNSPTLFNEALHRDLAPFRALNPQVVLLQYVDDLLVAAPTYRDCKEGTQKLLQELSKLGYRVSAKKAQLCQKEVTYLGYLLKEGKRWLTPARKATVMKIPPPTTPRQVREFLGTAGFCRLWIPGFASLAAPLYPLTKPSIPFIWTEEHQKAFDRIKEALLSAPALALPDLTKPFTLYVDERAGVARGVLTQTLGPWRRPVAYLSKKLDPVASGWPTCLKAVAAVALLLKDADKLTLGQNVTVIASHSLESIVRQPPDRWMTNARMTHYQSLLLNERVSFAPPAVLNPATLLPVESEATPVHRCSEILAEETGTRRDLKDQPLPGVPAWYTDGSSFIAEGKRRAGAAIVDGKRTVWASSLPEGTSAQKAELVALTQALRLAEGKDINIYTDSRYAFATAHIHGAIYKQRGWLTSAGKDIKNKEEILALLEAIHLPKRVAIIHCPGHQKGNDPVATGNRRADEAAKQAALSTRVLAETTKPAGKRTADGSEFEKRTADGSEFESPKKKAKVE

SEQ ID NO: 7142 - protein, 2094 aa, synthetic construct; identical to SEQ ID NO: 4525

SEQ ID NO: 7143 - protein, 2096 aa, synthetic construct
MPAAKRVKLDGGDKKYSIGLDIGTNSVGWAVITDEYKVPSKKFKVLGNTDRHSIKKNLIGALLFDSGETAEATRLKRTARRRYTRRKNRICYLQEIFSNEMAKVDDSFFHRLEESFLVEEDKKHERHPIFGNIVDEVAYHEKYPTIYHLRKKLVDSTDKADLRLIYLALAHMIKFRGHFLIEGDLNPDNSDVDKLFIQLVQTYNQLFEENPINASGVDAKAILSARLSKSRRLENLIAQLPGEKKNGLFGNLIALSLGLTPNFKSNFDLAEDAKLQLSKDTYDDDLDNLLAQIGDQYADLFLAAKNLSDAILLSDILRVNTEITKAPLSASMIKRYDEHHQDLTLLKALVRQQLPEKYKEIFFDQSKNGYAGYIDGGASQEEFYKFIKPILEKMDGTEELLVKLNREDLLRKQRTFDNGSIPHQIHLGELHAILRRQEDFYPFLKDNREKIEKILTFRIPYYVGPLARGNSRFAWMTRKSEETITPWNFEEVVDKGASAQSFIERMTNFDKNLPNEKVLPKHSLLYEYFTVYNELTKVKYVTEGMRKPAFLSGEQKKAIVDLLFKTNRKVTVKQLKEDYFKKIECFDSVEISGVEDRFNASLGTYHDLLKIIKDKDFLDNEENEDILEDIVLTLTLFEDREMIEERLKTYAHLFDDKVMKQLKRRRYTGWGRLSRKLINGIRDKQSGKTILDFLKSDGFANRNFMQLIHDDSLTFKEDIQKAQVSGQGDSLHEHIANLAGSPAIKKGILQTVKVVDELVKVMGRHKPENIVIEMARENQTTQKGQKNSRERMKRIEEGIKELGSQILKEHPVENTQLQNEKLYLYYLQNGRDMYVDQELDINRLSDYDVDHIVPQSFLKDDSIDNKVLTRSDKARGKSDNVPSEEVVKKMKNYWRQLLNAKLITQRKFDNLTKAERGGLSELDKAGFIKRQLVETRQITKHVAQILDSRMNTKYDENDKLIREVKVITLKSKLVSDFRKDFQFYKVREINNYHHAHDAYLNAVVGTALIKKYPKLESEFVYGDYKVYDVRKMIAKSEQEIGKATAKYFFYSNIMNFFKTEITLANGEIRKRPLIETNGETGEIVWDKGRDFATVRKVLSMPQVNIVKKTEVQTGGFSKESILPKRNSDKLIARKKDWDPKKYGGFDSPTVAYSVLVVAKVEKGKSKKLKSVKELLGITIMERSSFEKNPIDFLEAKGYKEVKKDLIIKLPKYSLFELENGRKRMLASAGELQKGNELALPSKYVNFLYLASHYEKLKGSPEDNEQKQLFVEQHKHYLDEIIEQISEFSKRVILADANLDKVLSAYNKHRDKPIREQAENIIHLFTLTNLGAPAAFKYFDTTIDRKRYTSTKEVLDATLIHQSITGLYETRIDLSQLGGDGGGSSGGSPAPGGTAPLEEEYRLFLEAPIQNVTLLEQWKREIPKVWAEINPPGLASTQAPIHVQLLSTALPVRVRQYPITLEAKRSLRETIRKFRAAGILRPVHSPWNTPLLPVRKSGTSEYRMVQDLREVNKRVETIHPTVPNPYTLLSLLPPDRIWYSVLDLKDAFFCIPLAPESQLIFAFEWADAEEGESGQLTWTRLPQGFKNSPTLFNEALNRDLQGFRLDHPSVSLLQYVDDLLIAADTQAACLSATRDLLMTLAELGYRVSGKKAQLCQEEVTYLGFKIHKGSRSLSNSRTQAILQIPVPKTKRQVREFLGKIGYCRLFIPGFAELAQPLYAATRPGNDPLVWGEKEEEAFQSLKLALTQPPALALPSLDKPFQLFVEETSGAAKGVLTQALGPWKRPVAYLSKRLDPVAAGWPRCLRAIAAAALLTREASKLTFGQDIEITSSHNLESLLRSPPDKWLTNARITQYQVLLLDPPRVRFKQTAALNPATLLPETDDTLPIHHCLDTLDSLTSTRPDLTDQPLAQAEATLFTDGSSYIRDGKRYAGAAVVTLDSVIWAEPLPIGTSAQKAELIALTKALEWSKDKSVNIYTDSRYAFATLHVHGMIYRERGWLTAGGKAIKNAPEILALLTAVWLPKRVAVMHCKGHQKDDAPTSTGNRRADEVAREVAIRPLSTQATISAGKRTADGSEFEKRTADGSEFESPKKKAKVE

SEQ ID NO: 7144 - protein, 2093 aa, synthetic construct
MPAAKRVKLDGGDKKYSIGLDIGTNSVGWAVITDEYKVPSKKFKVLGNTDRHSIKKNLIGALLFDSGETAEATRLKRTARRRYTRRKNRICYLQEIFSNEMAKVDDSFFHRLEESFLVEEDKKHERHPIFGNIVDEVAYHEKYPTIYHLRKKLVDSTDKADLRLIYLALAHMIKFRGHFLIEGDLNPDNSDVDKLFIQLVQTYNQLFEENPINASGVDAKAILSARLSKSRRLENLIAQLPGEKKNGLFGNLIALSLGLTPNFKSNFDLAEDAKLQLSKDTYDDDLDNLLAQIGDQYADLFLAAKNLSDAILLSDILRVNTEITKAPLSASMIKRYDEHHQDLTLLKALVRQQLPEKYKEIFFDQSKNGYAGYIDGGASQEEFYKFIKPILEKMDGTEELLVKLNREDLLRKQRTFDNGSIPHQIHLGELHAILRRQEDFYPFLKDNREKIEKILTFRIPYYVGPLARGNSRFAWMTRKSEETITPWNFEEVVDKGASAQSFIERMTNFDKNLPNEKVLPKHSLLYEYFTVYNELTKVKYVTEGMRKPAFLSGEQKKAIVDLLFKTNRKVTVKQLKEDYFKKIECFDSVEISGVEDRFNASLGTYHDLLKIIKDKDFLDNEENEDILEDIVLTLTLFEDREMIEERLKTYAHLFDDKVMKQLKRRRYTGWGRLSRKLINGIRDKQSGKTILDFLKSDGFANRNFMQLIHDDSLTFKEDIQKAQVSGQGDSLHEHIANLAGSPAIKKGILQTVKVVDELVKVMGRHKPENIVIEMARENQTTQKGQKNSRERMKRIEEGIKELGSQILKEHPVENTQLQNEKLYLYYLQNGRDMYVDQELDINRLSDYDVDHIVPQSFLKDDSIDNKVLTRSDKARGKSDNVPSEEVVKKMKNYWRQLLNAKLITQRKFDNLTKAERGGLSELDKAGFIKRQLVETRQITKHVAQILDSRMNTKYDENDKLIREVKVITLKSKLVSDFRKDFQFYKVREINNYHHAHDAYLNAVVGTALIKKYPKLESEFVYGDYKVYDVRKMIAKSEQEIGKATAKYFFYSNIMNFFKTEITLANGEIRKRPLIETNGETGEIVWDKGRDFATVRKVLSMPQVNIVKKTEVQTGGFSKESILPKRNSDKLIARKKDWDPKKYGGFDSPTVAYSVLVVAKVEKGKSKKLKSVKELLGITIMERSSFEKNPIDFLEAKGYKEVKKDLIIKLPKYSLFELENGRKRMLASAGELQKGNELALPSKYVNFLYLASHYEKLKGSPEDNEQKQLFVEQHKHYLDEIIEQISEFSKRVILADANLDKVLSAYNKHRDKPIREQAENIIHLFTLTNLGAPAAFKYFDTTIDRKRYTSTKEVLDATLIHQSITGLYETRIDLSQLGGDGGGSSGGSPAPGGTLQLEEEYRLFEPESTQKQEMDIWLKNFPQAWAETGGMGTAHCQAPVLIQLKATATPISIRQYPMPHEAYQGIKPHIRRMLDQGILKPCQSPWNTPLLPVKKPGTEDYRPVQDLREVNKRVEDIHPTVPNPYNLLSTLPPSHPWYTVLDLKDAFFCLRLHSESQLLFAFEWRDPEIGLSGQLTWTRLPQGFKNSPTLFNEALHSDLADFRVRYPALVLLQYVDDLLLAAATRTECLEGTKALLETLGNKGYRASAKKAQICLQEVTYLGYSLKDGQRWLTKARKEAILSIPVPKNSRQVREFLGKAGYCRLFIPGFAELAAPLYPLTRPGTLFQWGTEQQLAFEDIKKALLSSPALGLPDITKPFELFIDENSGFAKGVLVQKLGPWKRPVAYLSKKLDTVASGWPPCLRMVAAIAILVKDAGKLTLGQPLTILTSHPVEALVRQPPNKWLSNARMTHYQAMLLDAERVHFGPTVSLNPATLLPLPSGGNHHDCLQILAETHGTRPDLTDQPLPDADLTWYTDGSSFIRNGEREAGAAVTTESEVIWAAPLPPGTSAQRAELIALTQALKMAEGKKLTVYTDSRYAFATTHVHGEIYRRRGWLTSEGKEIKNKNEILALLEALFLPKRLSIIHCPGHQKGDSPQAKGNRLADDTAKKAATETHSSLTVLPAGKRTADGSEFEKRTADGSEFESPKKKAKVE

SEQ ID NO: 7145 - protein, 2174 aa, synthetic construct
MPAAKRVKLDGGDKKYSIGLDIGTNSVGWAVITDEYKVPSKKFKVLGNTDRHSIKKNLIGALLFDSGETAEATRLKRTARRRYTRRKNRICYLQEIFSNEMAKVDDSFFHRLEESFLVEEDKKHERHPIFGNIVDEVAYHEKYPTIYHLRKKLVDSTDKADLRLIYLALAHMIKFRGHFLIEGDLNPDNSDVDKLFIQLVQTYNQLFEENPINASGVDAKAILSARLSKSRRLENLIAQLPGEKKNGLFGNLIALSLGLTPNFKSNFDLAEDAKLQLSKDTYDDDLDNLLAQIGDQYADLFLAAKNLSDAILLSDILRVNTEITKAPLSASMIKRYDEHHQDLTLLKALVRQQLPEKYKEIFFDQSKNGYAGYIDGGASQEEFYKFIKPILEKMDGTEELLVKLNREDLLRKQRTFDNGSIPHQIHLGELHAILRRQEDFYPFLKDNREKIEKILTFRIPYYVGPLARGNSRFAWMTRKSEETITPWNFEEVVDKGASAQSFIERMTNFDKNLPNEKVLPKHSLLYEYFTVYNELTKVKYVTEGMRKPAFLSGEQKKAIVDLLFKTNRKVTVKQLKEDYFKKIECFDSVEISGVEDRFNASLGTYHDLLKIIKDKDFLDNEENEDILEDIVLTLTLFEDREMIEERLKTYAHLFDDKVMKQLKRRRYTGWGRLSRKLINGIRDKQSGKTILDFLKSDGFANRNFMQLIHDDSLTFKEDIQKAQVSGQGDSLHEHIANLAGSPAIKKGILQTVKVVDELVKVMGRHKPENIVIEMARENQTTQKGQKNSRERMKRIEEGIKELGSQILKEHPVENTQLQNEKLYLYYLQNGRDMYVDQELDINRLSDYDVDHIVPQSFLKDDSIDNKVLTRSDKARGKSDNVPSEEVVKKMKNYWRQLLNAKLITQRKFDNLTKAERGGLSELDKAGFIKRQLVETRQITKHVAQILDSRMNTKYDENDKLIREVKVITLKSKLVSDFRKDFQFYKVREINNYHHAHDAYLNAVVGTALIKKYPKLESEFVYGDYKVYDVRKMIAKSEQEIGKATAKYFFYSNIMNFFKTEITLANGEIRKRPLIETNGETGEIVWDKGRDFATVRKVLSMPQVNIVKKTEVQTGGFSKESILPKRNSDKLIARKKDWDPKKYGGFDSPTVAYSVLVVAKVEKGKSKKLKSVKELLGITIMERSSFEKNPIDFLEAKGYKEVKKDLIIKLPKYSLFELENGRKRMLASAGELQKGNELALPSKYVNFLYLASHYEKLKGSPEDNEQKQLFVEQHKHYLDEIIEQISEFSKRVILADANLDKVLSAYNKHRDKPIREQAENIIHLFTLTNLGAPAAFKYFDTTIDRKRYTSTKEVLDATLIHQSITGLYETRIDLSQLGGDGGGSSGGSPAPGGMNPLQLLQPLPAEIKGTKLLAHWNSGATITCIPESFLEDEQPIKKTLIKTIHGEKQQNVYYVTFKVKGRKVEAEVIASPYEYILLSPTDVPWLTQQPLQLTILVPLQEYQEKILSKTALPEDQKQQLKTLFVKYDNLWQHWENQVGHRKIRPHNIATGDYPPRPQKQYPINPKAKPSIQIVIDDLLKQGVLTPQNSTMNTPVYPVPKPDGRWRMVLDYREVNKTIPLTAAQNQHSAGILATIVRQKYKTTLDLANGFWAHPITPESYWLTAFTWQGKQYCWTRLPQGFLNSPALFNADVVDLLKEIPNVQVYVDDIYLSHDDPKEHVQQLEKVFQILLQAGYVVSLKKSEIGQKTVEFLGFNITKEGRGLTDTFKTKLLNITPPKDLKQLQSILGKLNFARNFIPNFAELVQPLYNLIAPAKGKYIEWSEENTKQLNMVIEALNTASNLEERLPEQRLVIKVNTSPSAGYVRYYNETGKKPIMYLNYVFSKAELKFSMLEKLLTTMHKALIKAMDLAMGQEILVYSPIVSMTKIQKTPLPERKALPIRWITWMTYLEDPRIQFHYDKTLPELKHIPDVYTSSQSPVKHPSQYEGVFYTDGSAIKSPDPTKSNNAGMGIVHATYKPEYQVLNQWSIPLGNHTAQMAEIAAVEFACKKALKIPGPVLVITDSFYVAESANKELPYWKSNGFVNNKKKPLKHISKWKSIAECLSMKPDITIQHEKGISLQIPVFILKGNALADKLATQGSYVVNAGKRTADGSEFEKRTADGSEFESPKKKAKVE

SEQ ID NO: 7146 - protein, 2092 aa, synthetic construct
MPAAKRVKLDGGDKKYSIGLDIGTNSVGWAVITDEYKVPSKKFKVLGNTDRHSIKKNLIGALLFDSGETAEATRLKRTARRRYTRRKNRICYLQEIFSNEMAKVDDSFFHRLEESFLVEEDKKHERHPIFGNIVDEVAYHEKYPTIYHLRKKLVDSTDKADLRLIYLALAHMIKFRGHFLIEGDLNPDNSDVDKLFIQLVQTYNQLFEENPINASGVDAKAILSARLSKSRRLENLIAQLPGEKKNGLFGNLIALSLGLTPNFKSNFDLAEDAKLQLSKDTYDDDLDNLLAQIGDQYADLFLAAKNLSDAILLSDILRVNTEITKAPLSASMIKRYDEHHQDLTLLKALVRQQLPEKYKEIFFDQSKNGYAGYIDGGASQEEFYKFIKPILEKMDGTEELLVKLNREDLLRKQRTFDNGSIPHQIHLGELHAILRRQEDFYPFLKDNREKIEKILTFRIPYYVGPLARGNSRFAWMTRKSEETITPWNFEEVVDKGASAQSFIERMTNFDKNLPNEKVLPKHSLLYEYFTVYNELTKVKYVTEGMRKPAFLSGEQKKAIVDLLFKTNRKVTVKQLKEDYFKKIECFDSVEISGVEDRFNASLGTYHDLLKIIKDKDFLDNEENEDILEDIVLTLTLFEDREMIEERLKTYAHLFDDKVMKQLKRRRYTGWGRLSRKLINGIRDKQSGKTILDFLKSDGFANRNFMQLIHDDSLTFKEDIQKAQVSGQGDSLHEHIANLAGSPAIKKGILQTVKVVDELVKVMGRHKPENIVIEMARENQTTQKGQKNSRERMKRIEEGIKELGSQILKEHPVENTQLQNEKLYLYYLQNGRDMYVDQELDINRLSDYDVDHIVPQSFLKDDSIDNKVLTRSDKARGKSDNVPSEEVVKKMKNYWRQLLNAKLITQRKFDNLTKAERGGLSELDKAGFIKRQLVETRQITKHVAQILDSRMNTKYDENDKLIREVKVITLKSKLVSDFRKDFQFYKVREINNYHHAHDAYLNAVVGTALIKKYPKLESEFVYGDYKVYDVRKMIAKSEQEIGKATAKYFFYSNIMNFFKTEITLANGEIRKRPLIETNGETGEIVWDKGRDFATVRKVLSMPQVNIVKKTEVQTGGFSKESILPKRNSDKLIARKKDWDPKKYGGFDSPTVAYSVLVVAKVEKGKSKKLKSVKELLGITIMERSSFEKNPIDFLEAKGYKEVKKDLIIKLPKYSLFELENGRKRMLASAGELQKGNELALPSKYVNFLYLASHYEKLKGSPEDNEQKQLFVEQHKHYLDEIIEQISEFSKRVILADANLDKVLSAYNKHRDKPIREQAENIIHLFTLTNLGAPAAFKYFDTTIDRKRYTSTKEVLDATLIHQSITGLYETRIDLSQLGGDGGGSSGGSPAPGGVLNLEEEYRLHEKPVPSSIDPSWLQLFPTVWAERAGMGLANQVPPVVVELRSGASPVAVRQYPMSKEAREGIRPHIQKFLDLGVLVPCRSPWNTPLLPVKKPGTNDYRPVQDLREINKRVQDIHPTVPNPYNLLSSLPPSYTWYSVLDLKDAFFCLRLHPNSQPLFAFEWKDPEKGNTGQLTWTRLPQGFKNSPTLFNEALHRDLAPFRALNPQVVLLQYVDDLLVAAPTYEDCKKGTQKLLQELSKLGYRVSAKKAQLCQREVTYLGYLLKEGKRWLTPARKATVMKIPVPTTPRQVREFLGKAGFCRLFIPGFASLAAPLYPLTKPSIPFIWTEEHQQAFDHIKKALLSAPALALPDLTKPFTLYIDERAGVARGVLTQTLGPWRRPVAYLSKKLDPVASGWPTCLKAVAAVALLLKDADKLTLGQNVTVIASHSLESIVRQPPDRWMTNARMTHYQSLLLNERVSFAPPAVLNPATLLPVESEATPVHRCSEILAEETGTRRDLEDQPLPGVPTWYTDGSSFITEGKRRAGAPIVDGKRTVWASSLPEGTSAQKAELVALTQALRLAEGKNINIYTDSRYAFATAHIHGAIYKQRGWLTSAGKDIKNKEEILALLEAIHLPRRVAIIHCPGHQRGSNPVATGNRRADEAAKQAALSTRVLAGTTKPAGKRTADGSEFEKRTADGSEFESPKKKAKVE

SEQ ID NO: 7147 - protein, 2094 aa, synthetic construct
MPAAKRVKLDGGDKKYSIGLDIGTNSVGWAVITDEYKVPSKKFKVLGNTDRHSIKKNLIGALLFDSGETAEATRLKRTARRRYTRRKNRICYLQEIFSNEMAKVDDSFFHRLEESFLVEEDKKHERHPIFGNIVDEVAYHEKYPTIYHLRKKLVDSTDKADLRLIYLALAHMIKFRGHFLIEGDLNPDNSDVDKLFIQLVQTYNQLFEENPINASGVDAKAILSARLSKSRRLENLIAQLPGEKKNGLFGNLIALSLGLTPNFKSNFDLAEDAKLQLSKDTYDDDLDNLLAQIGDQYADLFLAAKNLSDAILLSDILRVNTEITKAPLSASMIKRYDEHHQDLTLLKALVRQQLPEKYKEIFFDQSKNGYAGYIDGGASQEEFYKFIKPILEKMDGTEELLVKLNREDLLRKQRTFDNGSIPHQIHLGELHAILRRQEDFYPFLKDNREKIEKILTFRIPYYVGPLARGNSRFAWMTRKSEETITPWNFEEVVDKGASAQSFIERMTNFDKNLPNEKVLPKHSLLYEYFTVYNELTKVKYVTEGMRKPAFLSGEQKKAIVDLLFKTNRKVTVKQLKEDYFKKIECFDSVEISGVEDRFNASLGTYHDLLKIIKDKDFLDNEENEDILEDIVLTLTLFEDREMIEERLKTYAHLFDDKVMKQLKRRRYTGWGRLSRKLINGIRDKQSGKTILDFLKSDGFANRNFMQLIHDDSLTFKEDIQKAQVSGQGDSLHEHIANLAGSPAIKKGILQTVKVVDELVKVMGRHKPENIVIEMARENQTTQKGQKNSRERMKRIEEGIKELGSQILKEHPVENTQLQNEKLYLYYLQNGRDMYVDQELDINRLSDYDVDHIVPQSFLKDDSIDNKVLTRSDKARGKSDNVPSEEVVKKMKNYWRQLLNAKLITQRKFDNLTKAERGGLSELDKAGFIKRQLVETRQITKHVAQILDSRMNTKYDENDKLIREVKVITLKSKLVSDFRKDFQFYKVREINNYHHAHDAYLNAVVGTALIKKYPKLESEFVYGDYKVYDVRKMIAKSEQEIGKATAKYFFYSNIMNFFKTEITLANGEIRKRPLIETNGETGEIVWDKGRDFATVRKVLSMPQVNIVKKTEVQTGGFSKESILPKRNSDKLIARKKDWDPKKYGGFDSPTVAYSVLVVAKVEKGKSKKLKSVKELLGITIMERSSFEKNPIDFLEAKGYKEVKKDLIIKLPKYSLFELENGRKRMLASAGELQKGNELALPSKYVNFLYLASHYEKLKGSPEDNEQKQLFVEQHKHYLDEIIEQISEFSKRVILADANLDKVLSAYNKHRDKPIREQAENIIHLFTLTNLGAPAAFKYFDTTIDRKRYTSTKEVLDATLIHQSITGLYETRIDLSQLGGDGGGSSGGSPAPGGTLNIEDEYRLHETSKEPDVSLGSTWLSDFPQAWAETGGMGLAVRQAPLIIPLKATSTPVSIKQYPMSQEARLGIKPHIQRLLDQGILVPCQSPWNTPLLPVKKPGTNDYRPVQDLREVNKRVEDIHPTVPNPYNLLSGLPPSHQWYTVLDLKDAFFCLRLHPTSQPLFAFEWRDPEMGISGQLTWTRLPQGFKNSPTLFNEALHRDLAGFRIQHPDLILLQYVDDLLLAATSELDCQQGTRALLQTLGDLGYRASAKKAQICQKQVKYLGYLLKEGQRWLTEARKETVMGQPIPKTPRQLREFLGTAGFCRLWIPGFAEMAAPLYPLTKPGTLFNWGPDQQKAFQEIKQALLTAPALGLPDLTKPFELFVDEKQGYAKGVLTQKLGPWRRPVAYLSKKLDPVAAGWPPCLRMVAAIAVLTKDAGKLTMGQPLVILAPHAVEALVKQPPDRWLSNARMTHYQALLLDTDRVQFGPVVALNPATLLPLPEEGLQHDCLDILAEAHGTRSDLMDQPLPDADHTWYTDGSSFLQEGQRKAGAAVTTETEVIWARALPAGTSAQRAELIALTQALKMAEGKKLNVYTDSRYAFATAHIHGEIYRRRGWLTSEGKEIKNKDEILALLKALFLPKRLSIIHCPGHQKGNSAEARGNRMADQAAREVATRETPETSTLLAGKRTADGSEFEKRTADGSEFESPKKKAKVE

SEQ ID NO: 7148 - protein, 2092 aa, synthetic construct
MPAAKRVKLDGGDKKYSIGLDIGTNSVGWAVITDEYKVPSKKFKVLGNTDRHSIKKNLIGALLFDSGETAEATRLKRTARRRYTRRKNRICYLQEIFSNEMAKVDDSFFHRLEESFLVEEDKKHERHPIFGNIVDEVAYHEKYPTIYHLRKKLVDSTDKADLRLIYLALAHMIKFRGHFLIEGDLNPDNSDVDKLFIQLVQTYNQLFEENPINASGVDAKAILSARLSKSRRLENLIAQLPGEKKNGLFGNLIALSLGLTPNFKSNFDLAEDAKLQLSKDTYDDDLDNLLAQIGDQYADLFLAAKNLSDAILLSDILRVNTEITKAPLSASMIKRYDEHHQDLTLLKALVRQQLPEKYKEIFFDQSKNGYAGYIDGGASQEEFYKFIKPILEKMDGTEELLVKLNREDLLRKQRTFDNGSIPHQIHLGELHAILRRQEDFYPFLKDNREKIEKILTFRIPYYVGPLARGNSRFAWMTRKSEETITPWNFEEVVDKGASAQSFIERMTNFDKNLPNEKVLPKHSLLYEYFTVYNELTKVKYVTEGMRKPAFLSGEQKKAIVDLLFKTNRKVTVKQLKEDYFKKIECFDSVEISGVEDRFNASLGTYHDLLKIIKDKDFLDNEENEDILEDIVLTLTLFEDREMIEERLKTYAHLFDDKVMKQLKRRRYTGWGRLSRKLINGIRDKQSGKTILDFLKSDGFANRNFMQLIHDDSLTFKEDIQKAQVSGQGDSLHEHIANLAGSPAIKKGILQTVKVVDELVKVMGRHKPENIVIEMARENQTTQKGQKNSRERMKRIEEGIKELGSQILKEHPVENTQLQNEKLYLYYLQNGRDMYVDQELDINRLSDYDVDHIVPQSFLKDDSIDNKVLTRSDKARGKSDNVPSEEVVKKMKNYWRQLLNAKLITQRKFDNLTKAERGGLSELDKAGFIKRQLVETRQITKHVAQILDSRMNTKYDENDKLIREVKVITLKSKLVSDFRKDFQFYKVREINNYHHAHDAYLNAVVGTALIKKYPKLESEFVYGDYKVYDVRKMIAKSEQEIGKATAKYFFYSNIMNFFKTEITLANGEIRKRPLIETNGETGEIVWDKGRDFATVRKVLSMPQVNIVKKTEVQTGGFSKESILPKRNSDKLIARKKDWDPKKYGGFDSPTVAYSVLVVAKVEKGKSKKLKSVKELLGITIMERSSFEKNPIDFLEAKGYKEVKKDLIIKLPKYSLFELENGRKRMLASAGELQKGNELALPSKYVNFLYLASHYEKLKGSPEDNEQKQLFVEQHKHYLDEIIEQISEFSKRVILADANLDKVLSAYNKHRDKPIREQAENIIHLFTLTNLGAPAAFKYFDTTIDRKRYTSTKEVLDATLIHQSITGLYETRIDLSQLGGDGGGSSGGSPAPGGVLNLEEEYRLHEKPVPSSIDPSWLQLFPTVWAERAGMGLANQVPPVVVELRSGASPVAVRQYPMSKEAREGIRPHIQRFLDLGVLVPCQSPWNTPLLPVKKPGTNDYRPVQDLREINKRVQDIHPTVPNPYNLLSSLPPSHTWYSVLDLKDAFFCLKLHPNSQPLFAFEWRDPEKGNTGQLTWTRLPQGFKNSPTLFNEALHRDLAPFRALNPQVVLLQYVDDLLVAAPTYRDCKEGTQKLLQELSKLGYRVSAKKAQLCQKEVTYLGYLLKEGKRWLTPARKATVMKIPPPTTPRQVREFLGTAGFCRLWIPGFASLAAPLYPLTKPSIPFIWTEEHQKAFDRIKEALLSAPALALPDLTKPFTLYVDERAGVARGVLTQTLGPWRRPVAYLSKKLDPVASGWPTCLKAVAAVALLLKDADKLTLGQNVTVIASHSLESIVRQPPDRWMTNARMTHYQSLLLNERVSFAPPAVLNPATLLPVESEATPVHRCSEILAEETGTRRDLKDQPLPGVPAWYTDGSSFIAEGKRRAGAAIVDGKRTVWASSLPEGTSAQKAELVALTQALRLAEGKDINIYTDSRYAFATAHIHGAIYKQRGWLTSAGKDIKNKEEILALLEAIHLPKRVAIIHCPGHQKGNDPVATGNRRADEAAKQAALSTRVLAETTKPAGKRTADGSEFEKRTADGSEFESPKKKAKVE

SEQ ID NO: 7149 - protein, 2092 aa, synthetic construct
MPAAKRVKLDGGDKKYSIGLDIGTNSVGWAVITDEYKVPSKKFKVLGNTDRHSIKKNLIGALLFDSGETAEATRLKRTARRRYTRRKNRICYLQEIFSNEMAKVDDSFFHRLEESFLVEEDKKHERHPIFGNIVDEVAYHEKYPTIYHLRKKLVDSTDKADLRLIYLALAHMIKFRGHFLIEGDLNPDNSDVDKLFIQLVQTYNQLFEENPINASGVDAKAILSARLSKSRRLENLIAQLPGEKKNGLFGNLIALSLGLTPNFKSNFDLAEDAKLQLSKDTYDDDLDNLLAQIGDQYADLFLAAKNLSDAILLSDILRVNTEITKAPLSASMIKRYDEHHQDLTLLKALVRQQLPEKYKEIFFDQSKNGYAGYIDGGASQEEFYKFIKPILEKMDGTEELLVKLNREDLLRKQRTFDNGSIPHQIHLGELHAILRRQEDFYPFLKDNREKIEKILTFRIPYYVGPLARGNSRFAWMTRKSEETITPWNFEEVVDKGASAQSFIERMTNFDKNLPNEKVLPKHSLLYEYFTVYNELTKVKYVTEGMRKPAFLSGEQKKAIVDLLFKTNRKVTVKQLKEDYFKKIECFDSVEISGVEDRFNASLGTYHDLLKIIKDKDFLDNEENEDILEDIVLTLTLFEDREMIEERLKTYAHLFDDKVMKQLKRRRYTGWGRLSRKLINGIRDKQSGKTILDFLKSDGFANRNFMQLIHDDSLTFKEDIQKAQVSGQGDSLHEHIANLAGSPAIKKGILQTVKVVDELVKVMGRHKPENIVIEMARENQTTQKGQKNSRERMKRIEEGIKELGSQILKEHPVENTQLQNEKLYLYYLQNGRDMYVDQELDINRLSDYDVDHIVPQSFLKDDSIDNKVLTRSDKARGKSDNVPSEEVVKKMKNYWRQLLNAKLITQRKFDNLTKAERGGLSELDKAGFIKRQLVETRQITKHVAQILDSRMNTKYDENDKLIREVKVITLKSKLVSDFRKDFQFYKVREINNYHHAHDAYLNAVVGTALIKKYPKLESEFVYGDYKVYDVRKMIAKSEQEIGKATAKYFFYSNIMNFFKTEITLANGEIRKRPLIETNGETGEIVWDKGRDFATVRKVLSMPQVNIVKKTEVQTGGFSKESILPKRNSDKLIARKKDWDPKKYGGFDSPTVAYSVLVVAKVEKGKSKKLKSVKELLGITIMERSSFEKNPIDFLEAKGYKEVKKDLIIKLPKYSLFELENGRKRMLASAGELQKGNELALPSKYVNFLYLASHYEKLKGSPEDNEQKQLFVEQHKHYLDEIIEQISEFSKRVILADANLDKVLSAYNKHRDKPIREQAENIIHLFTLTNLGAPAAFKYFDTTIDRKRYTSTKEVLDATLIHQSITGLYETRIDLSQLGGDGGGSSGGSPAPGGVLNLEEEYRLHEKPVPSSIDPSWLQLFPTVWAERAGMGLANQVPPVVVELRSGASPVAVRQYPMSKEAREGIRPHIQRFLDLGVLVPCQSPWNTPLLPVKKPGTNDYRPVQDLREINKRVQDIHPTVPNPYNLLSSLPPSHTWYSVLDLKDAFFCLKLHPNSQPLFAFEWRDPEKGNTGQLTWTRLPQGFKNSPTLFNEALHRDLAPFRALNPQVVLLQYVDDLLVAAPTYRDCKEGTQKLLQELSKLGYRVSAKKAQLCQKEVTYLGYLLKEGKRWLTPARKATVMKIPPPTTPRQVREFLGKAGFCRLFIPGFASLAAPLYPLTKPSIPFIWTEEHQKAFDRIKEALLSAPALALPDLTKPFTLYVDERAGVARGVLTQTLGPWRRPVAYLSKKLDPVASGWPTCLKAVAAVALLLKDADKLTLGQNVTVIASHSLESIVRQPPDRWMTNARMTHYQSLLLNERVSFAPPAVLNPATLLPVESEATPVHRCSEILAEETGTRRDLKDQPLPGVPAWYTDGSSFIAEGKRRAGAAIVDGKRTVWASSLPEGTSAQKAELVALTQALRLAEGKDINIYTDSRYAFATAHIHGAIYKQRGWLTSAGKDIKNKEEILALLEAIHLPKRVAIIHCPGHQKGNDPVATGNRRADEAAKQAALSTRVLAETTKPAGKRTADGSEFEKRTADGSEFESPKKKAKVE

SEQ ID NO: 7150 - protein, 2094 aa, synthetic construct
MPAAKRVKLDGGDKKYSIGLDIGTNSVGWAVITDEYKVPSKKFKVLGNTDRHSIKKNLIGALLFDSGETAEATRLKRTARRRYTRRKNRICYLQEIFSNEMAKVDDSFFHRLEESFLVEEDKKHERHPIFGNIVDEVAYHEKYPTIYHLRKKLVDSTDKADLRLIYLALAHMIKFRGHFLIEGDLNPDNSDVDKLFIQLVQTYNQLFEENPINASGVDAKAILSARLSKSRRLENLIAQLPGEKKNGLFGNLIALSLGLTPNFKSNFDLAEDAKLQLSKDTYDDDLDNLLAQIGDQYADLFLAAKNLSDAILLSDILRVNTEITKAPLSASMIKRYDEHHQDLTLLKALVRQQLPEKYKEIFFDQSKNGYAGYIDGGASQEEFYKFIKPILEKMDGTEELLVKLNREDLLRKQRTFDNGSIPHQIHLGELHAILRRQEDFYPFLKDNREKIEKILTFRIPYYVGPLARGNSRFAWMTRKSEETITPWNFEEVVDKGASAQSFIERMTNFDKNLPNEKVLPKHSLLYEYFTVYNELTKVKYVTEGMRKPAFLSGEQKKAIVDLLFKTNRKVTVKQLKEDYFKKIECFDSVEISGVEDRFNASLGTYHDLLKIIKDKDFLDNEENEDILEDIVLTLTLFEDREMIEERLKTYAHLFDDKVMKQLKRRRYTGWGRLSRKLINGIRDKQSGKTILDFLKSDGFANRNFMQLIHDDSLTFKEDIQKAQVSGQGDSLHEHIANLAGSPAIKKGILQTVKVVDELVKVMGRHKPENIVIEMARENQTTQKGQKNSRERMKRIEEGIKELGSQILKEHPVENTQLQNEKLYLYYLQNGRDMYVDQELDINRLSDYDVDHIVPQSFLKDDSIDNKVLTRSDKARGKSDNVPSEEVVKKMKNYWRQLLNAKLITQRKFDNLTKAERGGLSELDKAGFIKRQLVETRQITKHVAQILDSRMNTKYDENDKLIREVKVITLKSKLVSDFRKDFQFYKVREINNYHHAHDAYLNAVVGTALIKKYPKLESEFVYGDYKVYDVRKMIAKSEQEIGKATAKYFFYSNIMNFFKTEITLANGEIRKRPLIETNGETGEIVWDKGRDFATVRKVLSMPQVNIVKKTEVQTGGFSKESILPKRNSDKLIARKKDWDPKKYGGFDSPTVAYSVLVVAKVEKGKSKKLKSVKELLGITIMERSSFEKNPIDFLEAKGYKEVKKDLIIKLPKYSLFELENGRKRMLASAGELQKGNELALPSKYVNFLYLASHYEKLKGSPEDNEQKQLFVEQHKHYLDEIIEQISEFSKRVILADANLDKVLSAYNKHRDKPIREQAENIIHLFTLTNLGAPAAFKYFDTTIDRKRYTSTKEVLDATLIHQSITGLYETRIDLSQLGGDGGGSSGGSPAPGGTLNIEDEYRLHETSKEPDVPLGSTWLSDFPQAWAETGGMGLAVRQAPLIIPLKATSTPVSIKQYPMSQEARLGIKPHIQRLLDQGILVPCQSPWNTPLLPVKKPGTNDYRPVQDLREVNKRVEDIHPTVPNPYNLLSGLPPSHQWYTVLDLKDAFFCLRLHPTSQPLFAFEWRDPEMGISGQLTWTRLPQGFKNSPTLFNEALHRDLADFRIQHPDLILLQYVDDLLLAATSEQDCQRGTRALLQTLGNLGYRASAKKAQICQKQVKYLGYLLKEGQRWLTEARKETVMGQPTPKTPRQLREFLGTAGFCRLWIPGFAEMAAPLYPLTKPGTLFNWGPDQQKAYQEIKQALLTAPALGLPDLTKPFELFVDEKQGYAKGVLTQKLGPWRRPVAYLSKKLDPVAAGWPPCLRMVAAIAVLTKDAGKLTMGQPLVILAPHAVEALVKQPPDRWLSNARMTHYQAMLLDTDRVQFGPVVALNPATLLPLPEKEAPHDCLEILAETHGTRPDLTDQPIPDADYTWYTDGSSFLQEGQRRAGAAVTTETEVIWARALPAGTSAQRAELIALTQALKMAEGKKLNVYTDSRYAFATAHVHGEIYRRRGWLTSEGREIKNKNEILALLKALFLPKRLSIIHCPGHQKGNSAEARGNRMADQAAREAAMKAVLETSTLLAGKRTADGSEFEKRTADGSEFESPKKKAKVE

SEQ ID NO: 7151 - protein, 2096 aa, synthetic construct
MPAAKRVKLDGGDKKYSIGLDIGTNSVGWAVITDEYKVPSKKFKVLGNTDRHSIKKNLIGALLFDSGETAEATRLKRTARRRYTRRKNRICYLQEIFSNEMAKVDDSFFHRLEESFLVEEDKKHERHPIFGNIVDEVAYHEKYPTIYHLRKKLVDSTDKADLRLIYLALAHMIKFRGHFLIEGDLNPDNSDVDKLFIQLVQTYNQLFEENPINASGVDAKAILSARLSKSRRLENLIAQLPGEKKNGLFGNLIALSLGLTPNFKSNFDLAEDAKLQLSKDTYDDDLDNLLAQIGDQYADLFLAAKNLSDAILLSDILRVNTEITKAPLSASMIKRYDEHHQDLTLLKALVRQQLPEKYKEIFFDQSKNGYAGYIDGGASQEEFYKFIKPILEKMDGTEELLVKLNREDLLRKQRTFDNGSIPHQIHLGELHAILRRQEDFYPFLKDNREKIEKILTFRIPYYVGPLARGNSRFAWMTRKSEETITPWNFEEVVDKGASAQSFIERMTNFDKNLPNEKVLPKHSLLYEYFTVYNELTKVKYVTEGMRKPAFLSGEQKKAIVDLLFKTNRKVTVKQLKEDYFKKIECFDSVEISGVEDRFNASLGTYHDLLKIIKDKDFLDNEENEDILEDIVLTLTLFEDREMIEERLKTYAHLFDDKVMKQLKRRRYTGWGRLSRKLINGIRDKQSGKTILDFLKSDGFANRNFMQLIHDDSLTFKEDIQKAQVSGQGDSLHEHIANLAGSPAIKKGILQTVKVVDELVKVMGRHKPENIVIEMARENQTTQKGQKNSRERMKRIEEGIKELGSQILKEHPVENTQLQNEKLYLYYLQNGRDMYVDQELDINRLSDYDVDHIVPQSFLKDDSIDNKVLTRSDKARGKSDNVPSEEVVKKMKNYWRQLLNAKLITQRKFDNLTKAERGGLSELDKAGFIKRQLVETRQITKHVAQILDSRMNTKYDENDKLIREVKVITLKSKLVSDFRKDFQFYKVREINNYHHAHDAYLNAVVGTALIKKYPKLESEFVYGDYKVYDVRKMIAKSEQEIGKATAKYFFYSNIMNFFKTEITLANGEIRKRPLIETNGETGEIVWDKGRDFATVRKVLSMPQVNIVKKTEVQTGGFSKESILPKRNSDKLIARKKDWDPKKYGGFDSPTVAYSVLVVAKVEKGKSKKLKSVKELLGITIMERSSFEKNPIDFLEAKGYKEVKKDLIIKLPKYSLFELENGRKRMLASAGELQKGNELALPSKYVNFLYLASHYEKLKGSPEDNEQKQLFVEQHKHYLDEIIEQISEFSKRVILADANLDKVLSAYNKHRDKPIREQAENIIHLFTLTNLGAPAAFKYFDTTIDRKRYTSTKEVLDATLIHQSITGLYETRIDLSQLGGDGGGSSPAPGGSGGTAPLEEEYRLFLEAPIQNVTLLEQWKREIPKVWAEINPPGLASTQAPIHVQLLSTALPVRVRQYPITLEAKRSLRETIRKFRAAGILRPVHSPWNTPLLPVRKSGTSEYRMVQDLREVNKRVETIHPTVPNPYTLLSLLPPDRIWYSVLDLKDAFFCIPLAPESQLIFAFEWADAEEGESGQLTWTRLPQGFKNSPTLFNEALNRDLQGFRLDHPSVSLLQYVDDLLIAADTQAACLSATRDLLMTLAELGYRVSGKKAQLCQEEVTYLGFKIHKGSRSLSNSRTQAILQIPVPKTKRQVREFLGTIGYCRLWIPGFAELAQPLYAATRPGNDPLVWGEKEEEAFQSLKLALTQPPALALPSLDKPFQLFVEETSGAAKGVLTQALGPWKRPVAYLSKRLDPVAAGWPRCLRAIAAAALLTREASKLTFGQDIEITSSHNLESLLRSPPDKWLTNARITQYQVLLLDPPRVRFKQTAALNPATLLPETDDTLPIHHCLDTLDSLTSTRPDLTDQPLAQAEATLFTDGSSYIRDGKRYAGAAVVTLDSVIWAEPLPIGTSAQKAELIALTKALEWSKDKSVNIYTDSRYAFATLHVHGMIYRERGWLTAGGKAIKNAPEILALLTAVWLPKRVAVMHCKGHQKDDAPTSTGNRRADEVAREVAIRPLSTQATISAGKRTADGSEFEKRTADGSEFESPKKKAKVE

SEQ ID NO: 7152 - protein, 2096 aa, synthetic construct
MPAAKRVKLDGGDKKYSIGLDIGTNSVGWAVITDEYKVPSKKFKVLGNTDRHSIKKNLIGALLFDSGETAEATRLKRTARRRYTRRKNRICYLQEIFSNEMAKVDDSFFHRLEESFLVEEDKKHERHPIFGNIVDEVAYHEKYPTIYHLRKKLVDSTDKADLRLIYLALAHMIKFRGHFLIEGDLNPDNSDVDKLFIQLVQTYNQLFEENPINASGVDAKAILSARLSKSRRLENLIAQLPGEKKNGLFGNLIALSLGLTPNFKSNFDLAEDAKLQLSKDTYDDDLDNLLAQIGDQYADLFLAAKNLSDAILLSDILRVNTEITKAPLSASMIKRYDEHHQDLTLLKALVRQQLPEKYKEIFFDQSKNGYAGYIDGGASQEEFYKFIKPILEKMDGTEELLVKLNREDLLRKQRTFDNGSIPHQIHLGELHAILRRQEDFYPFLKDNREKIEKILTFRIPYYVGPLARGNSRFAWMTRKSEETITPWNFEEVVDKGASAQSFIERMTNFDKNLPNEKVLPKHSLLYEYFTVYNELTKVKYVTEGMRKPAFLSGEQKKAIVDLLFKTNRKVTVKQLKEDYFKKIECFDSVEISGVEDRFNASLGTYHDLLKIIKDKDFLDNEENEDILEDIVLTLTLFEDREMIEERLKTYAHLFDDKVMKQLKRRRYTGWGRLSRKLINGIRDKQSGKTILDFLKSDGFANRNFMQLIHDDSLTFKEDIQKAQVSGQGDSLHEHIANLAGSPAIKKGILQTVKVVDELVKVMGRHKPENIVIEMARENQTTQKGQKNSRERMKRIEEGIKELGSQILKEHPVENTQLQNEKLYLYYLQNGRDMYVDQELDINRLSDYDVDHIVPQSFLKDDSIDNKVLTRSDKARGKSDNVPSEEVVKKMKNYWRQLLNAKLITQRKFDNLTKAERGGLSELDKAGFIKRQLVETRQITKHVAQILDSRMNTKYDENDKLIREVKVITLKSKLVSDFRKDFQFYKVREINNYHHAHDAYLNAVVGTALIKKYPKLESEFVYGDYKVYDVRKMIAKSEQEIGKATAKYFFYSNIMNFFKTEITLANGEIRKRPLIETNGETGEIVWDKGRDFATVRKVLSMPQVNIVKKTEVQTGGFSKESILPKRNSDKLIARKKDWDPKKYGGFDSPTVAYSVLVVAKVEKGKSKKLKSVKELLGITIMERSSFEKNPIDFLEAKGYKEVKKDLIIKLPKYSLFELENGRKRMLASAGELQKGNELALPSKYVNFLYLASHYEKLKGSPEDNEQKQLFVEQHKHYLDEIIEQISEFSKRVILADANLDKVLSAYNKHRDKPIREQAENIIHLFTLTNLGAPAAFKYFDTTIDRKRYTSTKEVLDATLIHQSITGLYETRIDLSQLGGDGGGSSPAPGGSGGTAPLEEEYRLFLEAPIQNVTLLEQWKREIPKVWAEINPPGLASTQAPIHVQLLSTALPVRVRQYPITLEAKRSLRETIRKFRAAGILRPVHSPWNTPLLPVRKSGTSEYRMVQDLREVNKRVETIHPTVPNPYTLLSLLPPDRIWYSVLDLKDAFFCIPLAPESQLIFAFEWADAEEGESGQLTWTRLPQGFKNSPTLFNEALNRDLQGFRLDHPSVSLLQYVDDLLIAADTQAACLSATRDLLMTLAELGYRVSGKKAQLCQEEVTYLGFKIHKGSRSLSNSRTQAILQIPVPKTKRQVREFLGKIGYCRLFIPGFAELAQPLYAATRPGNDPLVWGEKEEEAFQSLKLALTQPPALALPSLDKPFQLFVEETSGAAKGVLTQALGPWKRPVAYLSKRLDPVAAGWPRCLRAIAAAALLTREASKLTFGQDIEITSSHNLESLLRSPPDKWLTNARITQYQVLLLDPPRVRFKQTAALNPATLLPETDDTLPIHHCLDTLDSLTSTRPDLTDQPLAQAEATLFTDGSSYIRDGKRYAGAAVVTLDSVIWAEPLPIGTSAQKAELIALTKALEWSKDKSVNIYTDSRYAFATLHVHGMIYRERGWLTAGGKAIKNAPEILALLTAVWLPKRVAVMHCKGHQKDDAPTSTGNRRADEVAREVAIRPLSTQATISAGKRTADGSEFEKRTADGSEFESPKKKAKVE

SEQ ID NO: 7153 - protein, 2093 aa, synthetic construct
MPAAKRVKLDGGDKKYSIGLDIGTNSVGWAVITDEYKVPSKKFKVLGNTDRHSIKKNLIGALLFDSGETAEATRLKRTARRRYTRRKNRICYLQEIFSNEMAKVDDSFFHRLEESFLVEEDKKHERHPIFGNIVDEVAYHEKYPTIYHLRKKLVDSTDKADLRLIYLALAHMIKFRGHFLIEGDLNPDNSDVDKLFIQLVQTYNQLFEENPINASGVDAKAILSARLSKSRRLENLIAQLPGEKKNGLFGNLIALSLGLTPNFKSNFDLAEDAKLQLSKDTYDDDLDNLLAQIGDQYADLFLAAKNLSDAILLSDILRVNTEITKAPLSASMIKRYDEHHQDLTLLKALVRQQLPEKYKEIFFDQSKNGYAGYIDGGASQEEFYKFIKPILEKMDGTEELLVKLNREDLLRKQRTFDNGSIPHQIHLGELHAILRRQEDFYPFLKDNREKIEKILTFRIPYYVGPLARGNSRFAWMTRKSEETITPWNFEEVVDKGASAQSFIERMTNFDKNLPNEKVLPKHSLLYEYFTVYNELTKVKYVTEGMRKPAFLSGEQKKAIVDLLFKTNRKVTVKQLKEDYFKKIECFDSVEISGVEDRFNASLGTYHDLLKIIKDKDFLDNEENEDILEDIVLTLTLFEDREMIEERLKTYAHLFDDKVMKQLKRRRYTGWGRLSRKLINGIRDKQSGKTILDFLKSDGFANRNFMQLIHDDSLTFKEDIQKAQVSGQGDSLHEHIANLAGSPAIKKGILQTVKVVDELVKVMGRHKPENIVIEMARENQTTQKGQKNSRERMKRIEEGIKELGSQILKEHPVENTQLQNEKLYLYYLQNGRDMYVDQELDINRLSDYDVDHIVPQSFLKDDSIDNKVLTRSDKARGKSDNVPSEEVVKKMKNYWRQLLNAKLITQRKFDNLTKAERGGLSELDKAGFIKRQLVETRQITKHVAQILDSRMNTKYDENDKLIREVKVITLKSKLVSDFRKDFQFYKVREINNYHHAHDAYLNAVVGTALIKKYPKLESEFVYGDYKVYDVRKMIAKSEQEIGKATAKYFFYSNIMNFFKTEITLANGEIRKRPLIETNGETGEIVWDKGRDFATVRKVLSMPQVNIVKKTEVQTGGFSKESILPKRNSDKLIARKKDWDPKKYGGFDSPTVAYSVLVVAKVEKGKSKKLKSVKELLGITIMERSSFEKNPIDFLEAKGYKEVKKDLIIKLPKYSLFELENGRKRMLASAGELQKGNELALPSKYVNFLYLASHYEKLKGSPEDNEQKQLFVEQHKHYLDEIIEQISEFSKRVILADANLDKVLSAYNKHRDKPIREQAENIIHLFTLTNLGAPAAFKYFDTTIDRKRYTSTKEVLDATLIHQSITGLYETRIDLSQLGGDGGGSSPAPGGSGGTLQLEEEYRLFEPESTQKQEMDIWLKNFPQAWAETGGMGTAHCQAPVLIQLKATATPISIRQYPMPHEAYQGIKPHIRRMLDQGILKPCQSPWNTPLLPVKKPGTEDYRPVQDLREVNKRVEDIHPTVPNPYNLLSTLPPSHPWYTVLDLKDAFFCLRLHSESQLLFAFEWRDPEIGLSGQLTWTRLPQGFKNSPTLFNEALHSDLADFRVRYPALVLLQYVDDLLLAAATRTECLEGTKALLETLGNKGYRASAKKAQICLQEVTYLGYSLKDGQRWLTKARKEAILSIPVPKNSRQVREFLGKAGYCRLFIPGFAELAAPLYPLTRPGTLFQWGTEQQLAFEDIKKALLSSPALGLPDITKPFELFIDENSGFAKGVLVQKLGPWKRPVAYLSKKLDTVASGWPPCLRMVAAIAILVKDAGKLTLGQPLTILTSHPVEALVRQPPNKWLSNARMTHYQAMLLDAERVHFGPTVSLNPATLLPLPSGGNHHDCLQILAETHGTRPDLTDQPLPDADLTWYTDGSSFIRNGEREAGAAVTTESEVIWAAPLPPGTSAQRAELIALTQALKMAEGKKLTVYTDSRYAFATTHVHGEIYRRRGWLTSEGKEIKNKNEILALLEALFLPKRLSIIHCPGHQKGDSPQAKGNRLADDTAKKAATETHSSLTVLPAGKRTADGSEFEKRTADGSEFESPKKKAKVE

SEQ ID NO: 7154 - protein, 2125 aa, synthetic construct; identical to SEQ ID NO: 4526

SEQ ID NO: 7155 - protein, 2216 aa, synthetic construct
MPAAKRVKLDGGDKKYSIGLDIGTNSVGWAVITDEYKVPSKKFKVLGNTDRHSIKKNLIGALLFDSGETAEATRLKRTARRRYTRRKNRICYLQEIFSNEMAKVDDSFFHRLEESFLVEEDKKHERHPIFGNIVDEVAYHEKYPTIYHLRKKLVDSTDKADLRLIYLALAHMIKFRGHFLIEGDLNPDNSDVDKLFIQLVQTYNQLFEENPINASGVDAKAILSARLSKSRRLENLIAQLPGEKKNGLFGNLIALSLGLTPNFKSNFDLAEDAKLQLSKDTYDDDLDNLLAQIGDQYADLFLAAKNLSDAILLSDILRVNTEITKAPLSASMIKRYDEHHQDLTLLKALVRQQLPEKYKEIFFDQSKNGYAGYIDGGASQEEFYKFIKPILEKMDGTEELLVKLNREDLLRKQRTFDNGSIPHQIHLGELHAILRRQEDFYPFLKDNREKIEKILTFRIPYYVGPLARGNSRFAWMTRKSEETITPWNFEEVVDKGASAQSFIERMTNFDKNLPNEKVLPKHSLLYEYFTVYNELTKVKYVTEGMRKPAFLSGEQKKAIVDLLFKTNRKVTVKQLKEDYFKKIECFDSVEISGVEDRFNASLGTYHDLLKIIKDKDFLDNEENEDILEDIVLTLTLFEDREMIEERLKTYAHLFDDKVMKQLKRRRYTGWGRLSRKLINGIRDKQSGKTILDFLKSDGFANRNFMQLIHDDSLTFKEDIQKAQVSGQGDSLHEHIANLAGSPAIKKGILQTVKVVDELVKVMGRHKPENIVIEMARENQTTQKGQKNSRERMKRIEEGIKELGSQILKEHPVENTQLQNEKLYLYYLQNGRDMYVDQELDINRLSDYDVDHIVPQSFLKDDSIDNKVLTRSDKARGKSDNVPSEEVVKKMKNYWRQLLNAKLITQRKFDNLTKAERGGLSELDKAGFIKRQLVETRQITKHVAQILDSRMNTKYDENDKLIREVKVITLKSKLVSDFRKDFQFYKVREINNYHHAHDAYLNAVVGTALIKKYPKLESEFVYGDYKVYDVRKMIAKSEQEIGKATAKYFFYSNIMNFFKTEITLANGEIRKRPLIETNGETGEIVWDKGRDFATVRKVLSMPQVNIVKKTEVQTGGFSKESILPKRNSDKLIARKKDWDPKKYGGFDSPTVAYSVLVVAKVEKGKSKKLKSVKELLGITIMERSSFEKNPIDFLEAKGYKEVKKDLIIKLPKYSLFELENGRKRMLASAGELQKGNELALPSKYVNFLYLASHYEKLKGSPEDNEQKQLFVEQHKHYLDEIIEQISEFSKRVILADANLDKVLSAYNKHRDKPIREQAENIIHLFTLTNLGAPAAFKYFDTTIDRKRYTSTKEVLDATLIHQSITGLYETRIDLSQLGGDGGGSSPAPGGSGGTLGDQGSRGSDPLPEPRVTLTVEGIPTEFLVNTGAEHSVLTKPMGKMGSKRTVVAGATGSKVYPWTTKRLLKIGQKQVTHSFLVIPECPAPLLGRDLLTKLKAQIQFSTEGPQVTWEDRPAMCLVLNLEEEYRLHEKPVPPSIDPSWLQLFPMVWAEKAGMGLANQVPPVVVELKSDASPVAVRQYPMSKEAREGIRPHIQRFLDLGILVPCQSPWNTPLLPVKKPGTNDYRPVQDLREVNKRVQDIHPTVPNPYNLLSSLPPSHTWYSVLDLKDAFFCLKLHPNSQPLFAFEWRDPEKGNTGQLTWTRLPQGFKNSPTLFNEALHRDLASFRALNPQVVMLQYVDDLLVAAPTYRDCKEGTRRLLQELSKLGYRVSAKKAQLCREEVTYLGYLLKGGKRWLTPARKATVMKIPTPTTPRQVREFLGTAGFCRLWIPGFASLAAPLYPLTRPKVPFTWTEAHQEAFGRIKEALLSAPALALPDLTKPFALYVDEKEGVARGVLTQTLGPWRRPVAYLSKKLDPVASGWPTCLKAIAAVALLLKDADKLTLGQNVLVIAPHNLESIVRQPPDRWMTNARMTHYQSLLLNERVSFAPPAILNPATLLPVESDDTPIHICSEILAEETGTRPDLRDQPLPGVPAWYTDGSSFIMDGRRQAGAAIVDNKRTVWASNLPEGTSAQKAELIALTQALRLAEGKSINIYTDSRYAFATAHVHGAIYKQRGWLTSAGKDIKNKEEILALLEAIHLPKRVAIIHCPGHQRGTDPVATGNRKADEAAKQAAQSTRILTETTKNAGKRTADGSEFEKRTADGSEFESPKKKAKVE

SEQ ID NO: 7156 - protein, 2094 aa, synthetic construct
MPAAKRVKLDGGDKKYSIGLDIGTNSVGWAVITDEYKVPSKKFKVLGNTDRHSIKKNLIGALLFDSGETAEATRLKRTARRRYTRRKNRICYLQEIFSNEMAKVDDSFFHRLEESFLVEEDKKHERHPIFGNIVDEVAYHEKYPTIYHLRKKLVDSTDKADLRLIYLALAHMIKFRGHFLIEGDLNPDNSDVDKLFIQLVQTYNQLFEENPINASGVDAKAILSARLSKSRRLENLIAQLPGEKKNGLFGNLIALSLGLTPNFKSNFDLAEDAKLQLSKDTYDDDLDNLLAQIGDQYADLFLAAKNLSDAILLSDILRVNTEITKAPLSASMIKRYDEHHQDLTLLKALVRQQLPEKYKEIFFDQSKNGYAGYIDGGASQEEFYKFIKPILEKMDGTEELLVKLNREDLLRKQRTFDNGSIPHQIHLGELHAILRRQEDFYPFLKDNREKIEKILTFRIPYYVGPLARGNSRFAWMTRKSEETITPWNFEEVVDKGASAQSFIERMTNFDKNLPNEKVLPKHSLLYEYFTVYNELTKVKYVTEGMRKPAFLSGEQKKAIVDLLFKTNRKVTVKQLKEDYFKKIECFDSVEISGVEDRFNASLGTYHDLLKIIKDKDFLDNEENEDILEDIVLTLTLFEDREMIEERLKTYAHLFDDKVMKQLKRRRYTGWGRLSRKLINGIRDKQSGKTILDFLKSDGFANRNFMQLIHDDSLTFKEDIQKAQVSGQGDSLHEHIANLAGSPAIKKGILQTVKVVDELVKVMGRHKPENIVIEMARENQTTQKGQKNSRERMKRIEEGIKELGSQILKEHPVENTQLQNEKLYLYYLQNGRDMYVDQELDINRLSDYDVDHIVPQSFLKDDSIDNKVLTRSDKARGKSDNVPSEEVVKKMKNYWRQLLNAKLITQRKFDNLTKAERGGLSELDKAGFIKRQLVETRQITKHVAQILDSRMNTKYDENDKLIREVKVITLKSKLVSDFRKDFQFYKVREINNYHHAHDAYLNAVVGTALIKKYPKLESEFVYGDYKVYDVRKMIAKSEQEIGKATAKYFFYSNIMNFFKTEITLANGEIRKRPLIETNGETGEIVWDKGRDFATVRKVLSMPQVNIVKKTEVQTGGFSKESILPKRNSDKLIARKKDWDPKKYGGFDSPTVAYSVLVVAKVEKGKSKKLKSVKELLGITIMERSSFEKNPIDFLEAKGYKEVKKDLIIKLPKYSLFELENGRKRMLASAGELQKGNELALPSKYVNFLYLASHYEKLKGSPEDNEQKQLFVEQHKHYLDEIIEQISEFSKRVILADANLDKVLSAYNKHRDKPIREQAENIIHLFTLTNLGAPAAFKYFDTTIDRKRYTSTKEVLDATLIHQSITGLYETRIDLSQLGGDGGGSSPAPGGSGGTLNLEDEYRLYETSAEPEVSPGSTWLSDFPQAWAETGGMGLAVRQAPLIIPLKATSTPVSIKQYPMSQEAKLGIKPHIQRLLDQGILVPCQSPWNTPLLPVKKPGTNDYRPVQDLREVNKRVEDIHPTVPNPYNLLSGLPPSHRWYTVLDLKDAFFCLRLHPTSQPLFAFEWRDPGMGISGQLTWTRLPQGFKNSPTLFNEALHRDLADFRIQHPDLILLQYVDDILLAATSELDCQQGTRALLLTLGNLGYRASAKKAQLCQKQVKYLGYLLKEGQRWLTEARKETVMGQPTPKTPRQLREFLGKAGFCRLFIPGFAEMAAPLYPLTKPGTLFNWGPDQQKAYQEIKQALLTAPALGLPDLTKPFELFVDEKQGYAKGVLTQKLGPWRRPVAYLSKKLDPVAAGWPPCLRMVAAIAVLRKDAGKLTMGQPLVILAPHAVEALVKQPPDRWLSNARMTHYQAMLLDTDRVQFGPVVALNPATLLPLPEEGAPHDCLEILAETHGTRPDLTDQPIPDADHTWYTDGSSFLQEGQRKAGAAVTTETEVIWARALPAGTSAQRAELIALTQALKMAEGKRLNVYTDSRYAFATAHIHGEIYRRRGWLTSEGREIKNKSEILALLKALFLPKRLSIIHCLGHQKGDSAEARGNRLADQAAREAAIKTPPDTSTLLAGKRTADGSEFEKRTADGSEFESPKKKAKVE

SEQ ID NO: 7157 - protein, 2094 aa, synthetic construct
MPAAKRVKLDGGDKKYSIGLDIGTNSVGWAVITDEYKVPSKKFKVLGNTDRHSIKKNLIGALLFDSGETAEATRLKRTARRRYTRRKNRICYLQEIFSNEMAKVDDSFFHRLEESFLVEEDKKHERHPIFGNIVDEVAYHEKYPTIYHLRKKLVDSTDKADLRLIYLALAHMIKFRGHFLIEGDLNPDNSDVDKLFIQLVQTYNQLFEENPINASGVDAKAILSARLSKSRRLENLIAQLPGEKKNGLFGNLIALSLGLTPNFKSNFDLAEDAKLQLSKDTYDDDLDNLLAQIGDQYADLFLAAKNLSDAILLSDILRVNTEITKAPLSASMIKRYDEHHQDLTLLKALVRQQLPEKYKEIFFDQSKNGYAGYIDGGASQEEFYKFIKPILEKMDGTEELLVKLNREDLLRKQRTFDNGSIPHQIHLGELHAILRRQEDFYPFLKDNREKIEKILTFRIPYYVGPLARGNSRFAWMTRKSEETITPWNFEEVVDKGASAQSFIERMTNFDKNLPNEKVLPKHSLLYEYFTVYNELTKVKYVTEGMRKPAFLSGEQKKAIVDLLFKTNRKVTVKQLKEDYFKKIECFDSVEISGVEDRFNASLGTYHDLLKIIKDKDFLDNEENEDILEDIVLTLTLFEDREMIEERLKTYAHLFDDKVMKQLKRRRYTGWGRLSRKLINGIRDKQSGKTILDFLKSDGFANRNFMQLIHDDSLTFKEDIQKAQVSGQGDSLHEHIANLAGSPAIKKGILQTVKVVDELVKVMGRHKPENIVIEMARENQTTQKGQKNSRERMKRIEEGIKELGSQILKEHPVENTQLQNEKLYLYYLQNGRDMYVDQELDINRLSDYDVDHIVPQSFLKDDSIDNKVLTRSDKARGKSDNVPSEEVVKKMKNYWRQLLNAKLITQRKFDNLTKAERGGLSELDKAGFIKRQLVETRQITKHVAQILDSRMNTKYDENDKLIREVKVITLKSKLVSDFRKDFQFYKVREINNYHHAHDAYLNAVVGTALIKKYPKLESEFVYGDYKVYDVRKMIAKSEQEIGKATAKYFFYSNIMNFFKTEITLANGEIRKRPLIETNGETGEIVWDKGRDFATVRKVLSMPQVNIVKKTEVQTGGFSKESILPKRNSDKLIARKKDWDPKKYGGFDSPTVAYSVLVVAKVEKGKSKKLKSVKELLGITIMERSSFEKNPIDFLEAKGYKEVKKDLIIKLPKYSLFELENGRKRMLASAGELQKGNELALPSKYVNFLYLASHYEKLKGSPEDNEQKQLFVEQHKHYLDEIIEQISEFSKRVILADANLDKVLSAYNKHRDKPIREQAENIIHLFTLTNLGAPAAFKYFDTTIDRKRYTSTKEVLDATLIHQSITGLYETRIDLSQLGGDGGGSSPAPGGSGGTLNIEDEHRLHETSKEPDVSLGSTWLSDFPQAWAETGGMGLAVRQAPLIIPLKATSTPVSIKQYPMSQEARLGIKPHIQRLLDQGILVPCQSPWNTPLLPVKKPGTNDYRPVQDLREVNKRVEDIHPTVPNPYNLLSGLPPSHQWYTVLDLKDAFFCLRLHPTSQPLFAFEWRDPEMGISGQLTWTRLPQGFKNSPTLFNEALHRDLADFRIQHPDLILLQYVDDLLLAATSELDCQQGTRALLQTLGNLGYRASAKKAQICQKQVKYLGYLLKEGQRWLTEARKETVMGQPTPKTPRQLREFLGTAGFCRLWIPGFAEMAAPLYPLTKPGTLFNWGPDQQKAYQEIKQALLTAPALGLPDLTKPFELFVDEKQGYAKGVLTQKLGPWRRPVAYLSKKLDPVAAGWPPCLRMVAAIAVLTKDAGKLTMGQPLVILAPHAVEALVKQPPDRWLSNARMTHYQALLLDTDRVQFGPVVALNPATLLPLPEEGLQHNCLDILAEAHGTRPDLTDQPLPDADHTWYTDGSSLLQEGQRKAGAAVTTETEVIWAKALPAGTSAQRAELIALTQALKMAEGKKLNVYTDSRYAFATAHIHGEIYRRRGWLTSEGKEIKNKDEILALLKALFLPKRLSIIHCPGHQKGHSAEARGNRMADQAARKAAITETPDTSTLLAGKRTADGSEFEKRTADGSEFESPKKKAKVE

SEQ ID NO: 7158 - protein, 2094 aa, synthetic construct
MPAAKRVKLDGGDKKYSIGLDIGTNSVGWAVITDEYKVPSKKFKVLGNTDRHSIKKNLIGALLFDSGETAEATRLKRTARRRYTRRKNRICYLQEIFSNEMAKVDDSFFHRLEESFLVEEDKKHERHPIFGNIVDEVAYHEKYPTIYHLRKKLVDSTDKADLRLIYLALAHMIKFRGHFLIEGDLNPDNSDVDKLFIQLVQTYNQLFEENPINASGVDAKAILSARLSKSRRLENLIAQLPGEKKNGLFGNLIALSLGLTPNFKSNFDLAEDAKLQLSKDTYDDDLDNLLAQIGDQYADLFLAAKNLSDAILLSDILRVNTEITKAPLSASMIKRYDEHHQDLTLLKALVRQQLPEKYKEIFFDQSKNGYAGYIDGGASQEEFYKFIKPILEKMDGTEELLVKLNREDLLRKQRTFDNGSIPHQIHLGELHAILRRQEDFYPFLKDNREKIEKILTFRIPYYVGPLARGNSRFAWMTRKSEETITPWNFEEVVDKGASAQSFIERMTNFDKNLPNEKVLPKHSLLYEYFTVYNELTKVKYVTEGMRKPAFLSGEQKKAIVDLLFKTNRKVTVKQLKEDYFKKIECFDSVEISGVEDRFNASLGTYHDLLKIIKDKDFLDNEENEDILEDIVLTLTLFEDREMIEERLKTYAHLFDDKVMKQLKRRRYTGWGRLSRKLINGIRDKQSGKTILDFLKSDGFANRNFMQLIHDDSLTFKEDIQKAQVSGQGDSLHEHIANLAGSPAIKKGILQTVKVVDELVKVMGRHKPENIVIEMARENQTTQKGQKNSRERMKRIEEGIKELGSQILKEHPVENTQLQNEKLYLYYLQNGRDMYVDQELDINRLSDYDVDHIVPQSFLKDDSIDNKVLTRSDKARGKSDNVPSEEVVKKMKNYWRQLLNAKLITQRKFDNLTKAERGGLSELDKAGFIKRQLVETRQITKHVAQILDSRMNTKYDENDKLIREVKVITLKSKLVSDFRKDFQFYKVREINNYHHAHDAYLNAVVGTALIKKYPKLESEFVYGDYKVYDVRKMIAKSEQEIGKATAKYFFYSNIMNFFKTEITLANGEIRKRPLIETNGETGEIVWDKGRDFATVRKVLSMPQVNIVKKTEVQTGGFSKESILPKRNSDKLIARKKDWDPKKYGGFDSPTVAYSVLVVAKVEKGKSKKLKSVKELLGITIMERSSFEKNPIDFLEAKGYKEVKKDLIIKLPKYSLFELENGRKRMLASAGELQKGNELALPSKYVNFLYLASHYEKLKGSPEDNEQKQLFVEQHKHYLDEIIEQISEFSKRVILADANLDKVLSAYNKHRDKPIREQAENIIHLFTLTNLGAPAAFKYFDTTIDRKRYTSTKEVLDATLIHQSITGLYETRIDLSQLGGDGGGSSPAPGGSGGTLNIEDEHRLHETSKEPDVSLGSTWLSDFPQAWAETGGMGLAVRQAPLIIPLKATSTPVSIKQYPMSQEARLGIKPHIQRLLDQGILVPCQSPWNTPLLPVKKPGTNDYRPVQDLREVNKRVEDIHPTVPNPYNLLSGLPPSHQWYTVLDLKDAFFCLRLHPTSQPLFAFEWRDPEMGISGQLTWTRLPQGFKNSPTLFNEALHRDLADFRIQHPDLILLQYVDDLLLAATSELDCQQGTRALLQTLGNLGYRASAKKAQICQKQVKYLGYLLKEGQRWLTEARKETVMGQPTPKTPRQLREFLGKAGFCRLFIPGFAEMAAPLYPLTKPGTLFNWGPDQQKAYQEIKQALLTAPALGLPDLTKPFELFVDEKQGYAKGVLTQKLGPWRRPVAYLSKKLDPVAAGWPPCLRMVAAIAVLTKDAGKLTMGQPLVILAPHAVEALVKQPPDRWLSNARMTHYQALLLDTDRVQFGPVVALNPATLLPLPEEGLQHNCLDILAEAHGTRPDLTDQPLPDADHTWYTDGSSLLQEGQRKAGAAVTTETEVIWAKALPAGTSAQRAELIALTQALKMAEGKKLNVYTDSRYAFATAHIHGEIYRRRGWLTSEGKEIKNKDEILALLKALFLPKRLSIIHCPGHQKGHSAEARGNRMADQAARKAAITETPDTSTLLAGKRTADGSEFEKRTADGSEFESPKKKAKVE

SEQ ID NO: 7159 - protein, 2094 aa, synthetic construct; identical to SEQ ID NO: 7157

SEQ ID NO: 7160 - protein, 2094 aa, synthetic construct; identical to SEQ ID NO: 7158

SEQ ID NO: 7161 - protein, 2085 aa, synthetic construct
MPAAKRVKLDGGDKKYSIGLDIGTNSVGWAVITDEYKVPSKKFKVLGNTDRHSIKKNLIGALLFDSGETAEATRLKRTARRRYTRRKNRICYLQEIFSNEMAKVDDSFFHRLEESFLVEEDKKHERHPIFGNIVDEVAYHEKYPTIYHLRKKLVDSTDKADLRLIYLALAHMIKFRGHFLIEGDLNPDNSDVDKLFIQLVQTYNQLFEENPINASGVDAKAILSARLSKSRRLENLIAQLPGEKKNGLFGNLIALSLGLTPNFKSNFDLAEDAKLQLSKDTYDDDLDNLLAQIGDQYADLFLAAKNLSDAILLSDILRVNTEITKAPLSASMIKRYDEHHQDLTLLKALVRQQLPEKYKEIFFDQSKNGYAGYIDGGASQEEFYKFIKPILEKMDGTEELLVKLNREDLLRKQRTFDNGSIPHQIHLGELHAILRRQEDFYPFLKDNREKIEKILTFRIPYYVGPLARGNSRFAWMTRKSEETITPWNFEEVVDKGASAQSFIERMTNFDKNLPNEKVLPKHSLLYEYFTVYNELTKVKYVTEGMRKPAFLSGEQKKAIVDLLFKTNRKVTVKQLKEDYFKKIECFDSVEISGVEDRFNASLGTYHDLLKIIKDKDFLDNEENEDILEDIVLTLTLFEDREMIEERLKTYAHLFDDKVMKQLKRRRYTGWGRLSRKLINGIRDKQSGKTILDFLKSDGFANRNFMQLIHDDSLTFKEDIQKAQVSGQGDSLHEHIANLAGSPAIKKGILQTVKVVDELVKVMGRHKPENIVIEMARENQTTQKGQKNSRERMKRIEEGIKELGSQILKEHPVENTQLQNEKLYLYYLQNGRDMYVDQELDINRLSDYDVDHIVPQSFLKDDSIDNKVLTRSDKARGKSDNVPSEEVVKKMKNYWRQLLNAKLITQRKFDNLTKAERGGLSELDKAGFIKRQLVETRQITKHVAQILDSRMNTKYDENDKLIREVKVITLKSKLVSDFRKDFQFYKVREINNYHHAHDAYLNAVVGTALIKKYPKLESEFVYGDYKVYDVRKMIAKSEQEIGKATAKYFFYSNIMNFFKTEITLANGEIRKRPLIETNGETGEIVWDKGRDFATVRKVLSMPQVNIVKKTEVQTGGFSKESILPKRNSDKLIARKKDWDPKKYGGFDSPTVAYSVLVVAKVEKGKSKKLKSVKELLGITIMERSSFEKNPIDFLEAKGYKEVKKDLIIKLPKYSLFELENGRKRMLASAGELQKGNELALPSKYVNFLYLASHYEKLKGSPEDNEQKQLFVEQHKHYLDEIIEQISEFSKRVILADANLDKVLSAYNKHRDKPIREQAENIIHLFTLTNLGAPAAFKYFDTTIDRKRYTSTKEVLDATLIHQSITGLYETRIDLSQLGGDGGGSSPAPGGSGGIPWLMKKPLQLTTLVPLQEYEERLLKQTMLTGSYKEKLQSLFLKYDALWQHWENQVGHRRIKPHHIATGTVNPRPQKQYPINPKAKASIQTVINDLLKQGVLIQQNSIMNTPVYPVPKPDGKWRMVLDYREVNKTIPLIAAQNQHSAGILSSIFRGKYKTTLDLSNGFWAHSITPESYWLTAFTWLGQQYCWTRLPQGFLNSPALFNADVVDLLKEVPNVQVYVDDIYISHDDPREHLEQLEKVFSLLLNAGYVVSLKKSEIAQHEVEFLGFNITKEGRGLTETFKQKLLNITPPRDLKQLQSILGKLNFARNFIPNFSELVKPLYNIIATAPGKYITWTTDNSQQLQNIISMLNSAENLEERNPEVRLIMKVNTSPSAGYIRFYNEFAKRPIMYLNYVYTKAEVKFTNTEKLLTTIHKGLIKALDLGMGQEILVYSPIVSMTKIQKTPLPERKALPIRWITWMSYLEDPRIQFHYDKTLPELQQVPTVTDDIIAKIKHPSEFSMVFYTDGSAIKHPNVNKSHNAGMGIAQVQFKPEFTVINTWSIPLGDHTAQLAEVAAVEFACKKALKIDGPVLIVTDSFYVAESVNKELPYWQSNGFFNNKKKPLKHVSKWKSIADCIQLKPDIIIIHEKGHQPTASTFHTEGNNLADKLATQGSYVVNAGKRTADGSEFEKRTADGSEFESPKKKAKVE

SEQ ID NO: 7162 - protein, 2092 aa, synthetic construct
MPAAKRVKLDGGDKKYSIGLDIGTNSVGWAVITDEYKVPSKKFKVLGNTDRHSIKKNLIGALLFDSGETAEATRLKRTARRRYTRRKNRICYLQEIFSNEMAKVDDSFFHRLEESFLVEEDKKHERHPIFGNIVDEVAYHEKYPTIYHLRKKLVDSTDKADLRLIYLALAHMIKFRGHFLIEGDLNPDNSDVDKLFIQLVQTYNQLFEENPINASGVDAKAILSARLSKSRRLENLIAQLPGEKKNGLFGNLIALSLGLTPNFKSNFDLAEDAKLQLSKDTYDDDLDNLLAQIGDQYADLFLAAKNLSDAILLSDILRVNTEITKAPLSASMIKRYDEHHQDLTLLKALVRQQLPEKYKEIFFDQSKNGYAGYIDGGASQEEFYKFIKPILEKMDGTEELLVKLNREDLLRKQRTFDNGSIPHQIHLGELHAILRRQEDFYPFLKDNREKIEKILTFRIPYYVGPLARGNSRFAWMTRKSEETITPWNFEEVVDKGASAQSFIERMTNFDKNLPNEKVLPKHSLLYEYFTVYNELTKVKYVTEGMRKPAFLSGEQKKAIVDLLFKTNRKVTVKQLKEDYFKKIECFDSVEISGVEDRFNASLGTYHDLLKIIKDKDFLDNEENEDILEDIVLTLTLFEDREMIEERLKTYAHLFDDKVMKQLKRRRYTGWGRLSRKLINGIRDKQSGKTILDFLKSDGFANRNFMQLIHDDSLTFKEDIQKAQVSGQGDSLHEHIANLAGSPAIKKGILQTVKVVDELVKVMGRHKPENIVIEMARENQTTQKGQKNSRERMKRIEEGIKELGSQILKEHPVENTQLQNEKLYLYYLQNGRDMYVDQELDINRLSDYDVDHIVPQSFLKDDSIDNKVLTRSDKARGKSDNVPSEEVVKKMKNYWRQLLNAKLITQRKFDNLTKAERGGLSELDKAGFIKRQLVETRQITKHVAQILDSRMNTKYDENDKLIREVKVITLKSKLVSDFRKDFQFYKVREINNYHHAHDAYLNAVVGTALIKKYPKLESEFVYGDYKVYDVRKMIAKSEQEIGKATAKYFFYSNIMNFFKTEITLANGEIRKRPLIETNGETGEIVWDKGRDFATVRKVLSMPQVNIVKKTEVQTGGFSKESILPKRNSDKLIARKKDWDPKKYGGFDSPTVAYSVLVVAKVEKGKSKKLKSVKELLGITIMERSSFEKNPIDFLEAKGYKEVKKDLIIKLPKYSLFELENGRKRMLASAGELQKGNELALPSKYVNFLYLASHYEKLKGSPEDNEQKQLFVEQHKHYLDEIIEQISEFSKRVILADANLDKVLSAYNKHRDKPIREQAENIIHLFTLTNLGAPAAFKYFDTTIDRKRYTSTKEVLDATLIHQSITGLYETRIDLSQLGGDGGGSSPAPGGSGGVLNLEEEYRLHEKPVPSSIDPSWLQLFPTVWAERAGMGLANQVPPVVVELRSGASPVAVRQYPMSKEAREGIRPHIQRFLDLGVLVPCQSPWNTPLLPVKKPGTNDYRPVQDLREINKRVQDIHPTVPNPYNLLSSLPPSHTWYSVLDLKDAFFCLKLHPNSQPLFAFEWRDPEKGNTGQLTWTRLPQGFKNSPTLFNEALHRDLAPFRALNPQVVLLQYVDDLLVAAPTYRDCKEGTQKLLQELSKLGYRVSAKKAQLCQKEVTYLGYLLKEGKRWLTPARKATVMKIPPPTTPRQVREFLGKAGFCRLFIPGFASLAAPLYPLTKPSIPFIWTEEHQKAFDRIKEALLSAPALALPDLTKPFTLYVDERAGVARGVLTQTLGPWRRPVAYLSKKLDPVASGWPTCLKAVAAVALLLKDADKLTLGQNVTVIASHSLESIVRQPPDRWMTNARMTHYQSLLLNERVSFAPPAVLNPATLLPVESEATPVHRCSEILAEETGTRRDLKDQPLPGVPAWYTDGSSFIAEGKRRAGAAIVDGKRTVWASSLPEGTSAQKAELVALTQALRLAEGKDINIYTDSRYAFATAHIHGAIYKQRGWLTSAGKDIKNKEEILALLEAIHLPKRVAIIHCPGHQKGNDPVATGNRRADEAAKQAALSTRVLAETTKPAGKRTADGSEFEKRTADGSEFESPKKKAKVE

SEQ ID NO: 7163 - protein, 2096 aa, synthetic construct
MPAAKRVKLDGGDKKYSIGLDIGTNSVGWAVITDEYKVPSKKFKVLGNTDRHSIKKNLIGALLFDSGETAEATRLKRTARRRYTRRKNRICYLQEIFSNEMAKVDDSFFHRLEESFLVEEDKKHERHPIFGNIVDEVAYHEKYPTIYHLRKKLVDSTDKADLRLIYLALAHMIKFRGHFLIEGDLNPDNSDVDKLFIQLVQTYNQLFEENPINASGVDAKAILSARLSKSRRLENLIAQLPGEKKNGLFGNLIALSLGLTPNFKSNFDLAEDAKLQLSKDTYDDDLDNLLAQIGDQYADLFLAAKNLSDAILLSDILRVNTEITKAPLSASMIKRYDEHHQDLTLLKALVRQQLPEKYKEIFFDQSKNGYAGYIDGGASQEEFYKFIKPILEKMDGTEELLVKLNREDLLRKQRTFDNGSIPHQIHLGELHAILRRQEDFYPFLKDNREKIEKILTFRIPYYVGPLARGNSRFAWMTRKSEETITPWNFEEVVDKGASAQSFIERMTNFDKNLPNEKVLPKHSLLYEYFTVYNELTKVKYVTEGMRKPAFLSGEQKKAIVDLLFKTNRKVTVKQLKEDYFKKIECFDSVEISGVEDRFNASLGTYHDLLKIIKDKDFLDNEENEDILEDIVLTLTLFEDREMIEERLKTYAHLFDDKVMKQLKRRRYTGWGRLSRKLINGIRDKQSGKTILDFLKSDGFANRNFMQLIHDDSLTFKEDIQKAQVSGQGDSLHEHIANLAGSPAIKKGILQTVKVVDELVKVMGRHKPENIVIEMARENQTTQKGQKNSRERMKRIEEGIKELGSQILKEHPVENTQLQNEKLYLYYLQNGRDMYVDQELDINRLSDYDVDHIVPQSFLKDDSIDNKVLTRSDKARGKSDNVPSEEVVKKMKNYWRQLLNAKLITQRKFDNLTKAERGGLSELDKAGFIKRQLVETRQITKHVAQILDSRMNTKYDENDKLIREVKVITLKSKLVSDFRKDFQFYKVREINNYHHAHDAYLNAVVGTALIKKYPKLESEFVYGDYKVYDVRKMIAKSEQEIGKATAKYFFYSNIMNFFKTEITLANGEIRKRPLIETNGETGEIVWDKGRDFATVRKVLSMPQVNIVKKTEVQTGGFSKESILPKRNSDKLIARKKDWDPKKYGGFDSPTVAYSVLVVAKVEKGKSKKLKSVKELLGITIMERSSFEKNPIDFLEAKGYKEVKKDLIIKLPKYSLFELENGRKRMLASAGELQKGNELALPSKYVNFLYLASHYEKLKGSPEDNEQKQLFVEQHKHYLDEIIEQISEFSKRVILADANLDKVLSAYNKHRDKPIREQAENIIHLFTLTNLGAPAAFKYFDTTIDRKRYTSTKEVLDATLIHQSITGLYETRIDLSQLGGDGGPAPGGSGSSGGTAPLEEEYRLFLEAPIQNVTLLEQWKREIPKVWAEINPPGLASTQAPIHVQLLSTALPVRVRQYPITLEAKRSLRETIRKFRAAGILRPVHSPWNTPLLPVRKSGTSEYRMVQDLREVNKRVETIHPTVPNPYTLLSLLPPDRIWYSVLDLKDAFFCIPLAPESQLIFAFEWADAEEGESGQLTWTRLPQGFKNSPTLFNEALNRDLQGFRLDHPSVSLLQYVDDLLIAADTQAACLSATRDLLMTLAELGYRVSGKKAQLCQEEVTYLGFKIHKGSRSLSNSRTQAILQIPVPKTKRQVREFLGTIGYCRLWIPGFAELAQPLYAATRPGNDPLVWGEKEEEAFQSLKLALTQPPALALPSLDKPFQLFVEETSGAAKGVLTQALGPWKRPVAYLSKRLDPVAAGWPRCLRAIAAAALLTREASKLTFGQDIEITSSHNLESLLRSPPDKWLTNARITQYQVLLLDPPRVRFKQTAALNPATLLPETDDTLPIHHCLDTLDSLTSTRPDLTDQPLAQAEATLFTDGSSYIRDGKRYAGAAVVTLDSVIWAEPLPIGTSAQKAELIALTKALEWSKDKSVNIYTDSRYAFATLHVHGMIYRERGWLTAGGKAIKNAPEILALLTAVWLPKRVAVMHCKGHQKDDAPTSTGNRRADEVAREVAIRPLSTQATISAGKRTADGSEFEKRTADGSEFESPKKKAKVE

SEQ ID NO: 7164 - protein, 2093 aa, synthetic construct
MPAAKRVKLDGGDKKYSIGLDIGTNSVGWAVITDEYKVPSKKFKVLGNTDRHSIKKNLIGALLFDSGETAEATRLKRTARRRYTRRKNRICYLQEIFSNEMAKVDDSFFHRLEESFLVEEDKKHERHPIFGNIVDEVAYHEKYPTIYHLRKKLVDSTDKADLRLIYLALAHMIKFRGHFLIEGDLNPDNSDVDKLFIQLVQTYNQLFEENPINASGVDAKAILSARLSKSRRLENLIAQLPGEKKNGLFGNLIALSLGLTPNFKSNFDLAEDAKLQLSKDTYDDDLDNLLAQIGDQYADLFLAAKNLSDAILLSDILRVNTEITKAPLSASMIKRYDEHHQDLTLLKALVRQQLPEKYKEIFFDQSKNGYAGYIDGGASQEEFYKFIKPILEKMDGTEELLVKLNREDLLRKQRTFDNGSIPHQIHLGELHAILRRQEDFYPFLKDNREKIEKILTFRIPYYVGPLARGNSRFAWMTRKSEETITPWNFEEVVDKGASAQSFIERMTNFDKNLPNEKVLPKHSLLYEYFTVYNELTKVKYVTEGMRKPAFLSGEQKKAIVDLLFKTNRKVTVKQLKEDYFKKIECFDSVEISGVEDRFNASLGTYHDLLKIIKDKDFLDNEENEDILEDIVLTLTLFEDREMIEERLKTYAHLFDDKVMKQLKRRRYTGWGRLSRKLINGIRDKQSGKTILDFLKSDGFANRNFMQLIHDDSLTFKEDIQKAQVSGQGDSLHEHIANLAGSPAIKKGILQTVKVVDELVKVMGRHKPENIVIEMARENQTTQKGQKNSRERMKRIEEGIKELGSQILKEHPVENTQLQNEKLYLYYLQNGRDMYVDQELDINRLSDYDVDHIVPQSFLKDDSIDNKVLTRSDKARGKSDNVPSEEVVKKMKNYWRQLLNAKLITQRKFDNLTKAERGGLSELDKAGFIKRQLVETRQITKHVAQILDSRMNTKYDENDKLIREVKVITLKSKLVSDFRKDFQFYKVREINNYHHAHDAYLNAVVGTALIKKYPKLESEFVYGDYKVYDVRKMIAKSEQEIGKATAKYFFYSNIMNFFKTEITLANGEIRKRPLIETNGETGEIVWDKGRDFATVRKVLSMPQVNIVKKTEVQTGGFSKESILPKRNSDKLIARKKDWDPKKYGGFDSPTVAYSVLVVAKVEKGKSKKLKSVKELLGITIMERSSFEKNPIDFLEAKGYKEVKKDLIIKLPKYSLFELENGRKRMLASAGELQKGNELALPSKYVNFLYLASHYEKLKGSPEDNEQKQLFVEQHKHYLDEIIEQISEFSKRVILADANLDKVLSAYNKHRDKPIREQAENIIHLFTLTNLGAPAAFKYFDTTIDRKRYTSTKEVLDATLIHQSITGLYETRIDLSQLGGDGGPAPGGSGSSGGTLQLEEEYRLFEPESTQKQEMDIWLKNFPQAWAETGGMGTAHCQAPVLIQLKATATPISIRQYPMPHEAYQGIKPHIRRMLDQGILKPCQSPWNTPLLPVKKPGTEDYRPVQDLREVNKRVEDIHPTVPNPYNLLSTLPPSHPWYTVLDLKDAFFCLRLHSESQLLFAFEWRDPEIGLSGQLTWTRLPQGFKNSPTLFNEALHSDLADFRVRYPALVLLQYVDDLLLAAATRTECLEGTKALLETLGNKGYRASAKKAQICLQEVTYLGYSLKDGQRWLTKARKEAILSIPVPKNSRQVREFLGKAGYCRLFIPGFAELAAPLYPLTRPGTLFQWGTEQQLAFEDIKKALLSSPALGLPDITKPFELFIDENSGFAKGVLVQKLGPWKRPVAYLSKKLDTVASGWPPCLRMVAAIAILVKDAGKLTLGQPLTILTSHPVEALVRQPPNKWLSNARMTHYQAMLLDAERVHFGPTVSLNPATLLPLPSGGNHHDCLQILAETHGTRPDLTDQPLPDADLTWYTDGSSFIRNGEREAGAAVTTESEVIWAAPLPPGTSAQRAELIALTQALKMAEGKKLTVYTDSRYAFATTHVHGEIYRRRGWLTSEGKEIKNKNEILALLEALFLPKRLSIIHCPGHQKGDSPQAKGNRLADDTAKKAATETHSSLTVLPAGKRTADGSEFEKRTADGSEFESPKKKAKVE

SEQ ID NO: 7165 - protein, 2174 aa, synthetic construct
MPAAKRVKLDGGDKKYSIGLDIGTNSVGWAVITDEYKVPSKKFKVLGNTDRHSIKKNLIGALLFDSGETAEATRLKRTARRRYTRRKNRICYLQEIFSNEMAKVDDSFFHRLEESFLVEEDKKHERHPIFGNIVDEVAYHEKYPTIYHLRKKLVDSTDKADLRLIYLALAHMIKFRGHFLIEGDLNPDNSDVDKLFIQLVQTYNQLFEENPINASGVDAKAILSARLSKSRRLENLIAQLPGEKKNGLFGNLIALSLGLTPNFKSNFDLAEDAKLQLSKDTYDDDLDNLLAQIGDQYADLFLAAKNLSDAILLSDILRVNTEITKAPLSASMIKRYDEHHQDLTLLKALVRQQLPEKYKEIFFDQSKNGYAGYIDGGASQEEFYKFIKPILEKMDGTEELLVKLNREDLLRKQRTFDNGSIPHQIHLGELHAILRRQEDFYPFLKDNREKIEKILTFRIPYYVGPLARGNSRFAWMTRKSEETITPWNFEEVVDKGASAQSFIERMTNFDKNLPNEKVLPKHSLLYEYFTVYNELTKVKYVTEGMRKPAFLSGEQKKAIVDLLFKTNRKVTVKQLKEDYFKKIECFDSVEISGVEDRFNASLGTYHDLLKIIKDKDFLDNEENEDILEDIVLTLTLFEDREMIEERLKTYAHLFDDKVMKQLKRRRYTGWGRLSRKLINGIRDKQSGKTILDFLKSDGFANRNFMQLIHDDSLTFKEDIQKAQVSGQGDSLHEHIANLAGSPAIKKGILQTVKVVDELVKVMGRHKPENIVIEMARENQTTQKGQKNSRERMKRIEEGIKELGSQILKEHPVENTQLQNEKLYLYYLQNGRDMYVDQELDINRLSDYDVDHIVPQSFLKDDSIDNKVLTRSDKARGKSDNVPSEEVVKKMKNYWRQLLNAKLITQRKFDNLTKAERGGLSELDKAGFIKRQLVETRQITKHVAQILDSRMNTKYDENDKLIREVKVITLKSKLVSDFRKDFQFYKVREINNYHHAHDAYLNAVVGTALIKKYPKLESEFVYGDYKVYDVRKMIAKSEQEIGKATAKYFFYSNIMNFFKTEITLANGEIRKRPLIETNGETGEIVWDKGRDFATVRKVLSMPQVNIVKKTEVQTGGFSKESILPKRNSDKLIARKKDWDPKKYGGFDSPTVAYSVLVVAKVEKGKSKKLKSVKELLGITIMERSSFEKNPIDFLEAKGYKEVKKDLIIKLPKYSLFELENGRKRMLASAGELQKGNELALPSKYVNFLYLASHYEKLKGSPEDNEQKQLFVEQHKHYLDEIIEQISEFSKRVILADANLDKVLSAYNKHRDKPIREQAENIIHLFTLTNLGAPAAFKYFDTTIDRKRYTSTKEVLDATLIHQSITGLYETRIDLSQLGGDGGPAPGGSGSSGGMNPLQLLQPLPAEIKGTKLLAHWNSGATITCIPESFLEDEQPIKKTLIKTIHGEKQQNVYYVTFKVKGRKVEAEVIASPYEYILLSPTDVPWLTQQPLQLTILVPLQEYQEKILSKTALPEDQKQQLKTLFVKYDNLWQHWENQVGHRKIRPHNIATGDYPPRPQKQYPINPKAKPSIQIVIDDLLKQGVLTPQNSTMNTPVYPVPKPDGRWRMVLDYREVNKTIPLTAAQNQHSAGILATIVRQKYKTTLDLANGFWAHPITPESYWLTAFTWQGKQYCWTRLPQGFLNSPALFTADVVDLLKEIPNVQVYVDDIYLSHDDPKEHVQQLEKVFQILLQAGYVVSLKKSEIGQKTVEFLGFNITKEGRGLTDTFKTKLLNITPPKDLKQLQSILGLLNFARNFIPNFAELVQPLYNLIASAKGKYIEWSEENTKQLNMVIEALNTASNLEERLPEQRLVIKVNTSPSAGYVRYYNETGKKPIMYLNYVFSKAELKFSMLEKLLTTMHKALIKAMDLAMGQEILVYSPIVSMTKIQKTPLPERKALPIRWITWMTYLEDPRIQFHYDKTLPELKHIPDVYTSSQSPVKHPSQYEGVFYTDGSAIKSPDPTKSNNAGMGIVHATYKPEYQVLNQWSIPLGNHTAQMAEIAAVEFACKKALKIPGPVLVITDSFYVAESANKELPYWKSNGFVNNKKKPLKHISKWKSIAECLSMKPDITIQHEKGISLQIPVFILKGNALADKLATQGSYVVNAGKRTADGSEFEKRTADGSEFESPKKKAKVE

SEQ ID NO: 7166 - protein, 2085 aa, synthetic construct
MPAAKRVKLDGGDKKYSIGLDIGTNSVGWAVITDEYKVPSKKFKVLGNTDRHSIKKNLIGALLFDSGETAEATRLKRTARRRYTRRKNRICYLQEIFSNEMAKVDDSFFHRLEESFLVEEDKKHERHPIFGNIVDEVAYHEKYPTIYHLRKKLVDSTDKADLRLIYLALAHMIKFRGHFLIEGDLNPDNSDVDKLFIQLVQTYNQLFEENPINASGVDAKAILSARLSKSRRLENLIAQLPGEKKNGLFGNLIALSLGLTPNFKSNFDLAEDAKLQLSKDTYDDDLDNLLAQIGDQYADLFLAAKNLSDAILLSDILRVNTEITKAPLSASMIKRYDEHHQDLTLLKALVRQQLPEKYKEIFFDQSKNGYAGYIDGGASQEEFYKFIKPILEKMDGTEELLVKLNREDLLRKQRTFDNGSIPHQIHLGELHAILRRQEDFYPFLKDNREKIEKILTFRIPYYVGPLARGNSRFAWMTRKSEETITPWNFEEVVDKGASAQSFIERMTNFDKNLPNEKVLPKHSLLYEYFTVYNELTKVKYVTEGMRKPAFLSGEQKKAIVDLLFKTNRKVTVKQLKEDYFKKIECFDSVEISGVEDRFNASLGTYHDLLKIIKDKDFLDNEENEDILEDIVLTLTLFEDREMIEERLKTYAHLFDDKVMKQLKRRRYTGWGRLSRKLINGIRDKQSGKTILDFLKSDGFANRNFMQLIHDDSLTFKEDIQKAQVSGQGDSLHEHIANLAGSPAIKKGILQTVKVVDELVKVMGRHKPENIVIEMARENQTTQKGQKNSRERMKRIEEGIKELGSQILKEHPVENTQLQNEKLYLYYLQNGRDMYVDQELDINRLSDYDVDHIVPQSFLKDDSIDNKVLTRSDKARGKSDNVPSEEVVKKMKNYWRQLLNAKLITQRKFDNLTKAERGGLSELDKAGFIKRQLVETRQITKHVAQILDSRMNTKYDENDKLIREVKVITLKSKLVSDFRKDFQFYKVREINNYHHAHDAYLNAVVGTALIKKYPKLESEFVYGDYKVYDVRKMIAKSEQEIGKATAKYFFYSNIMNFFKTEITLANGEIRKRPLIETNGETGEIVWDKGRDFATVRKVLSMPQVNIVKKTEVQTGGFSKESILPKRNSDKLIARKKDWDPKKYGGFDSPTVAYSVLVVAKVEKGKSKKLKSVKELLGITIMERSSFEKNPIDFLEAKGYKEVKKDLIIKLPKYSLFELENGRKRMLASAGELQKGNELALPSKYVNFLYLASHYEKLKGSPEDNEQKQLFVEQHKHYLDEIIEQISEFSKRVILADANLDKVLSAYNKHRDKPIREQAENIIHLFTLTNLGAPAAFKYFDTTIDRKRYTSTKEVLDATLIHQSITGLYETRIDLSQLGGDGGPAPGGSGSSGGVPWLTQQPLQLTILVPLQEYQEKILSKTALPEDQKQQLKTLFVKYDNLWQHWENQVGHRKIRPHNIATGDYPPRPQKQYPINPKAKPSIQIVIDDLLKQGVLTPQNSTMNTPVYPVPKPDGRWRMVLDYREVNKTIPLTAAQNQHSAGILATIVRQKYKTTLDLANGFWAHPITPESYWLTAFTWQGKQYCWTRLPQGFLNSPALFNADVVDLLKEIPNVQVYVDDIYLSHDDPKEHVQQLEKVFQILLQAGYVVSLKKSEIGQKTVEFLGFNITKEGRGLTDTFKTKLLNITPPKDLKQLQSILGLLNFARNFIPNFAELVQPLYNLIAPAKGKYIEWSEENTKQLNMVIEALNTASNLEERLPEQRLVIKVNTSPSAGYVRYYNETGKKPIMYLNYVFSKAELKFSMLEKLLTTMHKALIKAMDLAMGQEILVYSPIVSMTKIQKTPLPERKALPIRWITWMTYLEDPRIQFHYDKTLPELKHIPDVYTSSQSPVKHPSQYEGVFYTDGSAIKSPDPTKSNNAGMGIVHATYKPEYQVLNQWSIPLGNHTAQMAEIAAVEFACKKALKIPGPVLVITDSFYVAESANKELPYWKSNGFVNNKKKPLKHISKWKSIAECLSMKPDITIQHEKGISLQIPVFILKGNALADKLATQGSYVVNAGKRTADGSEFEKRTADGSEFESPKKKAKVE

SEQ ID NO: 7167 - protein, 2092 aa, synthetic construct
MPAAKRVKLDGGDKKYSIGLDIGTNSVGWAVITDEYKVPSKKFKVLGNTDRHSIKKNLIGALLFDSGETAEATRLKRTARRRYTRRKNRICYLQEIFSNEMAKVDDSFFHRLEESFLVEEDKKHERHPIFGNIVDEVAYHEKYPTIYHLRKKLVDSTDKADLRLIYLALAHMIKFRGHFLIEGDLNPDNSDVDKLFIQLVQTYNQLFEENPINASGVDAKAILSARLSKSRRLENLIAQLPGEKKNGLFGNLIALSLGLTPNFKSNFDLAEDAKLQLSKDTYDDDLDNLLAQIGDQYADLFLAAKNLSDAILLSDILRVNTEITKAPLSASMIKRYDEHHQDLTLLKALVRQQLPEKYKEIFFDQSKNGYAGYIDGGASQEEFYKFIKPILEKMDGTEELLVKLNREDLLRKQRTFDNGSIPHQIHLGELHAILRRQEDFYPFLKDNREKIEKILTFRIPYYVGPLARGNSRFAWMTRKSEETITPWNFEEVVDKGASAQSFIERMTNFDKNLPNEKVLPKHSLLYEYFTVYNELTKVKYVTEGMRKPAFLSGEQKKAIVDLLFKTNRKVTVKQLKEDYFKKIECFDSVEISGVEDRFNASLGTYHDLLKIIKDKDFLDNEENEDILEDIVLTLTLFEDREMIEERLKTYAHLFDDKVMKQLKRRRYTGWGRLSRKLINGIRDKQSGKTILDFLKSDGFANRNFMQLIHDDSLTFKEDIQKAQVSGQGDSLHEHIANLAGSPAIKKGILQTVKVVDELVKVMGRHKPENIVIEMARENQTTQKGQKNSRERMKRIEEGIKELGSQILKEHPVENTQLQNEKLYLYYLQNGRDMYVDQELDINRLSDYDVDHIVPQSFLKDDSIDNKVLTRSDKARGKSDNVPSEEVVKKMKNYWRQLLNAKLITQRKFDNLTKAERGGLSELDKAGFIKRQLVETRQITKHVAQILDSRMNTKYDENDKLIREVKVITLKSKLVSDFRKDFQFYKVREINNYHHAHDAYLNAVVGTALIKKYPKLESEFVYGDYKVYDVRKMIAKSEQEIGKATAKYFFYSNIMNFFKTEITLANGEIRKRPLIETNGETGEIVWDKGRDFATVRKVLSMPQVNIVKKTEVQTGGFSKESILPKRNSDKLIARKKDWDPKKYGGFDSPTVAYSVLVVAKVEKGKSKKLKSVKELLGITIMERSSFEKNPIDFLEAKGYKEVKKDLIIKLPKYSLFELENGRKRMLASAGELQKGNELALPSKYVNFLYLASHYEKLKGSPEDNEQKQLFVEQHKHYLDEIIEQISEFSKRVILADANLDKVLSAYNKHRDKPIREQAENIIHLFTLTNLGAPAAFKYFDTTIDRKRYTSTKEVLDATLIHQSITGLYETRIDLSQLGGDGGPAPGGSGSSGGVLNLEEEYRLHEKPVPSSIDPSWLQLFPTVWAERAGMGLANQVPPVVVELRSGASPVAVRQYPMSKEAREGIRPHIQKFLDLGVLVPCRSPWNTPLLPVKKPGTNDYRPVQDLREINKRVQDIHPTVPNPYNLLSSLPPSYTWYSVLDLKDAFFCLRLHPNSQPLFAFEWKDPEKGNTGQLTWTRLPQGFKNSPTLFNEALHRDLAPFRALNPQVVLLQYVDDLLVAAPTYEDCKKGTQKLLQELSKLGYRVSAKKAQLCQREVTYLGYLLKEGKRWLTPARKATVMKIPVPTTPRQVREFLGTAGFCRLWIPGFASLAAPLYPLTKPSIPFIWTEEHQQAFDHIKKALLSAPALALPDLTKPFTLYIDERAGVARGVLTQTLGPWRRPVAYLSKKLDPVASGWPTCLKAVAAVALLLKDADKLTLGQNVTVIASHSLESIVRQPPDRWMTNARMTHYQSLLLNERVSFAPPAVLNPATLLPVESEATPVHRCSEILAEETGTRRDLEDQPLPGVPTWYTDGSSFITEGKRRAGAPIVDGKRTVWASSLPEGTSAQKAELVALTQALRLAEGKNINIYTDSRYAFATAHIHGAIYKQRGWLTSAGKDIKNKEEILALLEAIHLPRRVAIIHCPGHQRGSNPVATGNRRADEAAKQAALSTRVLAGTTKPAGKRTADGSEFEKRTADGSEFESPKKKAKVE

SEQ ID NO: 7168 - protein, 2216 aa, synthetic construct
MPAAKRVKLDGGDKKYSIGLDIGTNSVGWAVITDEYKVPSKKFKVLGNTDRHSIKKNLIGALLFDSGETAEATRLKRTARRRYTRRKNRICYLQEIFSNEMAKVDDSFFHRLEESFLVEEDKKHERHPIFGNIVDEVAYHEKYPTIYHLRKKLVDSTDKADLRLIYLALAHMIKFRGHFLIEGDLNPDNSDVDKLFIQLVQTYNQLFEENPINASGVDAKAILSARLSKSRRLENLIAQLPGEKKNGLFGNLIALSLGLTPNFKSNFDLAEDAKLQLSKDTYDDDLDNLLAQIGDQYADLFLAAKNLSDAILLSDILRVNTEITKAPLSASMIKRYDEHHQDLTLLKALVRQQLPEKYKEIFFDQSKNGYAGYIDGGASQEEFYKFIKPILEKMDGTEELLVKLNREDLLRKQRTFDNGSIPHQIHLGELHAILRRQEDFYPFLKDNREKIEKILTFRIPYYVGPLARGNSRFAWMTRKSEETITPWNFEEVVDKGASAQSFIERMTNFDKNLPNEKVLPKHSLLYEYFTVYNELTKVKYVTEGMRKPAFLSGEQKKAIVDLLFKTNRKVTVKQLKEDYFKKIECFDSVEISGVEDRFNASLGTYHDLLKIIKDKDFLDNEENEDILEDIVLTLTLFEDREMIEERLKTYAHLFDDKVMKQLKRRRYTGWGRLSRKLINGIRDKQSGKTILDFLKSDGFANRNFMQLIHDDSLTFKEDIQKAQVSGQGDSLHEHIANLAGSPAIKKGILQTVKVVDELVKVMGRHKPENIVIEMARENQTTQKGQKNSRERMKRIEEGIKELGSQILKEHPVENTQLQNEKLYLYYLQNGRDMYVDQELDINRLSDYDVDHIVPQSFLKDDSIDNKVLTRSDKARGKSDNVPSEEVVKKMKNYWRQLLNAKLITQRKFDNLTKAERGGLSELDKAGFIKRQLVETRQITKHVAQILDSRMNTKYDENDKLIREVKVITLKSKLVSDFRKDFQFYKVREINNYHHAHDAYLNAVVGTALIKKYPKLESEFVYGDYKVYDVRKMIAKSEQEIGKATAKYFFYSNIMNFFKTEITLANGEIRKRPLIETNGETGEIVWDKGRDFATVRKVLSMPQVNIVKKTEVQTGGFSKESILPKRNSDKLIARKKDWDPKKYGGFDSPTVAYSVLVVAKVEKGKSKKLKSVKELLGITIMERSSFEKNPIDFLEAKGYKEVKKDLIIKLPKYSLFELENGRKRMLASAGELQKGNELALPSKYVNFLYLASHYEKLKGSPEDNEQKQLFVEQHKHYLDEIIEQISEFSKRVILADANLDKVLSAYNKHRDKPIREQAENIIHLFTLTNLGAPAAFKYFDTTIDRKRYTSTKEVLDATLIHQSITGLYETRIDLSQLGGDGGPAPGGSGSSGGTLGDQGSRGSDPLPEPRVTLTVEGIPTEFLVNTGAEHSVLTKPMGKMGSKRTVVAGATGSKVYPWTTKRLLKIGQKQVTHSFLVIPECPAPLLGRDLLTKLKAQIQFSTEGPQVTWEDRPAMCLVLNLEEEYRLHEKPVPPSIDPSWLQLFPMVWAEKAGMGLANQVPPVVVELKSDASPVAVRQYPMSKEAREGIRPHIQRFLDLGILVPCQSPWNTPLLPVKKPGTNDYRPVQDLREVNKRVQDIHPTVPNPYNLLSSLPPSHTWYSVLDLKDAFFCLKLHPNSQPLFAFEWRDPEKGNTGQLTWTRLPQGFKNSPTLFDEALHRDLASFRALNPQVVMLQYVDDLLVAAPTYRDCKEGTRRLLQELSKLGYRVSAKKAQLCREEVTYLGYLLKGGKRWLTPARKATVMKIPTPTTPRQVREFLGTAGFCRLWIPGFASLAAPLYPLTREKVPFTWTEAHQEAFGRIKEALLSAPALALPDLTKPFALYVDEKEGVARGVLTQTLGPWRRPVAYLSKKLDPVASGWPTCLKAIAAVALLLKDADKLTLGQNVLVIAPHNLESIVRQPPDRWMTNARMTHYQSLLLNERVSFAPPAILNPATLLPVESDDTPIHICSEILAEETGTRPDLRDQPLPGVPAWYTDGSSFIMDGRRQAGAAIVDNKRTVWASNLPEGTSAQKAELIALTQALRLAEGKSINIYTDSRYAFATAHVHGAIYKQRGLLTSAGKDIKNKEEILALLEAIHLPKRVAIIHCPGHQRGTDPVATGNRKADEAAKQAAQSTRILTETTKNAGKRTADGSEFEKRTADGSEFESPKKKAKVE

SEQ ID NO: 7169 - protein, 2094 aa, synthetic construct
MPAAKRVKLDGGDKKYSIGLDIGTNSVGWAVITDEYKVPSKKFKVLGNTDRHSIKKNLIGALLFDSGETAEATRLKRTARRRYTRRKNRICYLQEIFSNEMAKVDDSFFHRLEESFLVEEDKKHERHPIFGNIVDEVAYHEKYPTIYHLRKKLVDSTDKADLRLIYLALAHMIKFRGHFLIEGDLNPDNSDVDKLFIQLVQTYNQLFEENPINASGVDAKAILSARLSKSRRLENLIAQLPGEKKNGLFGNLIALSLGLTPNFKSNFDLAEDAKLQLSKDTYDDDLDNLLAQIGDQYADLFLAAKNLSDAILLSDILRVNTEITKAPLSASMIKRYDEHHQDLTLLKALVRQQLPEKYKEIFFDQSKNGYAGYIDGGASQEEFYKFIKPILEKMDGTEELLVKLNREDLLRKQRTFDNGSIPHQIHLGELHAILRRQEDFYPFLKDNREKIEKILTFRIPYYVGPLARGNSRFAWMTRKSEETITPWNFEEVVDKGASAQSFIERMTNFDKNLPNEKVLPKHSLLYEYFTVYNELTKVKYVTEGMRKPAFLSGEQKKAIVDLLFKTNRKVTVKQLKEDYFKKIECFDSVEISGVEDRFNASLGTYHDLLKIIKDKDFLDNEENEDILEDIVLTLTLFEDREMIEERLKTYAHLFDDKVMKQLKRRRYTGWGRLSRKLINGIRDKQSGKTILDFLKSDGFANRNFMQLIHDDSLTFKEDIQKAQVSGQGDSLHEHIANLAGSPAIKKGILQTVKVVDELVKVMGRHKPENIVIEMARENQTTQKGQKNSRERMKRIEEGIKELGSQILKEHPVENTQLQNEKLYLYYLQNGRDMYVDQELDINRLSDYDVDHIVPQSFLKDDSIDNKVLTRSDKARGKSDNVPSEEVVKKMKNYWRQLLNAKLITQRKFDNLTKAERGGLSELDKAGFIKRQLVETRQITKHVAQILDSRMNTKYDENDKLIREVKVITLKSKLVSDFRKDFQFYKVREINNYHHAHDAYLNAVVGTALIKKYPKLESEFVYGDYKVYDVRKMIAKSEQEIGKATAKYFFYSNIMNFFKTEITLANGEIRKRPLIETNGETGEIVWDKGRDFATVRKVLSMPQVNIVKKTEVQTGGFSKESILPKRNSDKLIARKKDWDPKKYGGFDSPTVAYSVLVVAKVEKGKSKKLKSVKELLGITIMERSSFEKNPIDFLEAKGYKEVKKDLIIKLPKYSLFELENGRKRMLASAGELQKGNELALPSKYVNFLYLASHYEKLKGSPEDNEQKQLFVEQHKHYLDEIIEQISEFSKRVILADANLDKVLSAYNKHRDKPIREQAENIIHLFTLTNLGAPAAFKYFDTTIDRKRYTSTKEVLDATLIHQSITGLYETRIDLSQLGGDGGPAPGGSGSSGGLGIEDEYRLHETSTEPDVSLGSTWLSDFPQAWAETGGMGLAVRQAPLIIPLKATSTPVSIQQYPMSHEARLGIKPHIQRLLDQGILVPCQSPWNTPLLPVKKPGTNDYRPVQDLREVNKRVEDIHPTVPNPYNLLSGLPPSHQWYTVLDLKDAFFCLRLHPTSQPLFAFEWRDPGMGISGQLTWTRLPQGFKNSPTLFNEALHRDLADFRIQHPDLILLQYVDDILLAATSELDCQQGTRALLQTLGDLGYRASAKKAQICQKQVKYLGYLLREGQRWLTEARKETVMGQPVPKTPRQLREFLGKAGFCRLFIPGFAEMAAPLYPLTKPGTLFSWGPDQQKAYQEIKQALLTAPALGLPDLTKPFELFVDEKQGYAKGVLTQKLGPWRRPVAYLSKKLDPVAAGWPPCLRMVAAIAVLTKDAGKLTMGQPLVILAPHAVEALVKQPPDRWLSNARMTHYQAMLLDTDRVQFGPVVALNPATLLPLPEEGAPHDCLEILAETHGTRPDLTDQPIPDADHTWYTDGSSFLQEGQRKAGAAVTTETEVIWAGALPAGTSAQRAELIALTQALKMAEGKRLNVYTDSRYAFATAHIHGEIYRRRGWLTSEGREIKNKSEILALLKALFLPKRLSIIHCLGHQKGDSAEARGNRLADQAAREAAIKTPPDTSTLLIAGKRTADGSEFEKRTADGSEFESPKKKAKVE

SEQ ID NO: 7170 - protein, 2094 aa, synthetic construct
MPAAKRVKLDGGDKKYSIGLDIGTNSVGWAVITDEYKVPSKKFKVLGNTDRHSIKKNLIGALLFDSGETAEATRLKRTARRRYTRRKNRICYLQEIFSNEMAKVDDSFFHRLEESFLVEEDKKHERHPIFGNIVDEVAYHEKYPTIYHLRKKLVDSTDKADLRLIYLALAHMIKFRGHFLIEGDLNPDNSDVDKLFIQLVQTYNQLFEENPINASGVDAKAILSARLSKSRRLENLIAQLPGEKKNGLFGNLIALSLGLTPNFKSNFDLAEDAKLQLSKDTYDDDLDNLLAQIGDQYADLFLAAKNLSDAILLSDILRVNTEITKAPLSASMIKRYDEHHQDLTLLKALVRQQLPEKYKEIFFDQSKNGYAGYIDGGASQEEFYKFIKPILEKMDGTEELLVKLNREDLLRKQRTFDNGSIPHQIHLGELHAILRRQEDFYPFLKDNREKIEKILTFRIPYYVGPLARGNSRFAWMTRKSEETITPWNFEEVVDKGASAQSFIERMTNFDKNLPNEKVLPKHSLLYEYFTVYNELTKVKYVTEGMRKPAFLSGEQKKAIVDLLFKTNRKVTVKQLKEDYFKKIECFDSVEISGVEDRFNASLGTYHDLLKIIKDKDFLDNEENEDILEDIVLTLTLFEDREMIEERLKTYAHLFDDKVMKQLKRRRYTGWGRLSRKLINGIRDKQSGKTILDFLKSDGFANRNFMQLIHDDSLTFKEDIQKAQVSGQGDSLHEHIANLAGSPAIKKGILQTVKVVDELVKVMGRHKPENIVIEMARENQTTQKGQKNSRERMKRIEEGIKELGSQILKEHPVENTQLQNEKLYLYYLQNGRDMYVDQELDINRLSDYDVDHIVPQSFLKDDSIDNKVLTRSDKARGKSDNVPSEEVVKKMKNYWRQLLNAKLITQRKFDNLTKAERGGLSELDKAGFIKRQLVETRQITKHVAQILDSRMNTKYDENDKLIREVKVITLKSKLVSDFRKDFQFYKVREINNYHHAHDAYLNAVVGTALIKKYPKLESEFVYGDYKVYDVRKMIAKSEQEIGKATAKYFFYSNIMNFFKTEITLANGEIRKRPLIETNGETGEIVWDKGRDFATVRKVLSMPQVNIVKKTEVQTGGFSKESILPKRNSDKLIARKKDWDPKKYGGFDSPTVAYSVLVVAKVEKGKSKKLKSVKELLGITIMERSSFEKNPIDFLEAKGYKEVKKDLIIKLPKYSLFELENGRKRMLASAGELQKGNELALPSKYVNFLYLASHYEKLKGSPEDNEQKQLFVEQHKHYLDEIIEQISEFSKRVILADANLDKVLSAYNKHRDKPIREQAENIIHLFTLTNLGAPAAFKYFDTTIDRKRYTSTKEVLDATLIHQSITGLYETRIDLSQLGGDGGPAPGGSGSSGGTLGIEDEYRLHETSTEPDVSLGSTWLSDFPQAWAETGGMGLAVRQAPLIIPLKATSTPVSIQQYPMSHEARLGIKPHIQRLLDQGILVPCQSPWNTPLLPVKKPGTNDYRPVQDLREVNKRVEDIHPTVPNPYNLLSGLPPSHQWYTVLDLKDAFFCLRLHPTSQPLFAFEWRDPGMGISGQLTWTRLPQGFKNSPTLFNEALHRDLADFRIQHPDLILLQYVDDILLAATSELDCQQGTRALLQTLGDLGYRASAKKAQICQKQVKYLGYLLREGQRWLTEARKETVMGQPVPKTPRQLREFLGTAGFCRLWIPGFAEMAAPLYPLTKPGTLFSWGPDQQKAYQEIKQALLTAPALGLPDLTKPFELFVDEKQGYAKGVLTQKLGPWRRPVAYLSKKLDPVAAGWPPCLRMVAAIAVLTKDAGKLTMGQPLVILAPHAVEALVKQPPDRWLSNARMTHYQAMLLDTDRVQFGPVVALNPATLLPLPEEGAPHDCLEILAETHGTRPDLTDQPIPDADHTWYTDGSSFLQEGQRKAGAAVTTETEVIWAGALPAGTSAQRAELIALTQALKMAEGKRLNVYTDSRYAFATAHIHGEIYRRRGWLTSEGREIKNKSEILALLKALFLPKRLSIIHCLGHQKGDSAEARGNRLADQAAREAAIKTPPDTSTLLAGKRTADGSEFEKRTADGSEFESPKKKAKVE

SEQ ID NO: 7171 - protein, 2094 aa, synthetic construct
MPAAKRVKLDGGDKKYSIGLDIGTNSVGWAVITDEYKVPSKKFKVLGNTDRHSIKKNLIGALLFDSGETAEATRLKRTARRRYTRRKNRICYLQEIFSNEMAKVDDSFFHRLEESFLVEEDKKHERHPIFGNIVDEVAYHEKYPTIYHLRKKLVDSTDKADLRLIYLALAHMIKFRGHFLIEGDLNPDNSDVDKLFIQLVQTYNQLFEENPINASGVDAKAILSARLSKSRRLENLIAQLPGEKKNGLFGNLIALSLGLTPNFKSNFDLAEDAKLQLSKDTYDDDLDNLLAQIGDQYADLFLAAKNLSDAILLSDILRVNTEITKAPLSASMIKRYDEHHQDLTLLKALVRQQLPEKYKEIFFDQSKNGYAGYIDGGASQEEFYKFIKPILEKMDGTEELLVKLNREDLLRKQRTFDNGSIPHQIHLGELHAILRRQEDFYPFLKDNREKIEKILTFRIPYYVGPLARGNSRFAWMTRKSEETITPWNFEEVVDKGASAQSFIERMTNFDKNLPNEKVLPKHSLLYEYFTVYNELTKVKYVTEGMRKPAFLSGEQKKAIVDLLFKTNRKVTVKQLKEDYFKKIECFDSVEISGVEDRFNASLGTYHDLLKIIKDKDFLDNEENEDILEDIVLTLTLFEDREMIEERLKTYAHLFDDKVMKQLKRRRYTGWGRLSRKLINGIRDKQSGKTILDFLKSDGFANRNFMQLIHDDSLTFKEDIQKAQVSGQGDSLHEHIANLAGSPAIKKGILQTVKVVDELVKVMGRHKPENIVIEMARENQTTQKGQKNSRERMKRIEEGIKELGSQILKEHPVENTQLQNEKLYLYYLQNGRDMYVDQELDINRLSDYDVDHIVPQSFLKDDSIDNKVLTRSDKARGKSDNVPSEEVVKKMKNYWRQLLNAKLITQRKFDNLTKAERGGLSELDKAGFIKRQLVETRQITKHVAQILDSRMNTKYDENDKLIREVKVITLKSKLVSDFRKDFQFYKVREINNYHHAHDAYLNAVVGTALIKKYPKLESEFVYGDYKVYDVRKMIAKSEQEIGKATAKYFFYSNIMNFFKTEITLANGEIRKRPLIETNGETGEIVWDKGRDFATVRKVLSMPQVNIVKKTEVQTGGFSKESILPKRNSDKLIARKKDWDPKKYGGFDSPTVAYSVLVVAKVEKGKSKKLKSVKELLGITIMERSSFEKNPIDFLEAKGYKEVKKDLIIKLPKYSLFELENGRKRMLASAGELQKGNELALPSKYVNFLYLASHYEKLKGSPEDNEQKQLFVEQHKHYLDEIIEQISEFSKRVILADANLDKVLSAYNKHRDKPIREQAENIIHLFTLTNLGAPAAFKYFDTTIDRKRYTSTKEVLDATLIHQSITGLYETRIDLSQLGGDGGPAPGGSGSSGGTLNIEDEYRLHETSKEPDVSLGSTWLSDFPQAWAETGGMGLAVRQAPLIIPLKATSTPVSIKQYPMSQEARLGIKPHIQRLLDQGILVPCQSPWNTPLLPVKKPGTNDYRPVQDLREVNKRVEDIHPTVPNPYNLLSGLPPSHQWYTVLDLKDAFFCLRLHPTSQPLFAFEWRDPEMGISGQLTWTRLPQGFKNSPTLFNEALHRDLAGFRIQHPDLILLQYVDDLLLAATSELDCQQGTRALLQTLGDLGYRASAKKAQICQKQVKYLGYLLKEGQRWLTEARKETVMGQPIPKTPRQLREFLGTAGFCRLWIPGFAEMAAPLYPLTKPGTLFNWGPDQQKAFQEIKQALLTAPALGLPDLTKPFELFVDEKQGYAKGVLTQKLGPWRRPVAYLSKKLDPVAAGWPPCLRMVAAIAVLTKDAGKLTMGQPLVILAPHAVEALVKQPPDRWLSNARMTHYQALLLDTDRVQFGPVVALNPATLLPLPEEGLQHDCLDILAEAHGTRSDLMDQPLPDADHTWYTDGSSFLQEGQRKAGAAVTTETEVIWARALPAGTSAQRAELIALTQALKMAEGKKLNVYTDSRYAFATAHIHGEIYRRRGWLTSEGKEIKNKDEILALLKALFLPKRLSIIHCPGHQKGNSAEARGNRMADQAAREVATRETPETSTLLAGKRTADGSEFEKRTADGSEFESPKKKAKVE

SEQ ID NO: 7172 - protein, 2114 aa, synthetic construct
MPAAKRVKLDGGDKKYSIGLDIGTNSVGWAVITDEYKVPSKKFKVLGNTDRHSIKKNLIGALLFDSGETAEATRLKRTARRRYTRRKNRICYLQEIFSNEMAKVDDSFFHRLEESFLVEEDKKHERHPIFGNIVDEVAYHEKYPTIYHLRKKLVDSTDKADLRLIYLALAHMIKFRGHFLIEGDLNPDNSDVDKLFIQLVQTYNQLFEENPINASGVDAKAILSARLSKSRRLENLIAQLPGEKKNGLFGNLIALSLGLTPNFKSNFDLAEDAKLQLSKDTYDDDLDNLLAQIGDQYADLFLAAKNLSDAILLSDILRVNTEITKAPLSASMIKRYDEHHQDLTLLKALVRQQLPEKYKEIFFDQSKNGYAGYIDGGASQEEFYKFIKPILEKMDGTEELLVKLNREDLLRKQRTFDNGSIPHQIHLGELHAILRRQEDFYPFLKDNREKIEKILTFRIPYYVGPLARGNSRFAWMTRKSEETITPWNFEEVVDKGASAQSFIERMTNFDKNLPNEKVLPKHSLLYEYFTVYNELTKVKYVTEGMRKPAFLSGEQKKAIVDLLFKTNRKVTVKQLKEDYFKKIECFDSVEISGVEDRFNASLGTYHDLLKIIKDKDFLDNEENEDILEDIVLTLTLFEDREMIEERLKTYAHLFDDKVMKQLKRRRYTGWGRLSRKLINGIRDKQSGKTILDFLKSDGFANRNFMQLIHDDSLTFKEDIQKAQVSGQGDSLHEHIANLAGSPAIKKGILQTVKVVDELVKVMGRHKPENIVIEMARENQTTQKGQKNSRERMKRIEEGIKELGSQILKEHPVENTQLQNEKLYLYYLQNGRDMYVDQELDINRLSDYDVDHIVPQSFLKDDSIDNKVLTRSDKARGKSDNVPSEEVVKKMKNYWRQLLNAKLITQRKFDNLTKAERGGLSELDKAGFIKRQLVETRQITKHVAQILDSRMNTKYDENDKLIREVKVITLKSKLVSDFRKDFQFYKVREINNYHHAHDAYLNAVVGTALIKKYPKLESEFVYGDYKVYDVRKMIAKSEQEIGKATAKYFFYSNIMNFFKTEITLANGEIRKRPLIETNGETGEIVWDKGRDFATVRKVLSMPQVNIVKKTEVQTGGFSKESILPKRNSDKLIARKKDWDPKKYGGFDSPTVAYSVLVVAKVEKGKSKKLKSVKELLGITIMERSSFEKNPIDFLEAKGYKEVKKDLIIKLPKYSLFELENGRKRMLASAGELQKGNELALPSKYVNFLYLASHYEKLKGSPEDNEQKQLFVEQHKHYLDEIIEQISEFSKRVILADANLDKVLSAYNKHRDKPIREQAENIIHLFTLTNLGAPAAFKYFDTTIDRKRYTSTKEVLDATLIHQSITGLYETRIDLSQLGGDGGPAPGGSGSSGGTLNIEDEYRLHETSKEPDVSLGSTWLSDFPQAWAETGGMGLAVRQAPLIIPLKATSTPVSIKQYPMSQEARLGIKPHIQRLLDQGILVPCQSPWNTPLLPVKKPGTNDYRPVQDLREVNKRVEDIHPTVPNPYNLLSGLPPSHQWYTVLDLKDAFFCLRLHPTSQPLFAFEWRDPEMGISGQLTWTRLPQGFKNSPTLFNEALHRDLADFRIQHPDLILLQYVDDLLLAATSELDCQQGTRALLQTLGNLGYRASAKKAQICQKQVKYLGYLLKEGQRWLTEARKETVMGQPTPKTPRQLREFLGKAGFCRLFIPGFAEMAAPLYPLTKPGTLFNWGPDQQKAYQEIKQALLTAPALGLPDLTKPFELFVDEKQGYAKGVLTQKLGPWRRPVAYLSKKLDPVAAGWPPCLRMVAAIAVLTKDAGKLTMGQPLVILAPHAVEALVKQPPDRWLSNARMTHYQALLLDTDRVQFGPVVALNPATLLPLPEEGLQHNCLDILAEAHGTRPDLTDQPLPDADHTWYTDGSSLLQEGQRKAGAAVTTETEVIWAKALPAGTSAQRAELIALTQALKMAEGKKLNVYTDSRYAFATAHIHGEIYRRRGWLTSEGKEIKNKDEILALLKALFLPKRLSIIHCPGHQKGHSAEARGNRMADQAARKAAITETPDTSTLLIENSSPSGGSKRTADGSEFEAGKRTADGSEFEKRTADGSEFESPKKKAKVE

SEQ ID NO: 7173 - protein, 2094 aa, synthetic construct
MPAAKRVKLDGGDKKYSIGLDIGTNSVGWAVITDEYKVPSKKFKVLGNTDRHSIKKNLIGALLFDSGETAEATRLKRTARRRYTRRKNRICYLQEIFSNEMAKVDDSFFHRLEESFLVEEDKKHERHPIFGNIVDEVAYHEKYPTIYHLRKKLVDSTDKADLRLIYLALAHMIKFRGHFLIEGDLNPDNSDVDKLFIQLVQTYNQLFEENPINASGVDAKAILSARLSKSRRLENLIAQLPGEKKNGLFGNLIALSLGLTPNFKSNFDLAEDAKLQLSKDTYDDDLDNLLAQIGDQYADLFLAAKNLSDAILLSDILRVNTEITKAPLSASMIKRYDEHHQDLTLLKALVRQQLPEKYKEIFFDQSKNGYAGYIDGGASQEEFYKFIKPILEKMDGTEELLVKLNREDLLRKQRTFDNGSIPHQIHLGELHAILRRQEDFYPFLKDNREKIEKILTFRIPYYVGPLARGNSRFAWMTRKSEETITPWNFEEVVDKGASAQSFIERMTNFDKNLPNEKVLPKHSLLYEYFTVYNELTKVKYVTEGMRKPAFLSGEQKKAIVDLLFKTNRKVTVKQLKEDYFKKIECFDSVEISGVEDRFNASLGTYHDLLKIIKDKDFLDNEENEDILEDIVLTLTLFEDREMIEERLKTYAHLFDDKVMKQLKRRRYTGWGRLSRKLINGIRDKQSGKTILDFLKSDGFANRNFMQLIHDDSLTFKEDIQKAQVSGQGDSLHEHIANLAGSPAIKKGILQTVKVVDELVKVMGRHKPENIVIEMARENQTTQKGQKNSRERMKRIEEGIKELGSQILKEHPVENTQLQNEKLYLYYLQNGRDMYVDQELDINRLSDYDVDHIVPQSFLKDDSIDNKVLTRSDKARGKSDNVPSEEVVKKMKNYWRQLLNAKLITQRKFDNLTKAERGGLSELDKAGFIKRQLVETRQITKHVAQILDSRMNTKYDENDKLIREVKVITLKSKLVSDFRKDFQFYKVREINNYHHAHDAYLNAVVGTALIKKYPKLESEFVYGDYKVYDVRKMIAKSEQEIGKATAKYFFYSNIMNFFKTEITLANGEIRKRPLIETNGETGEIVWDKGRDFATVRKVLSMPQVNIVKKTEVQTGGFSKESILPKRNSDKLIARKKDWDPKKYGGFDSPTVAYSVLVVAKVEKGKSKKLKSVKELLGITIMERSSFEKNPIDFLEAKGYKEVKKDLIIKLPKYSLFELENGRKRMLASAGELQKGNELALPSKYVNFLYLASHYEKLKGSPEDNEQKQLFVEQHKHYLDEIIEQISEFSKRVILADANLDKVLSAYNKHRDKPIREQAENIIHLFTLTNLGAPAAFKYFDTTIDRKRYTSTKEVLDATLIHQSITGLYETRIDLSQLGGDGGPAPGGSGSSGGTLNIEDEHRLHETSKEPDVSLGSTWLSDFPQAWAETGGMGLAVRQAPLIIPLKATSTPVSIKQYPMSQEARLGIKPHIQRLLDQGILVPCQSPWNTPLLPVKKPGTNDYRPVQDLREVNKRVEDIHPTVPNPYNLLSGLPPSHQWYTVLDLKDAFFCLRLHPTSQPLFAFEWRDPEMGISGQLTWTRLPQGFKNSPTLFNEALHRDLADFRIQHPDLILLQYVDDLLLAATSELDCQQGTRALLQTLGNLGYRASAKKAQICQKQVKYLGYLLKEGQRWLTEARKETVMGQPTPKTPRQLREFLGTAGFCRLWIPGFAEMAAPLYPLTKPGTLFNWGPDQQKAYQEIKQALLTAPALGLPDLTKPFELFVDEKQGYAKGVLTQKLGPWRRPVAYLSKKLDPVAAGWPPCLRMVAAIAVLTKDAGKLTMGQPLVILAPHAVEALVKQPPDRWLSNARMTHYQALLLDTDRVQFGPVVALNPATLLPLPEEGLQHNCLDILAEAHGTRPDLTDQPLPDADHTWYTDGSSLLQEGQRKAGAAVTTETEVIWAKALPAGTSAQRAELIALTQALKMAEGKKLNVYTDSRYAFATAHIHGEIYRRRGWLTSEGKEIKNKDEILALLKALFLPKRLSIIHCPGHQKGHSAEARGNRMADQAARKAAITETPDTSTLLAGKRTADGSEFEKRTADGSEFESPKKKAKVE

SEQ ID NO: 7174 - protein, 2114 aa, synthetic construct; identical to SEQ ID NO: 7172

SEQ ID NO: 7175 - protein, 2094 aa, synthetic construct
MPAAKRVKLDGGDKKYSIGLDIGTNSVGWAVITDEYKVPSKKFKVLGNTDRHSIKKNLIGALLFDSGETAEATRLKRTARRRYTRRKNRICYLQEIFSNEMAKVDDSFFHRLEESFLVEEDKKHERHPIFGNIVDEVAYHEKYPTIYHLRKKLVDSTDKADLRLIYLALAHMIKFRGHFLIEGDLNPDNSDVDKLFIQLVQTYNQLFEENPINASGVDAKAILSARLSKSRRLENLIAQLPGEKKNGLFGNLIALSLGLTPNFKSNFDLAEDAKLQLSKDTYDDDLDNLLAQIGDQYADLFLAAKNLSDAILLSDILRVNTEITKAPLSASMIKRYDEHHQDLTLLKALVRQQLPEKYKEIFFDQSKNGYAGYIDGGASQEEFYKFIKPILEKMDGTEELLVKLNREDLLRKQRTFDNGSIPHQIHLGELHAILRRQEDFYPFLKDNREKIEKILTFRIPYYVGPLARGNSRFAWMTRKSEETITPWNFEEVVDKGASAQSFIERMTNFDKNLPNEKVLPKHSLLYEYFTVYNELTKVKYVTEGMRKPAFLSGEQKKAIVDLLFKTNRKVTVKQLKEDYFKKIECFDSVEISGVEDRFNASLGTYHDLLKIIKDKDFLDNEENEDILEDIVLTLTLFEDREMIEERLKTYAHLFDDKVMKQLKRRRYTGWGRLSRKLINGIRDKQSGKTILDFLKSDGFANRNFMQLIHDDSLTFKEDIQKAQVSGQGDSLHEHIANLAGSPAIKKGILQTVKVVDELVKVMGRHKPENIVIEMARENQTTQKGQKNSRERMKRIEEGIKELGSQILKEHPVENTQLQNEKLYLYYLQNGRDMYVDQELDINRLSDYDVDHIVPQSFLKDDSIDNKVLTRSDKARGKSDNVPSEEVVKKMKNYWRQLLNAKLITQRKFDNLTKAERGGLSELDKAGFIKRQLVETRQITKHVAQILDSRMNTKYDENDKLIREVKVITLKSKLVSDFRKDFQFYKVREINNYHHAHDAYLNAVVGTALIKKYPKLESEFVYGDYKVYDVRKMIAKSEQEIGKATAKYFFYSNIMNFFKTEITLANGEIRKRPLIETNGETGEIVWDKGRDFATVRKVLSMPQVNIVKKTEVQTGGFSKESILPKRNSDKLIARKKDWDPKKYGGFDSPTVAYSVLVVAKVEKGKSKKLKSVKELLGITIMERSSFEKNPIDFLEAKGYKEVKKDLIIKLPKYSLFELENGRKRMLASAGELQKGNELALPSKYVNFLYLASHYEKLKGSPEDNEQKQLFVEQHKHYLDEIIEQISEFSKRVILADANLDKVLSAYNKHRDKPIREQAENIIHLFTLTNLGAPAAFKYFDTTIDRKRYTSTKEVLDATLIHQSITGLYETRIDLSQLGGDGGPAPGGSGSSGGTLNIEDEHRLHETSKEPDVSLGSTWLSDFPQAWAETGGMGLAVRQAPLIIPLKATSTPVSIKQYPMSQEARLGIKPHIQRLLDQGILVPCQSPWNTPLLPVKKPGTNDYRPVQDLREVNKRVEDIHPTVPNPYNLLSGLPPSHQWYTVLDLKDAFFCLRLHPTSQPLFAFEWRDPEMGISGQLTWTRLPQGFKNSPTLFDEALHRDLADFRIQHPDLILLQYVDDLLLAATSELDCQQGTRALLQTLGNLGYRASAKKAQICQKQVKYLGYLLKEGQRWLTEARKETVMGQPTPKTPRQLREFLGTAGFCRLWIPGFAEMAAPLYPLTKTGTLFNWGPDQQKAYQEIKQALLTAPALGLPDLTKPFELFVDEKQGYAKGVLTQKLGPWRRPVAYLSKKLDPVAAGWPPCLRMVAAIAVLTKDAGKLTMGQPLVILAPHAVEALVKQPPDRWLSNARMTHYQALLLDTDRVQFGPVVALNPATLLPLPEEGLQHNCLDILAEAHGTRPDLTDQPLPDADHTWYTDGSSLLQEGQRKAGAAVTTETEVIWAKALPAGTSAQRAELIALTQALKMAEGKKLNVYTDSRYAFATAHIHGEIYRRRGLLTSEGKEIKNKDEILALLKALFLPKRLSIIHCPGHQKGHSAEARGNRMADQAARKAAITETPDTSTLLAGKRTADGSEFEKRTADGSEFESPKKKAKVE

SEQ ID NO: 7176 - protein, 2094 aa, synthetic construct; identical to SEQ ID NO: 7173

SEQ ID NO: 7177 - protein, 2085 aa, synthetic construct
MPAAKRVKLDGGDKKYSIGLDIGTNSVGWAVITDEYKVPSKKFKVLGNTDRHSIKKNLIGALLFDSGETAEATRLKRTARRRYTRRKNRICYLQEIFSNEMAKVDDSFFHRLEESFLVEEDKKHERHPIFGNIVDEVAYHEKYPTIYHLRKKLVDSTDKADLRLIYLALAHMIKFRGHFLIEGDLNPDNSDVDKLFIQLVQTYNQLFEENPINASGVDAKAILSARLSKSRRLENLIAQLPGEKKNGLFGNLIALSLGLTPNFKSNFDLAEDAKLQLSKDTYDDDLDNLLAQIGDQYADLFLAAKNLSDAILLSDILRVNTEITKAPLSASMIKRYDEHHQDLTLLKALVRQQLPEKYKEIFFDQSKNGYAGYIDGGASQEEFYKFIKPILEKMDGTEELLVKLNREDLLRKQRTFDNGSIPHQIHLGELHAILRRQEDFYPFLKDNREKIEKILTFRIPYYVGPLARGNSRFAWMTRKSEETITPWNFEEVVDKGASAQSFIERMTNFDKNLPNEKVLPKHSLLYEYFTVYNELTKVKYVTEGMRKPAFLSGEQKKAIVDLLFKTNRKVTVKQLKEDYFKKIECFDSVEISGVEDRFNASLGTYHDLLKIIKDKDFLDNEENEDILEDIVLTLTLFEDREMIEERLKTYAHLFDDKVMKQLKRRRYTGWGRLSRKLINGIRDKQSGKTILDFLKSDGFANRNFMQLIHDDSLTFKEDIQKAQVSGQGDSLHEHIANLAGSPAIKKGILQTVKVVDELVKVMGRHKPENIVIEMARENQTTQKGQKNSRERMKRIEEGIKELGSQILKEHPVENTQLQNEKLYLYYLQNGRDMYVDQELDINRLSDYDVDHIVPQSFLKDDSIDNKVLTRSDKARGKSDNVPSEEVVKKMKNYWRQLLNAKLITQRKFDNLTKAERGGLSELDKAGFIKRQLVETRQITKHVAQILDSRMNTKYDENDKLIREVKVITLKSKLVSDFRKDFQFYKVREINNYHHAHDAYLNAVVGTALIKKYPKLESEFVYGDYKVYDVRKMIAKSEQEIGKATAKYFFYSNIMNFFKTEITLANGEIRKRPLIETNGETGEIVWDKGRDFATVRKVLSMPQVNIVKKTEVQTGGFSKESILPKRNSDKLIARKKDWDPKKYGGFDSPTVAYSVLVVAKVEKGKSKKLKSVKELLGITIMERSSFEKNPIDFLEAKGYKEVKKDLIIKLPKYSLFELENGRKRMLASAGELQKGNELALPSKYVNFLYLASHYEKLKGSPEDNEQKQLFVEQHKHYLDEIIEQISEFSKRVILADANLDKVLSAYNKHRDKPIREQAENIIHLFTLTNLGAPAAFKYFDTTIDRKRYTSTKEVLDATLIHQSITGLYETRIDLSQLGGDGGPAPGGSGSSGGIPWLMKKPLQLTTLVPLQEYEERLLKQTMLTGSYKEKLQSLFLKYDALWQHWENQVGHRRIKPHHIATGTVNPRPQKQYPINPKAKASIQTVINDLLKQGVLIQQNSIMNTPVYPVPKPDGKWRMVLDYREVNKTIPLIAAQNQHSAGILSSIFRGKYKTTLDLSNGFWAHSITPESYWLTAFTWLGQQYCWTRLPQGFLNSPALFNADVVDLLKEVPNVQVYVDDIYISHDDPREHLEQLEKVFSLLLNAGYVVSLKKSEIAQHEVEFLGFNITKEGRGLTETFKQKLLNITPPRDLKQLQSILGKLNFARNFIPNFSELVKPLYNIIATAPGKYITWTTDNSQQLQNIISMLNSAENLEERNPEVRLIMKVNTSPSAGYIRFYNEFAKRPIMYLNYVYTKAEVKFTNTEKLLTTIHKGLIKALDLGMGQEILVYSPIVSMTKIQKTPLPERKALPIRWITWMSYLEDPRIQFHYDKTLPELQQVPTVTDDIIAKIKHPSEFSMVFYTDGSAIKHPNVNKSHNAGMGIAQVQFKPEFTVINTWSIPLGDHTAQLAEVAAVEFACKKALKIDGPVLIVTDSFYVAESVNKELPYWQSNGFFNNKKKPLKHVSKWKSIADCIQLKPDIIIIHEKGHQPTASTFHTEGNNLADKLATQGSYVVNAGKRTADGSEFEKRTADGSEFESPKKKAKVE

SEQ ID NO: 7178 - protein, 2092 aa, synthetic construct
MPAAKRVKLDGGDKKYSIGLDIGTNSVGWAVITDEYKVPSKKFKVLGNTDRHSIKKNLIGALLFDSGETAEATRLKRTARRRYTRRKNRICYLQEIFSNEMAKVDDSFFHRLEESFLVEEDKKHERHPIFGNIVDEVAYHEKYPTIYHLRKKLVDSTDKADLRLIYLALAHMIKFRGHFLIEGDLNPDNSDVDKLFIQLVQTYNQLFEENPINASGVDAKAILSARLSKSRRLENLIAQLPGEKKNGLFGNLIALSLGLTPNFKSNFDLAEDAKLQLSKDTYDDDLDNLLAQIGDQYADLFLAAKNLSDAILLSDILRVNTEITKAPLSASMIKRYDEHHQDLTLLKALVRQQLPEKYKEIFFDQSKNGYAGYIDGGASQEEFYKFIKPILEKMDGTEELLVKLNREDLLRKQRTFDNGSIPHQIHLGELHAILRRQEDFYPFLKDNREKIEKILTFRIPYYVGPLARGNSRFAWMTRKSEETITPWNFEEVVDKGASAQSFIERMTNFDKNLPNEKVLPKHSLLYEYFTVYNELTKVKYVTEGMRKPAFLSGEQKKAIVDLLFKTNRKVTVKQLKEDYFKKIECFDSVEISGVEDRFNASLGTYHDLLKIIKDKDFLDNEENEDILEDIVLTLTLFEDREMIEERLKTYAHLFDDKVMKQLKRRRYTGWGRLSRKLINGIRDKQSGKTILDFLKSDGFANRNFMQLIHDDSLTFKEDIQKAQVSGQGDSLHEHIANLAGSPAIKKGILQTVKVVDELVKVMGRHKPENIVIEMARENQTTQKGQKNSRERMKRIEEGIKELGSQILKEHPVENTQLQNEKLYLYYLQNGRDMYVDQELDINRLSDYDVDHIVPQSFLKDDSIDNKVLTRSDKARGKSDNVPSEEVVKKMKNYWRQLLNAKLITQRKFDNLTKAERGGLSELDKAGFIKRQLVETRQITKHVAQILDSRMNTKYDENDKLIREVKVITLKSKLVSDFRKDFQFYKVREINNYHHAHDAYLNAVVGTALIKKYPKLESEFVYGDYKVYDVRKMIAKSEQEIGKATAKYFFYSNIMNFFKTEITLANGEIRKRPLIETNGETGEIVWDKGRDFATVRKVLSMPQVNIVKKTEVQTGGFSKESILPKRNSDKLIARKKDWDPKKYGGFDSPTVAYSVLVVAKVEKGKSKKLKSVKELLGITIMERSSFEKNPIDFLEAKGYKEVKKDLIIKLPKYSLFELENGRKRMLASAGELQKGNELALPSKYVNFLYLASHYEKLKGSPEDNEQKQLFVEQHKHYLDEIIEQISEFSKRVILADANLDKVLSAYNKHRDKPIREQAENIIHLFTLTNLGAPAAFKYFDTTIDRKRYTSTKEVLDATLIHQSITGLYETRIDLSQLGGDGGPAPGGSGSSGGVLNLEEEYRLHEKPVPSSIDPSWLQLFPTVWAERAGMGLANQVPPVVVELRSGASPVAVRQYPMSKEAREGIRPHIQRFLDLGVLVPCQSPWNTPLLPVKKPGTNDYRPVQDLREINKRVQDIHPTVPNPYNLLSSLPPSHTWYSVLDLKDAFFCLKLHPNSQPLFAFEWRDPEKGNTGQLTWTRLPQGFKNSPTLFNEALHRDLAPFRALNPQVVLLQYVDDLLVAAPTYRDCKEGTQKLLQELSKLGYRVSAKKAQLCQKEVTYLGYLLKEGKRWLTPARKATVMKIPPPTTPRQVREFLGTAGFCRLWIPGFASLAAPLYPLTKPSIPFIWTEEHQKAFDRIKEALLSAPALALPDLTKPFTLYVDERAGVARGVLTQTLGPWRRPVAYLSKKLDPVASGWPTCLKAVAAVALLLKDADKLTLGQNVTVIASHSLESIVRQPPDRWMTNARMTHYQSLLLNERVSFAPPAVLNPATLLPVESEATPVHRCSEILAEETGTRRDLKDQPLPGVPAWYTDGSSFIAEGKRRAGAAIVDGKRTVWASSLPEGTSAQKAELVALTQALRLAEGKDINIYTDSRYAFATAHIHGAIYKQRGWLTSAGKDIKNKEEILALLEAIHLPKRVAIIHCPGHQKGNDPVATGNRRADEAAKQAALSTRVLAETTKPAGKRTADGSEFEKRTADGSEFESPKKKAKVE

SEQ ID NO: 7179 - protein, 2094 aa, synthetic construct
MPAAKRVKLDGGDKKYSIGLDIGTNSVGWAVITDEYKVPSKKFKVLGNTDRHSIKKNLIGALLFDSGETAEATRLKRTARRRYTRRKNRICYLQEIFSNEMAKVDDSFFHRLEESFLVEEDKKHERHPIFGNIVDEVAYHEKYPTIYHLRKKLVDSTDKADLRLIYLALAHMIKFRGHFLIEGDLNPDNSDVDKLFIQLVQTYNQLFEENPINASGVDAKAILSARLSKSRRLENLIAQLPGEKKNGLFGNLIALSLGLTPNFKSNFDLAEDAKLQLSKDTYDDDLDNLLAQIGDQYADLFLAAKNLSDAILLSDILRVNTEITKAPLSASMIKRYDEHHQDLTLLKALVRQQLPEKYKEIFFDQSKNGYAGYIDGGASQEEFYKFIKPILEKMDGTEELLVKLNREDLLRKQRTFDNGSIPHQIHLGELHAILRRQEDFYPFLKDNREKIEKILTFRIPYYVGPLARGNSRFAWMTRKSEETITPWNFEEVVDKGASAQSFIERMTNFDKNLPNEKVLPKHSLLYEYFTVYNELTKVKYVTEGMRKPAFLSGEQKKAIVDLLFKTNRKVTVKQLKEDYFKKIECFDSVEISGVEDRFNASLGTYHDLLKIIKDKDFLDNEENEDILEDIVLTLTLFEDREMIEERLKTYAHLFDDKVMKQLKRRRYTGWGRLSRKLINGIRDKQSGKTILDFLKSDGFANRNFMQLIHDDSLTFKEDIQKAQVSGQGDSLHEHIANLAGSPAIKKGILQTVKVVDELVKVMGRHKPENIVIEMARENQTTQKGQKNSRERMKRIEEGIKELGSQILKEHPVENTQLQNEKLYLYYLQNGRDMYVDQELDINRLSDYDVDHIVPQSFLKDDSIDNKVLTRSDKARGKSDNVPSEEVVKKMKNYWRQLLNAKLITQRKFDNLTKAERGGLSELDKAGFIKRQLVETRQITKHVAQILDSRMNTKYDENDKLIREVKVITLKSKLVSDFRKDFQFYKVREINNYHHAHDAYLNAVVGTALIKKYPKLESEFVYGDYKVYDVRKMIAKSEQEIGKATAKYFFYSNIMNFFKTEITLANGEIRKRPLIETNGETGEIVWDKGRDFATVRKVLSMPQVNIVKKTEVQTGGFSKESILPKRNSDKLIARKKDWDPKKYGGFDSPTVAYSVLVVAKVEKGKSKKLKSVKELLGITIMERSSFEKNPIDFLEAKGYKEVKKDLIIKLPKYSLFELENGRKRMLASAGELQKGNELALPSKYVNFLYLASHYEKLKGSPEDNEQKQLFVEQHKHYLDEIIEQISEFSKRVILADANLDKVLSAYNKHRDKPIREQAENIIHLFTLTNLGAPAAFKYFDTTIDRKRYTSTKEVLDATLIHQSITGLYETRIDLSQLGGDGGPAPGGSGSSGGTLNIEDEYRLHETSKEPDVPLGSTWLSDFPQAWAETGGMGLAVRQAPLIIPLKATSTPVSIKQYPMSQEARLGIKPHIQRLLDQGILVPCQSPWNTPLLPVKKPGTNDYRPVQDLREVNKRVEDIHPTVPNPYNLLSGLPPSHQWYTVLDLKDAFFCLRLHPTSQPLFAFEWRDPEMGISGQLTWTRLPQGFKNSPTLFNEALHRDLADFRIQHPDLILLQYVDDLLLAATSEQDCQRGTRALLQTLGNLGYRASAKKAQICQKQVKYLGYLLKEGQRWLTEARKETVMGQPTPKTPRQLREFLGTAGFCRLWIPGFAEMAAPLYPLTKPGTLFNWGPDQQKAYQEIKQALLTAPALGLPDLTKPFELFVDEKQGYAKGVLTQKLGPWRRPVAYLSKKLDPVAAGWPPCLRMVAAIAVLTKDAGKLTMGQPLVILAPHAVEALVKQPPDRWLSNARMTHYQAMLLDTDRVQFGPVVALNPATLLPLPEKEAPHDCLEILAETHGTRPDLTDQPIPDADYTWYTDGSSFLQEGQRRAGAAVTTETEVIWARALPAGTSAQRAELIALTQALKMAEGKKLNVYTDSRYAFATAHVHGEIYRRRGWLTSEGREIKNKNEILALLKALFLPKRLSIIHCPGHQKGNSAEARGNRMADQAAREAAMKAVLETSTLLAGKRTADGSEFEKRTADGSEFESPKKKAKVE

SEQ ID NO: 7180 - protein, 2094 aa, synthetic construct
MPAAKRVKLDGGDKKYSIGLDIGTNSVGWAVITDEYKVPSKKFKVLGNTDRHSIKKNLIGALLFDSGETAEATRLKRTARRRYTRRKNRICYLQEIFSNEMAKVDDSFFHRLEESFLVEEDKKHERHPIFGNIVDEVAYHEKYPTIYHLRKKLVDSTDKADLRLIYLALAHMIKFRGHFLIEGDLNPDNSDVDKLFIQLVQTYNQLFEENPINASGVDAKAILSARLSKSRRLENLIAQLPGEKKNGLFGNLIALSLGLTPNFKSNFDLAEDAKLQLSKDTYDDDLDNLLAQIGDQYADLFLAAKNLSDAILLSDILRVNTEITKAPLSASMIKRYDEHHQDLTLLKALVRQQLPEKYKEIFFDQSKNGYAGYIDGGASQEEFYKFIKPILEKMDGTEELLVKLNREDLLRKQRTFDNGSIPHQIHLGELHAILRRQEDFYPFLKDNREKIEKILTFRIPYYVGPLARGNSRFAWMTRKSEETITPWNFEEVVDKGASAQSFIERMTNFDKNLPNEKVLPKHSLLYEYFTVYNELTKVKYVTEGMRKPAFLSGEQKKAIVDLLFKTNRKVTVKQLKEDYFKKIECFDSVEISGVEDRFNASLGTYHDLLKIIKDKDFLDNEENEDILEDIVLTLTLFEDREMIEERLKTYAHLFDDKVMKQLKRRRYTGWGRLSRKLINGIRDKQSGKTILDFLKSDGFANRNFMQLIHDDSLTFKEDIQKAQVSGQGDSLHEHIANLAGSPAIKKGILQTVKVVDELVKVMGRHKPENIVIEMARENQTTQKGQKNSRERMKRIEEGIKELGSQILKEHPVENTQLQNEKLYLYYLQNGRDMYVDQELDINRLSDYDVDHIVPQSFLKDDSIDNKVLTRSDKARGKSDNVPSEEVVKKMKNYWRQLLNAKLITQRKFDNLTKAERGGLSELDKAGFIKRQLVETRQITKHVAQILDSRMNTKYDENDKLIREVKVITLKSKLVSDFRKDFQFYKVREINNYHHAHDAYLNAVVGTALIKKYPKLESEFVYGDYKVYDVRKMIAKSEQEIGKATAKYFFYSNIMNFFKTEITLANGEIRKRPLIETNGETGEIVWDKGRDFATVRKVLSMPQVNIVKKTEVQTGGFSKESILPKRNSDKLIARKKDWDPKKYGGFDSPTVAYSVLVVAKVEKGKSKKLKSVKELLGITIMERSSFEKNPIDFLEAKGYKEVKKDLIIKLPKYSLFELENGRKRMLASAGELQKGNELALPSKYVNFLYLASHYEKLKGSPEDNEQKQLFVEQHKHYLDEIIEQISEFSKRVILADANLDKVLSAYNKHRDKPIREQAENIIHLFTLTNLGAPAAFKYFDTTIDRKRYTSTKEVLDATLIHQSITGLYETRIDLSQLGGDGGPAPGGSGSSGGTLNIEDEYRLHETSKEPDVPLGSTWLSDFPQAWAETGGMGLAVRQAPLIIPLKATSTPVSIKQYPMSQEARLGIKPHIQRLLDQGILVPCQSPWNTPLLPVKKPGTNDYRPVQDLREVNKRVEDIHPTVPNPYNLLSGLPPSHQWYTVLDLKDAFFCLRLHPTSQPLFAFEWRDPEMGISGQLTWTRLPQGFKNSPTLFNEALHRDLADFRIQHPDLILLQYVDDLLLAATSEQDCQRGTRALLQTLGNLGYRASAKKAQICQKQVKYLGYLLKEGQRWLTEARKETVMGQPTPKTPRQLREFLGKAGFCRLFIPGFAEMAAPLYPLTKPGTLFNWGPDQQKAYQEIKQALLTAPALGLPDLTKPFELFVDEKQGYAKGVLTQKLGPWRRPVAYLSKKLDPVAAGWPPCLRMVAAIAVLTKDAGKLTMGQPLVILAPHAVEALVKQPPDRWLSNARMTHYQAMLLDTDRVQFGPVVALNPATLLPLPEKEAPHDCLEILAETHGTRPDLTDQPIPDADYTWYTDGSSFLQEGQRRAGAAVTTETEVIWARALPAGTSAQRAELIALTQALKMAEGKKLNVYTDSRYAFATAHVHGEIYRRRGWLTSEGREIKNKNEILALLKALFLPKRLSIIHCPGHQKGNSAEARGNRMADQAAREAAMKAVLETSTLLAGKRTADGSEFEKRTADGSEFESPKKKAKVE

SEQ ID NO: 7181 - protein, 2096 aa, synthetic construct
MPAAKRVKLDGGDKKYSIGLDIGTNSVGWAVITDEYKVPSKKFKVLGNTDRHSIKKNLIGALLFDSGETAEATRLKRTARRRYTRRKNRICYLQEIFSNEMAKVDDSFFHRLEESFLVEEDKKHERHPIFGNIVDEVAYHEKYPTIYHLRKKLVDSTDKADLRLIYLALAHMIKFRGHFLIEGDLNPDNSDVDKLFIQLVQTYNQLFEENPINASGVDAKAILSARLSKSRRLENLIAQLPGEKKNGLFGNLIALSLGLTPNFKSNFDLAEDAKLQLSKDTYDDDLDNLLAQIGDQYADLFLAAKNLSDAILLSDILRVNTEITKAPLSASMIKRYDEHHQDLTLLKALVRQQLPEKYKEIFFDQSKNGYAGYIDGGASQEEFYKFIKPILEKMDGTEELLVKLNREDLLRKQRTFDNGSIPHQIHLGELHAILRRQEDFYPFLKDNREKIEKILTFRIPYYVGPLARGNSRFAWMTRKSEETITPWNFEEVVDKGASAQSFIERMTNFDKNLPNEKVLPKHSLLYEYFTVYNELTKVKYVTEGMRKPAFLSGEQKKAIVDLLFKTNRKVTVKQLKEDYFKKIECFDSVEISGVEDRFNASLGTYHDLLKIIKDKDFLDNEENEDILEDIVLTLTLFEDREMIEERLKTYAHLFDDKVMKQLKRRRYTGWGRLSRKLINGIRDKQSGKTILDFLKSDGFANRNFMQLIHDDSLTFKEDIQKAQVSGQGDSLHEHIANLAGSPAIKKGILQTVKVVDELVKVMGRHKPENIVIEMARENQTTQKGQKNSRERMKRIEEGIKELGSQILKEHPVENTQLQNEKLYLYYLQNGRDMYVDQELDINRLSDYDVDHIVPQSFLKDDSIDNKVLTRSDKARGKSDNVPSEEVVKKMKNYWRQLLNAKLITQRKFDNLTKAERGGLSELDKAGFIKRQLVETRQITKHVAQILDSRMNTKYDENDKLIREVKVITLKSKLVSDFRKDFQFYKVREINNYHHAHDAYLNAVVGTALIKKYPKLESEFVYGDYKVYDVRKMIAKSEQEIGKATAKYFFYSNIMNFFKTEITLANGEIRKRPLIETNGETGEIVWDKGRDFATVRKVLSMPQVNIVKKTEVQTGGFSKESILPKRNSDKLIARKKDWDPKKYGGFDSPTVAYSVLVVAKVEKGKSKKLKSVKELLGITIMERSSFEKNPIDFLEAKGYKEVKKDLIIKLPKYSLFELENGRKRMLASAGELQKGNELALPSKYVNFLYLASHYEKLKGSPEDNEQKQLFVEQHKHYLDEIIEQISEFSKRVILADANLDKVLSAYNKHRDKPIREQAENIIHLFTLTNLGAPAAFKYFDTTIDRKRYTSTKEVLDATLIHQSITGLYETRIDLSQLGGDGGPAPGSSGGSGGTAPLEEEYRLFLEAPIQNVTLLEQWKREIPKVWAEINPPGLASTQAPIHVQLLSTALPVRVRQYPITLEAKRSLRETIRKFRAAGILRPVHSPWNTPLLPVRKSGTSEYRMVQDLREVNKRVETIHPTVPNPYTLLSLLPPDRIWYSVLDLKDAFFCIPLAPESQLIFAFEWADAEEGESGQLTWTRLPQGFKNSPTLFNEALNRDLQGFRLDHPSVSLLQYVDDLLIAADTQAACLSATRDLLMTLAELGYRVSGKKAQLCQEEVTYLGFKIHKGSRSLSNSRTQAILQIPVPKTKRQVREFLGTIGYCRLWIPGFAELAQPLYAATRPGNDPLVWGEKEEEAFQSLKLALTQPPALALPSLDKPFQLFVEETSGAAKGVLTQALGPWKRPVAYLSKRLDPVAAGWPRCLRAIAAAALLTREASKLTFGQDIEITSSHNLESLLRSPPDKWLTNARITQYQVLLLDPPRVRFKQTAALNPATLLPETDDTLPIHHCLDTLDSLTSTRPDLTDQPLAQAEATLFTDGSSYIRDGKRYAGAAVVTLDSVIWAEPLPIGTSAQKAELIALTKALEWSKDKSVNIYTDSRYAFATLHVHGMIYRERGWLTAGGKAIKNAPEILALLTAVWLPKRVAVMHCKGHQKDDAPTSTGNRRADEVAREVAIRPLSTQATISAGKRTADGSEFEKRTADGSEFESPKKKAKVE

SEQ ID NO: 7182 - protein, 2093 aa, synthetic construct
MPAAKRVKLDGGDKKYSIGLDIGTNSVGWAVITDEYKVPSKKFKVLGNTDRHSIKKNLIGALLFDSGETAEATRLKRTARRRYTRRKNRICYLQEIFSNEMAKVDDSFFHRLEESFLVEEDKKHERHPIFGNIVDEVAYHEKYPTIYHLRKKLVDSTDKADLRLIYLALAHMIKFRGHFLIEGDLNPDNSDVDKLFIQLVQTYNQLFEENPINASGVDAKAILSARLSKSRRLENLIAQLPGEKKNGLFGNLIALSLGLTPNFKSNFDLAEDAKLQLSKDTYDDDLDNLLAQIGDQYADLFLAAKNLSDAILLSDILRVNTEITKAPLSASMIKRYDEHHQDLTLLKALVRQQLPEKYKEIFFDQSKNGYAGYIDGGASQEEFYKFIKPILEKMDGTEELLVKLNREDLLRKQRTFDNGSIPHQIHLGELHAILRRQEDFYPFLKDNREKIEKILTFRIPYYVGPLARGNSRFAWMTRKSEETITPWNFEEVVDKGASAQSFIERMTNFDKNLPNEKVLPKHSLLYEYFTVYNELTKVKYVTEGMRKPAFLSGEQKKAIVDLLFKTNRKVTVKQLKEDYFKKIECFDSVEISGVEDRFNASLGTYHDLLKIIKDKDFLDNEENEDILEDIVLTLTLFEDREMIEERLKTYAHLFDDKVMKQLKRRRYTGWGRLSRKLINGIRDKQSGKTILDFLKSDGFANRNFMQLIHDDSLTFKEDIQKAQVSGQGDSLHEHIANLAGSPAIKKGILQTVKVVDELVKVMGRHKPENIVIEMARENQTTQKGQKNSRERMKRIEEGIKELGSQILKEHPVENTQLQNEKLYLYYLQNGRDMYVDQELDINRLSDYDVDHIVPQSFLKDDSIDNKVLTRSDKARGKSDNVPSEEVVKKMKNYWRQLLNAKLITQRKFDNLTKAERGGLSELDKAGFIKRQLVETRQITKHVAQILDSRMNTKYDENDKLIREVKVITLKSKLVSDFRKDFQFYKVREINNYHHAHDAYLNAVVGTALIKKYPKLESEFVYGDYKVYDVRKMIAKSEQEIGKATAKYFFYSNIMNFFKTEITLANGEIRKRPLIETNGETGEIVWDKGRDFATVRKVLSMPQVNIVKKTEVQTGGFSKESILPKRNSDKLIARKKDWDPKKYGGFDSPTVAYSVLVVAKVEKGKSKKLKSVKELLGITIMERSSFEKNPIDFLEAKGYKEVKKDLIIKLPKYSLFELENGRKRMLASAGELQKGNELALPSKYVNFLYLASHYEKLKGSPEDNEQKQLFVEQHKHYLDEIIEQISEFSKRVILADANLDKVLSAYNKHRDKPIREQAENIIHLFTLTNLGAPAAFKYFDTTIDRKRYTSTKEVLDATLIHQSITGLYETRIDLSQLGGDGGPAPGSSGGSGGTLQLEEEYRLFEPESTQKQEMDIWLKNFPQAWAETGGMGTAHCQAPVLIQLKATATPISIRQYPMPHEAYQGIKPHIRRMLDQGILKPCQSPWNTPLLPVKKPGTEDYRPVQDLREVNKRVEDIHPTVPNPYNLLSTLPPSHPWYTVLDLKDAFFCLRLHSESQLLFAFEWRDPEIGLSGQLTWTRLPQGFKNSPTLFNEALHSDLADFRVRYPALVLLQYVDDLLLAAATRTECLEGTKALLETLGNKGYRASAKKAQICLQEVTYLGYSLKDGQRWLTKARKEAILSIPVPKNSRQVREFLGTAGYCRLWIPGFAELAAPLYPLTRPGTLFQWGTEQQLAFEDIKKALLSSPALGLPDITKPFELFIDENSGFAKGVLVQKLGPWKRPVAYLSKKLDTVASGWPPCLRMVAAIAILVKDAGKLTLGQPLTILTSHPVEALVRQPPNKWLSNARMTHYQAMLLDAERVHFGPTVSLNPATLLPLPSGGNHHDCLQILAETHGTRPDLTDQPLPDADLTWYTDGSSFIRNGEREAGAAVTTESEVIWAAPLPPGTSAQRAELIALTQALKMAEGKKLTVYTDSRYAFATTHVHGEIYRRRGWLTSEGKEIKNKNEILALLEALFLPKRLSIIHCPGHQKGDSPQAKGNRLADDTAKKAATETHSSLTVLPAGKRTADGSEFEKRTADGSEFESPKKKAKVE

SEQ ID NO: 7183 - protein, 2216 aa, synthetic construct
MPAAKRVKLDGGDKKYSIGLDIGTNSVGWAVITDEYKVPSKKFKVLGNTDRHSIKKNLIGALLFDSGETAEATRLKRTARRRYTRRKNRICYLQEIFSNEMAKVDDSFFHRLEESFLVEEDKKHERHPIFGNIVDEVAYHEKYPTIYHLRKKLVDSTDKADLRLIYLALAHMIKFRGHFLIEGDLNPDNSDVDKLFIQLVQTYNQLFEENPINASGVDAKAILSARLSKSRRLENLIAQLPGEKKNGLFGNLIALSLGLTPNFKSNFDLAEDAKLQLSKDTYDDDLDNLLAQIGDQYADLFLAAKNLSDAILLSDILRVNTEITKAPLSASMIKRYDEHHQDLTLLKALVRQQLPEKYKEIFFDQSKNGYAGYIDGGASQEEFYKFIKPILEKMDGTEELLVKLNREDLLRKQRTFDNGSIPHQIHLGELHAILRRQEDFYPFLKDNREKIEKILTFRIPYYVGPLARGNSRFAWMTRKSEETITPWNFEEVVDKGASAQSFIERMTNFDKNLPNEKVLPKHSLLYEYFTVYNELTKVKYVTEGMRKPAFLSGEQKKAIVDLLFKTNRKVTVKQLKEDYFKKIECFDSVEISGVEDRFNASLGTYHDLLKIIKDKDFLDNEENEDILEDIVLTLTLFEDREMIEERLKTYAHLFDDKVMKQLKRRRYTGWGRLSRKLINGIRDKQSGKTILDFLKSDGFANRNFMQLIHDDSLTFKEDIQKAQVSGQGDSLHEHIANLAGSPAIKKGILQTVKVVDELVKVMGRHKPENIVIEMARENQTTQKGQKNSRERMKRIEEGIKELGSQILKEHPVENTQLQNEKLYLYYLQNGRDMYVDQELDINRLSDYDVDHIVPQSFLKDDSIDNKVLTRSDKARGKSDNVPSEEVVKKMKNYWRQLLNAKLITQRKFDNLTKAERGGLSELDKAGFIKRQLVETRQITKHVAQILDSRMNTKYDENDKLIREVKVITLKSKLVSDFRKDFQFYKVREINNYHHAHDAYLNAVVGTALIKKYPKLESEFVYGDYKVYDVRKMIAKSEQEIGKATAKYFFYSNIMNFFKTEITLANGEIRKRPLIETNGETGEIVWDKGRDFATVRKVLSMPQVNIVKKTEVQTGGFSKESILPKRNSDKLIARKKDWDPKKYGGFDSPTVAYSVLVVAKVEKGKSKKLKSVKELLGITIMERSSFEKNPIDFLEAKGYKEVKKDLIIKLPKYSLFELENGRKRMLASAGELQKGNELALPSKYVNFLYLASHYEKLKGSPEDNEQKQLFVEQHKHYLDEIIEQISEFSKRVILADANLDKVLSAYNKHRDKPIREQAENIIHLFTLTNLGAPAAFKYFDTTIDRKRYTSTKEVLDATLIHQSITGLYETRIDLSQLGGDGGPAPGSSGGSGGTLGDQGSRGSDPLPEPRVTLTVEGIPTEFLVNTGAEHSVLTKPMGKMGSKRTVVAGATGSKVYPWTTKRLLKIGQKQVTHSFLVIPECPAPLLGRDLLTKLKAQIQFSTEGPQVTWEDRPAMCLVLNLEEEYRLHEKPVPPSIDPSWLQLFPMVWAEKAGMGLANQVPPVVVELKSDASPVAVRQYPMSKEAREGIRPHIQRFLDLGILVPCQSPWNTPLLPVKKPGTNDYRPVQDLREVNKRVQDIHPTVPNPYNLLSSLPPSHTWYSVLDLKDAFFCLKLHPNSQPLFAFEWRDPEKGNTGQLTWTRLPQGFKNSPTLFDEALHRDLASFRALNPQVVMLQYVDDLLVAAPTYRDCKEGTRRLLQELSKLGYRVSAKKAQLCREEVTYLGYLLKGGKRWLTPARKATVMKIPTPTTPRQVREFLGTAGFCRLWIPGFASLAAPLYPLTREKVPFTWTEAHQEAFGRIKEALLSAPALALPDLTKPFALYVDEKEGVARGVLTQTLGPWRRPVAYLSKKLDPVASGWPTCLKAIAAVALLLKDADKLTLGQNVLVIAPHNLESIVRQPPDRWMTNARMTHYQSLLLNERVSFAPPAILNPATLLPVESDDTPIHICSEILAEETGTRPDLRDQPLPGVPAWYTDGSSFIMDGRRQAGAAIVDNKRTVWASNLPEGTSAQKAELIALTQALRLAEGKSINIYTDSRYAFATAHVHGAIYKQRGLLTSAGKDIKNKEEILALLEAIHLPKRVAIIHCPGHQRGTDPVATGNRKADEAAKQAAQSTRILTETTKNAGKRTADGSEFEKRTADGSEFESPKKKAKVE

SEQ ID NO: 7184 - protein, 2216 aa, synthetic construct
MPAAKRVKLDGGDKKYSIGLDIGTNSVGWAVITDEYKVPSKKFKVLGNTDRHSIKKNLIGALLFDSGETAEATRLKRTARRRYTRRKNRICYLQEIFSNEMAKVDDSFFHRLEESFLVEEDKKHERHPIFGNIVDEVAYHEKYPTIYHLRKKLVDSTDKADLRLIYLALAHMIKFRGHFLIEGDLNPDNSDVDKLFIQLVQTYNQLFEENPINASGVDAKAILSARLSKSRRLENLIAQLPGEKKNGLFGNLIALSLGLTPNFKSNFDLAEDAKLQLSKDTYDDDLDNLLAQIGDQYADLFLAAKNLSDAILLSDILRVNTEITKAPLSASMIKRYDEHHQDLTLLKALVRQQLPEKYKEIFFDQSKNGYAGYIDGGASQEEFYKFIKPILEKMDGTEELLVKLNREDLLRKQRTFDNGSIPHQIHLGELHAILRRQEDFYPFLKDNREKIEKILTFRIPYYVGPLARGNSRFAWMTRKSEETITPWNFEEVVDKGASAQSFIERMTNFDKNLPNEKVLPKHSLLYEYFTVYNELTKVKYVTEGMRKPAFLSGEQKKAIVDLLFKTNRKVTVKQLKEDYFKKIECFDSVEISGVEDRFNASLGTYHDLLKIIKDKDFLDNEENEDILEDIVLTLTLFEDREMIEERLKTYAHLFDDKVMKQLKRRRYTGWGRLSRKLINGIRDKQSGKTILDFLKSDGFANRNFMQLIHDDSLTFKEDIQKAQVSGQGDSLHEHIANLAGSPAIKKGILQTVKVVDELVKVMGRHKPENIVIEMARENQTTQKGQKNSRERMKRIEEGIKELGSQILKEHPVENTQLQNEKLYLYYLQNGRDMYVDQELDINRLSDYDVDHIVPQSFLKDDSIDNKVLTRSDKARGKSDNVPSEEVVKKMKNYWRQLLNAKLITQRKFDNLTKAERGGLSELDKAGFIKRQLVETRQITKHVAQILDSRMNTKYDENDKLIREVKVITLKSKLVSDFRKDFQFYKVREINNYHHAHDAYLNAVVGTALIKKYPKLESEFVYGDYKVYDVRKMIAKSEQEIGKATAKYFFYSNIMNFFKTEITLANGEIRKRPLIETNGETGEIVWDKGRDFATVRKVLSMPQVNIVKKTEVQTGGFSKESILPKRNSDKLIARKKDWDPKKYGGFDSPTVAYSVLVVAKVEKGKSKKLKSVKELLGITIMERSSFEKNPIDFLEAKGYKEVKKDLIIKLPKYSLFELENGRKRMLASAGELQKGNELALPSKYVNFLYLASHYEKLKGSPEDNEQKQLFVEQHKHYLDEIIEQISEFSKRVILADANLDKVLSAYNKHRDKPIREQAENIIHLFTLTNLGAPAAFKYFDTTIDRKRYTSTKEVLDATLIHQSITGLYETRIDLSQLGGDGGPAPGSSGGSGGTLGDQGSRGSDPLPEPRVTLTVEGIPTEFLVNTGAEHSVLTKPMGKMGSKRTVVAGATGSKVYPWTTKRLLKIGQKQVTHSFLVIPECPAPLLGRDLLTKLKAQIQFSTEGPQVTWEDRPAMCLVLNLEEEYRLHEKPVPPSIDPSWLQLFPMVWAEKAGMGLANQVPPVVVELKSDASPVAVRQYPMSKEAREGIRPHIQRFLDLGILVPCQSPWNTPLLPVKKPGTNDYRPVQDLREVNKRVQDIHPTVPNPYNLLSSLPPSHTWYSVLDLKDAFFCLKLHPNSQPLFAFEWRDPEKGNTGQLTWTRLPQGFKNSPTLFNEALHRDLASFRALNPQVVMLQYVDDLLVAAPTYRDCKEGTRRLLQELSKLGYRVSAKKAQLCREEVTYLGYLLKGGKRWLTPARKATVMKIPTPTTPRQVREFLGKAGFCRLFIPGFASLAAPLYPLTRPKVPFTWTEAHQEAFGRIKEALLSAPALALPDLTKPFALYVDEKEGVARGVLTQTLGPWRRPVAYLSKKLDPVASGWPTCLKAIAAVALLLKDADKLTLGQNVLVIAPHNLESIVRQPPDRWMTNARMTHYQSLLLNERVSFAPPAILNPATLLPVESDDTPIHICSEILAEETGTRPDLRDQPLPGVPAWYTDGSSFIMDGRRQAGAAIVDNKRTVWASNLPEGTSAQKAELIALTQALRLAEGKSINIYTDSRYAFATAHVHGAIYKQRGWLTSAGKDIKNKEEILALLEAIHLPKRVAIIHCPGHQRGTDPVATGNRKADEAAKQAAQSTRILTETTKNAGKRTADGSEFEKRTADGSEFESPKKKAKVE

SEQ ID NO: 7185 - protein, 2094 aa, synthetic construct
MPAAKRVKLDGGDKKYSIGLDIGTNSVGWAVITDEYKVPSKKFKVLGNTDRHSIKKNLIGALLFDSGETAEATRLKRTARRRYTRRKNRICYLQEIFSNEMAKVDDSFFHRLEESFLVEEDKKHERHPIFGNIVDEVAYHEKYPTIYHLRKKLVDSTDKADLRLIYLALAHMIKFRGHFLIEGDLNPDNSDVDKLFIQLVQTYNQLFEENPINASGVDAKAILSARLSKSRRLENLIAQLPGEKKNGLFGNLIALSLGLTPNFKSNFDLAEDAKLQLSKDTYDDDLDNLLAQIGDQYADLFLAAKNLSDAILLSDILRVNTEITKAPLSASMIKRYDEHHQDLTLLKALVRQQLPEKYKEIFFDQSKNGYAGYIDGGASQEEFYKFIKPILEKMDGTEELLVKLNREDLLRKQRTFDNGSIPHQIHLGELHAILRRQEDFYPFLKDNREKIEKILTFRIPYYVGPLARGNSRFAWMTRKSEETITPWNFEEVVDKGASAQSFIERMTNFDKNLPNEKVLPKHSLLYEYFTVYNELTKVKYVTEGMRKPAFLSGEQKKAIVDLLFKTNRKVTVKQLKEDYFKKIECFDSVEISGVEDRFNASLGTYHDLLKIIKDKDFLDNEENEDILEDIVLTLTLFEDREMIEERLKTYAHLFDDKVMKQLKRRRYTGWGRLSRKLINGIRDKQSGKTILDFLKSDGFANRNFMQLIHDDSLTFKEDIQKAQVSGQGDSLHEHIANLAGSPAIKKGILQTVKVVDELVKVMGRHKPENIVIEMARENQTTQKGQKNSRERMKRIEEGIKELGSQILKEHPVENTQLQNEKLYLYYLQNGRDMYVDQELDINRLSDYDVDHIVPQSFLKDDSIDNKVLTRSDKARGKSDNVPSEEVVKKMKNYWRQLLNAKLITQRKFDNLTKAERGGLSELDKAGFIKRQLVETRQITKHVAQILDSRMNTKYDENDKLIREVKVITLKSKLVSDFRKDFQFYKVREINNYHHAHDAYLNAVVGTALIKKYPKLESEFVYGDYKVYDVRKMIAKSEQEIGKATAKYFFYSNIMNFFKTEITLANGEIRKRPLIETNGETGEIVWDKGRDFATVRKVLSMPQVNIVKKTEVQTGGFSKESILPKRNSDKLIARKKDWDPKKYGGFDSPTVAYSVLVVAKVEKGKSKKLKSVKELLGITIMERSSFEKNPIDFLEAKGYKEVKKDLIIKLPKYSLFELENGRKRMLASAGELQKGNELALPSKYVNFLYLASHYEKLKGSPEDNEQKQLFVEQHKHYLDEIIEQISEFSKRVILADANLDKVLSAYNKHRDKPIREQAENIIHLFTLTNLGAPAAFKYFDTTIDRKRYTSTKEVLDATLIHQSITGLYETRIDLSQLGGDGGPAPGSSGGSGGLGIEDEYRLHETSTEPDVSLGSTWLSDFPQAWAETGGMGLAVRQAPLIIPLKATSTPVSIQQYPMSHEARLGIKPHIQRLLDQGILVPCQSPWNTPLLPVKKPGTNDYRPVQDLREVNKRVEDIHPTVPNPYNLLSGLPPSHQWYTVLDLKDAFFCLRLHPTSQPLFAFEWRDPGMGISGQLTWTRLPQGFKNSPTLFNEALHRDLADFRIQHPDLILLQYVDDILLAATSELDCQQGTRALLQTLGDLGYRASAKKAQICQKQVKYLGYLLREGQRWLTEARKETVMGQPVPKTPRQLREFLGKAGFCRLFIPGFAEMAAPLYPLTKPGTLFSWGPDQQKAYQEIKQALLTAPALGLPDLTKPFELFVDEKQGYAKGVLTQKLGPWRRPVAYLSKKLDPVAAGWPPCLRMVAAIAVLTKDAGKLTMGQPLVILAPHAVEALVKQPPDRWLSNARMTHYQAMLLDTDRVQFGPVVALNPATLLPLPEEGAPHDCLEILAETHGTRPDLTDQPIPDADHTWYTDGSSFLQEGQRKAGAAVTTETEVIWAGALPAGTSAQRAELIALTQALKMAEGKRLNVYTDSRYAFATAHIHGEIYRRRGWLTSEGREIKNKSEILALLKALFLPKRLSIIHCLGHQKGDSAEARGNRLADQAAREAAIKTPPDTSTLLIAGKRTADGSEFEKRTADGSEFESPKKKAKVE

SEQ ID NO: 7186 - protein, 2094 aa, synthetic construct; identical to SEQ ID NO: 7185

SEQ ID NO: 7187 - protein, 2088 aa, synthetic construct
MPAAKRVKLDGGDKKYSIGLDIGTNSVGWAVITDEYKVPSKKFKVLGNTDRHSIKKNLIGALLFDSGETAEATRLKRTARRRYTRRKNRICYLQEIFSNEMAKVDDSFFHRLEESFLVEEDKKHERHPIFGNIVDEVAYHEKYPTIYHLRKKLVDSTDKADLRLIYLALAHMIKFRGHFLIEGDLNPDNSDVDKLFIQLVQTYNQLFEENPINASGVDAKAILSARLSKSRRLENLIAQLPGEKKNGLFGNLIALSLGLTPNFKSNFDLAEDAKLQLSKDTYDDDLDNLLAQIGDQYADLFLAAKNLSDAILLSDILRVNTEITKAPLSASMIKRYDEHHQDLTLLKALVRQQLPEKYKEIFFDQSKNGYAGYIDGGASQEEFYKFIKPILEKMDGTEELLVKLNREDLLRKQRTFDNGSIPHQIHLGELHAILRRQEDFYPFLKDNREKIEKILTFRIPYYVGPLARGNSRFAWMTRKSEETITPWNFEEVVDKGASAQSFIERMTNFDKNLPNEKVLPKHSLLYEYFTVYNELTKVKYVTEGMRKPAFLSGEQKKAIVDLLFKTNRKVTVKQLKEDYFKKIECFDSVEISGVEDRFNASLGTYHDLLKIIKDKDFLDNEENEDILEDIVLTLTLFEDREMIEERLKTYAHLFDDKVMKQLKRRRYTGWGRLSRKLINGIRDKQSGKTILDFLKSDGFANRNFMQLIHDDSLTFKEDIQKAQVSGQGDSLHEHIANLAGSPAIKKGILQTVKVVDELVKVMGRHKPENIVIEMARENQTTQKGQKNSRERMKRIEEGIKELGSQILKEHPVENTQLQNEKLYLYYLQNGRDMYVDQELDINRLSDYDVDHIVPQSFLKDDSIDNKVLTRSDKARGKSDNVPSEEVVKKMKNYWRQLLNAKLITQRKFDNLTKAERGGLSELDKAGFIKRQLVETRQITKHVAQILDSRMNTKYDENDKLIREVKVITLKSKLVSDFRKDFQFYKVREINNYHHAHDAYLNAVVGTALIKKYPKLESEFVYGDYKVYDVRKMIAKSEQEIGKATAKYFFYSNIMNFFKTEITLANGEIRKRPLIETNGETGEIVWDKGRDFATVRKVLSMPQVNIVKKTEVQTGGFSKESILPKRNSDKLIARKKDWDPKKYGGFDSPTVAYSVLVVAKVEKGKSKKLKSVKELLGITIMERSSFEKNPIDFLEAKGYKEVKKDLIIKLPKYSLFELENGRKRMLASAGELQKGNELALPSKYVNFLYLASHYEKLKGSPEDNEQKQLFVEQHKHYLDEIIEQISEFSKRVILADANLDKVLSAYNKHRDKPIREQAENIIHLFTLTNLGAPAAFKYFDTTIDRKRYTSTKEVLDATLIHQSITGLYETRIDLSQLGGDGGPAPGSSGGSGGTLQLDDEYRLYSPLVKPDQNIQFWLEQFPQAWAETAGMGLAKQVPPQVIQLKASATPVSVRQYPLSKEAQEGIRPHVQRLIQQGILVPVQSPWNTPLLPVRKPGTNDYRPVQDLREVNKRVQDIHPTVPNPYNLLCALPPQRSWYTVLDLKDAFFCLRLHPTSQPLFAFEWRDPGTGRTGQLTWTRLPQGFKNSPTIFDEALHRDLANFRIQHPQVTLLQYVDDLLLAGATKQDCLEGTKALLLELSDLGYRASAKKAQICRREVTYLGYSLRDGQRWLTEARKKTVVQIPAPTTAKQVREFLGTAGFCRLWIPGFATLAAPLYPLTKEKGEFSWAPEHQKAFDAIKKALLSAPALALPDVTKPFTLYVDERKGVARGVLTQTLGPWRRPVAYLSKKLDPVASGWPVCLKAIAAVAILVKDADKLTLGQNITVIAPHALENIVRQPPDRWMTNARMTHYQSLLLTERVTFAPPAALNPATLLPEETDEPVTHDCHQLLIEETGVRKDLTDIPLTGEVLTWFTDGSSYVVEGKRMAGAAVVDGTRTIWASSLPEGTSAQKAELMALTQALRLAEGKSINIYTDSRYAFATAHVHGAIYKQRGLLTSAGREIKNKEEILSLLEALHLPKRLAIIHCPGHQKAKDPISRGNQMADRVAKQAAQGVNLLAGKRTADGSEFEKRTADGSEFESPKKKAKVE

SEQ ID NO: 7188 - protein, 2085 aa, synthetic construct
MPAAKRVKLDGGDKKYSIGLDIGTNSVGWAVITDEYKVPSKKFKVLGNTDRHSIKKNLIGALLFDSGETAEATRLKRTARRRYTRRKNRICYLQEIFSNEMAKVDDSFFHRLEESFLVEEDKKHERHPIFGNIVDEVAYHEKYPTIYHLRKKLVDSTDKADLRLIYLALAHMIKFRGHFLIEGDLNPDNSDVDKLFIQLVQTYNQLFEENPINASGVDAKAILSARLSKSRRLENLIAQLPGEKKNGLFGNLIALSLGLTPNFKSNFDLAEDAKLQLSKDTYDDDLDNLLAQIGDQYADLFLAAKNLSDAILLSDILRVNTEITKAPLSASMIKRYDEHHQDLTLLKALVRQQLPEKYKEIFFDQSKNGYAGYIDGGASQEEFYKFIKPILEKMDGTEELLVKLNREDLLRKQRTFDNGSIPHQIHLGELHAILRRQEDFYPFLKDNREKIEKILTFRIPYYVGPLARGNSRFAWMTRKSEETITPWNFEEVVDKGASAQSFIERMTNFDKNLPNEKVLPKHSLLYEYFTVYNELTKVKYVTEGMRKPAFLSGEQKKAIVDLLFKTNRKVTVKQLKEDYFKKIECFDSVEISGVEDRFNASLGTYHDLLKIIKDKDFLDNEENEDILEDIVLTLTLFEDREMIEERLKTYAHLFDDKVMKQLKRRRYTGWGRLSRKLINGIRDKQSGKTILDFLKSDGFANRNFMQLIHDDSLTFKEDIQKAQVSGQGDSLHEHIANLAGSPAIKKGILQTVKVVDELVKVMGRHKPENIVIEMARENQTTQKGQKNSRERMKRIEEGIKELGSQILKEHPVENTQLQNEKLYLYYLQNGRDMYVDQELDINRLSDYDVDHIVPQSFLKDDSIDNKVLTRSDKARGKSDNVPSEEVVKKMKNYWRQLLNAKLITQRKFDNLTKAERGGLSELDKAGFIKRQLVETRQITKHVAQILDSRMNTKYDENDKLIREVKVITLKSKLVSDFRKDFQFYKVREINNYHHAHDAYLNAVVGTALIKKYPKLESEFVYGDYKVYDVRKMIAKSEQEIGKATAKYFFYSNIMNFFKTEITLANGEIRKRPLIETNGETGEIVWDKGRDFATVRKVLSMPQVNIVKKTEVQTGGFSKESILPKRNSDKLIARKKDWDPKKYGGFDSPTVAYSVLVVAKVEKGKSKKLKSVKELLGITIMERSSFEKNPIDFLEAKGYKEVKKDLIIKLPKYSLFELENGRKRMLASAGELQKGNELALPSKYVNFLYLASHYEKLKGSPEDNEQKQLFVEQHKHYLDEIIEQISEFSKRVILADANLDKVLSAYNKHRDKPIREQAENIIHLFTLTNLGAPAAFKYFDTTIDRKRYTSTKEVLDATLIHQSITGLYETRIDLSQLGGDGGPAPGSSGGSGGIPWLMKKPLQLTTLVPLQEYEERLLKQTMLTGSYKEKLQSLFLKYDALWQHWENQVGHRRIKPHHIATGTVNPRPQKQYPINPKAKASIQTVINDLLKQGVLIQQNSIMNTPVYPVPKPDGKWRMVLDYREVNKTIPLIAAQNQHSAGILSSIFRGKYKTTLDLSNGFWAHSITPESYWLTAFTWLGQQYCWTRLPQGFLNSPALFNADVVDLLKEVPNVQVYVDDIYISHDDPREHLEQLEKVFSLLLNAGYVVSLKKSEIAQHEVEFLGFNITKEGRGLTETFKQKLLNITPPRDLKQLQSILGKLNFARNFIPNFSELVKPLYNIIATAPGKYITWTTDNSQQLQNIISMLNSAENLEERNPEVRLIMKVNTSPSAGYIRFYNEFAKRPIMYLNYVYTKAEVKFTNTEKLLTTIHKGLIKALDLGMGQEILVYSPIVSMTKIQKTPLPERKALPIRWITWMSYLEDPRIQFHYDKTLPELQQVPTVTDDIIAKIKHPSEFSMVFYTDGSAIKHPNVNKSHNAGMGIAQVQFKPEFTVINTWSIPLGDHTAQLAEVAAVEFACKKALKIDGPVLIVTDSFYVAESVNKELPYWQSNGFFNNKKKPLKHVSKWKSIADCIQLKPDIIIIHEKGHQPTASTFHTEGNNLADKLATQGSYVVNAGKRTADGSEFEKRTADGSEFESPKKKAKVE

SEQ ID NO: 7189 - protein, 2174 aa, synthetic construct
MPAAKRVKLDGGDKKYSIGLDIGTNSVGWAVITDEYKVPSKKFKVLGNTDRHSIKKNLIGALLFDSGETAEATRLKRTARRRYTRRKNRICYLQEIFSNEMAKVDDSFFHRLEESFLVEEDKKHERHPIFGNIVDEVAYHEKYPTIYHLRKKLVDSTDKADLRLIYLALAHMIKFRGHFLIEGDLNPDNSDVDKLFIQLVQTYNQLFEENPINASGVDAKAILSARLSKSRRLENLIAQLPGEKKNGLFGNLIALSLGLTPNFKSNFDLAEDAKLQLSKDTYDDDLDNLLAQIGDQYADLFLAAKNLSDAILLSDILRVNTEITKAPLSASMIKRYDEHHQDLTLLKALVRQQLPEKYKEIFFDQSKNGYAGYIDGGASQEEFYKFIKPILEKMDGTEELLVKLNREDLLRKQRTFDNGSIPHQIHLGELHAILRRQEDFYPFLKDNREKIEKILTFRIPYYVGPLARGNSRFAWMTRKSEETITPWNFEEVVDKGASAQSFIERMTNFDKNLPNEKVLPKHSLLYEYFTVYNELTKVKYVTEGMRKPAFLSGEQKKAIVDLLFKTNRKVTVKQLKEDYFKKIECFDSVEISGVEDRFNASLGTYHDLLKIIKDKDFLDNEENEDILEDIVLTLTLFEDREMIEERLKTYAHLFDDKVMKQLKRRRYTGWGRLSRKLINGIRDKQSGKTILDFLKSDGFANRNFMQLIHDDSLTFKEDIQKAQVSGQGDSLHEHIANLAGSPAIKKGILQTVKVVDELVKVMGRHKPENIVIEMARENQTTQKGQKNSRERMKRIEEGIKELGSQILKEHPVENTQLQNEKLYLYYLQNGRDMYVDQELDINRLSDYDVDHIVPQSFLKDDSIDNKVLTRSDKARGKSDNVPSEEVVKKMKNYWRQLLNAKLITQRKFDNLTKAERGGLSELDKAGFIKRQLVETRQITKHVAQILDSRMNTKYDENDKLIREVKVITLKSKLVSDFRKDFQFYKVREINNYHHAHDAYLNAVVGTALIKKYPKLESEFVYGDYKVYDVRKMIAKSEQEIGKATAKYFFYSNIMNFFKTEITLANGEIRKRPLIETNGETGEIVWDKGRDFATVRKVLSMPQVNIVKKTEVQTGGFSKESILPKRNSDKLIARKKDWDPKKYGGFDSPTVAYSVLVVAKVEKGKSKKLKSVKELLGITIMERSSFEKNPIDFLEAKGYKEVKKDLIIKLPKYSLFELENGRKRMLASAGELQKGNELALPSKYVNFLYLASHYEKLKGSPEDNEQKQLFVEQHKHYLDEIIEQISEFSKRVILADANLDKVLSAYNKHRDKPIREQAENIIHLFTLTNLGAPAAFKYFDTTIDRKRYTSTKEVLDATLIHQSITGLYETRIDLSQLGGDGGPAPGSSGGSGGMDPLQLLQPLEAEIKGTKLKAHWNSGATITCVPQAFLEEEVPIKNIWIKTIHGEKEQPVYYLTFKIQGRKVEAEVISSPYDYILVSPSDIPWLMKKPLQLTTLVPLQEYEERLLKQTMLTGSYKEKLQSLFLKYDALWQHWENQVGHRRIKPHHIATGTVNPRPQKQYPINPKAKASIQTVINDLLKQGVLIQQNSIMNTPVYPVPKPDGKWRMVLDYREVNKTIPLIAAQNQHSAGILSSIFRGKYKTTLDLSNGFWAHSITPESYWLTAFTWLGQQYCWTRLPQGFLNSPALFNADVVDLLKEVPNVQVYVDDIYISHDDPREHLEQLEKVFSLLLNAGYVVSLKKSEIAQHEVEFLGFNITKEGRGLTETFKQKLLNITPPRDLKQLQSILGLLNFARNFIPNFSELVKPLYNIIATAPGKYITWTTDNSQQLQNIISMLNSAENLEERNPEVRLIMKVNTSPSAGYIRFYNEFAKRPIMYLNYVYTKAEVKFTNTEKLLTTIHKGLIKALDLGMGQEILVYSPIVSMTKIQKTPLPERKALPIRWITWMSYLEDPRIQFHYDKTLPELQQVPTVTDDIIAKIKHPSEFSMVFYTDGSAIKHPNVNKSHNAGMGIAQVQFKPEFTVINTWSIPLGDHTAQLAEVAAVEFACKKALKIDGPVLIVTDSFYVAESVNKELPYWQSNGFFNNKKKPLKHVSKWKSIADCIQLKPDIIIIHEKGHQPTASTFHTEGNNLADKLATQGSYVVNAGKRTADGSEFEKRTADGSEFESPKKKAKVE

SEQ ID NO: 7190 - protein, 2174 aa, synthetic construct
MPAAKRVKLDGGDKKYSIGLDIGTNSVGWAVITDEYKVPSKKFKVLGNTDRHSIKKNLIGALLFDSGETAEATRLKRTARRRYTRRKNRICYLQEIFSNEMAKVDDSFFHRLEESFLVEEDKKHERHPIFGNIVDEVAYHEKYPTIYHLRKKLVDSTDKADLRLIYLALAHMIKFRGHFLIEGDLNPDNSDVDKLFIQLVQTYNQLFEENPINASGVDAKAILSARLSKSRRLENLIAQLPGEKKNGLFGNLIALSLGLTPNFKSNFDLAEDAKLQLSKDTYDDDLDNLLAQIGDQYADLFLAAKNLSDAILLSDILRVNTEITKAPLSASMIKRYDEHHQDLTLLKALVRQQLPEKYKEIFFDQSKNGYAGYIDGGASQEEFYKFIKPILEKMDGTEELLVKLNREDLLRKQRTFDNGSIPHQIHLGELHAILRRQEDFYPFLKDNREKIEKILTFRIPYYVGPLARGNSRFAWMTRKSEETITPWNFEEVVDKGASAQSFIERMTNFDKNLPNEKVLPKHSLLYEYFTVYNELTKVKYVTEGMRKPAFLSGEQKKAIVDLLFKTNRKVTVKQLKEDYFKKIECFDSVEISGVEDRFNASLGTYHDLLKIIKDKDFLDNEENEDILEDIVLTLTLFEDREMIEERLKTYAHLFDDKVMKQLKRRRYTGWGRLSRKLINGIRDKQSGKTILDFLKSDGFANRNFMQLIHDDSLTFKEDIQKAQVSGQGDSLHEHIANLAGSPAIKKGILQTVKVVDELVKVMGRHKPENIVIEMARENQTTQKGQKNSRERMKRIEEGIKELGSQILKEHPVENTQLQNEKLYLYYLQNGRDMYVDQELDINRLSDYDVDHIVPQSFLKDDSIDNKVLTRSDKARGKSDNVPSEEVVKKMKNYWRQLLNAKLITQRKFDNLTKAERGGLSELDKAGFIKRQLVETRQITKHVAQILDSRMNTKYDENDKLIREVKVITLKSKLVSDFRKDFQFYKVREINNYHHAHDAYLNAVVGTALIKKYPKLESEFVYGDYKVYDVRKMIAKSEQEIGKATAKYFFYSNIMNFFKTEITLANGEIRKRPLIETNGETGEIVWDKGRDFATVRKVLSMPQVNIVKKTEVQTGGFSKESILPKRNSDKLIARKKDWDPKKYGGFDSPTVAYSVLVVAKVEKGKSKKLKSVKELLGITIMERSSFEKNPIDFLEAKGYKEVKKDLIIKLPKYSLFELENGRKRMLASAGELQKGNELALPSKYVNFLYLASHYEKLKGSPEDNEQKQLFVEQHKHYLDEIIEQISEFSKRVILADANLDKVLSAYNKHRDKPIREQAENIIHLFTLTNLGAPAAFKYFDTTIDRKRYTSTKEVLDATLIHQSITGLYETRIDLSQLGGDGGPAPGSSGGSGGMNPLQLLQPLPAEVKGTKLLAHWNSGATITCIPESFLEDEQPIKQTLIKTIHGEKQQNVYYLTFKVKGRKVEAEVIASPYEYILLSPTDVPWLTQQPLQLTILVPLQEYQDRILNKTALPEEQKQQLKALFTKYDNLWQHWENQVGHRKIRPHNIATGDYPPRPQKQYPINPKAKPSIQIVIDDLLKQGVLTPQNSTMNTPVYPVPKPDGRWRMVLDYREVNKTIPLTAAQNQHSAGILATIVRQKYKTTLDLANGFWAHPITPDSYWLTAFTWQGKQYCWTRLPQGFLNSPALFTADAVDLLKEVPNVQVYVDDIYLSHDNPHEHIQQLEKVFQILLQAGYVVSLKKSEIGQRTVEFLGFNITKEGRGLTDTFKTKLLNVTPPKDLKQLQSILGLLNFARNFIPNFAELVQTLYNLIASSKGKYIEWTEDNTKQLNKVIEALNTASNLEERLPDQRLVIKVNTSPSAGYVRYYNESGKKPIMYLNYVFSKAELKFSMLEKLLTTMHKALIKAMDLAMGQEILVYSPIVSMTKIQKTPLPERKALPIRWITWMTYLEDPRIQFHYDKTLPELKHIPDVYTSSIPPLKHPSQYEGVFCTDGSAIKSPDPTKSNNAGMGIVHAIYNPEYKILNQWSIPLGHHTAQMAEIAAVEFACKKALKVPGPVLVITDSFYVAESANKELPYWKSNGFVNNKKEPLKHISKWKSIAECLSIKPDITIQHEKGHQPINTSIHTEGNALADKLATQGSYVVNAGKRTADGSEFEKRTADGSEFESPKKKAKVE

SEQ ID NO: 7191 - protein, 2092 aa, synthetic construct
MPAAKRVKLDGGDKKYSIGLDIGTNSVGWAVITDEYKVPSKKFKVLGNTDRHSIKKNLIGALLFDSGETAEATRLKRTARRRYTRRKNRICYLQEIFSNEMAKVDDSFFHRLEESFLVEEDKKHERHPIFGNIVDEVAYHEKYPTIYHLRKKLVDSTDKADLRLIYLALAHMIKFRGHFLIEGDLNPDNSDVDKLFIQLVQTYNQLFEENPINASGVDAKAILSARLSKSRRLENLIAQLPGEKKNGLFGNLIALSLGLTPNFKSNFDLAEDAKLQLSKDTYDDDLDNLLAQIGDQYADLFLAAKNLSDAILLSDILRVNTEITKAPLSASMIKRYDEHHQDLTLLKALVRQQLPEKYKEIFFDQSKNGYAGYIDGGASQEEFYKFIKPILEKMDGTEELLVKLNREDLLRKQRTFDNGSIPHQIHLGELHAILRRQEDFYPFLKDNREKIEKILTFRIPYYVGPLARGNSRFAWMTRKSEETITPWNFEEVVDKGASAQSFIERMTNFDKNLPNEKVLPKHSLLYEYFTVYNELTKVKYVTEGMRKPAFLSGEQKKAIVDLLFKTNRKVTVKQLKEDYFKKIECFDSVEISGVEDRFNASLGTYHDLLKIIKDKDFLDNEENEDILEDIVLTLTLFEDREMIEERLKTYAHLFDDKVMKQLKRRRYTGWGRLSRKLINGIRDKQSGKTILDFLKSDGFANRNFMQLIHDDSLTFKEDIQKAQVSGQGDSLHEHIANLAGSPAIKKGILQTVKVVDELVKVMGRHKPENIVIEMARENQTTQKGQKNSRERMKRIEEGIKELGSQILKEHPVENTQLQNEKLYLYYLQNGRDMYVDQELDINRLSDYDVDHIVPQSFLKDDSIDNKVLTRSDKARGKSDNVPSEEVVKKMKNYWRQLLNAKLITQRKFDNLTKAERGGLSELDKAGFIKRQLVETRQITKHVAQILDSRMNTKYDENDKLIREVKVITLKSKLVSDFRKDFQFYKVREINNYHHAHDAYLNAVVGTALIKKYPKLESEFVYGDYKVYDVRKMIAKSEQEIGKATAKYFFYSNIMNFFKTEITLANGEIRKRPLIETNGETGEIVWDKGRDFATVRKVLSMPQVNIVKKTEVQTGGFSKESILPKRNSDKLIARKKDWDPKKYGGFDSPTVAYSVLVVAKVEKGKSKKLKSVKELLGITIMERSSFEKNPIDFLEAKGYKEVKKDLIIKLPKYSLFELENGRKRMLASAGELQKGNELALPSKYVNFLYLASHYEKLKGSPEDNEQKQLFVEQHKHYLDEIIEQISEFSKRVILADANLDKVLSAYNKHRDKPIREQAENIIHLFTLTNLGAPAAFKYFDTTIDRKRYTSTKEVLDATLIHQSITGLYETRIDLSQLGGDGGPAPGSSGGSGGVLNLEEEYRLHEKPVPSSIDPSWLQLFPTVWAERAGMGLANQVPPVVVELRSGASPVAVRQYPMSKEAREGIRPHIQRFLDLGVLVPCQSPWNTPLLPVKKPGTNDYRPVQDLREINKRVQDIHPTVPNPYNLLSSLPPSHTWYSVLDLKDAFFCLKLHPNSQPLFAFEWRDPEKGNTGQLTWTRLPQGFKNSPTLFNEALHRDLAPFRALNPQVVLLQYVDDLLVAAPTYRDCKEGTQKLLQELSKLGYRVSAKKAQLCQKEVTYLGYLLKEGKRWLTPARKATVMKIPPPTTPRQVREFLGTAGFCRLWIPGFASLAAPLYPLTKPSIPFIWTEEHQKAFDRIKEALLSAPALALPDLTKPFTLYVDERAGVARGVLTQTLGPWRRPVAYLSKKLDPVASGWPTCLKAVAAVALLLKDADKLTLGQNVTVIASHSLESIVRQPPDRWMTNARMTHYQSLLLNERVSFAPPAVLNPATLLPVESEATPVHRCSEILAEETGTRRDLKDQPLPGVPAWYTDGSSFIAEGKRRAGAAIVDGKRTVWASSLPEGTSAQKAELVALTQALRLAEGKDINIYTDSRYAFATAHIHGAIYKQRGWLTSAGKDIKNKEEILALLEAIHLPKRVAIIHCPGHQKGNDPVATGNRRADEAAKQAALSTRVLAETTKPAGKRTADGSEFEKRTADGSEFESPKKKAKVE

SEQ ID NO: 7192 - protein, 2092 aa, synthetic construct
MPAAKRVKLDGGDKKYSIGLDIGTNSVGWAVITDEYKVPSKKFKVLGNTDRHSIKKNLIGALLFDSGETAEATRLKRTARRRYTRRKNRICYLQEIFSNEMAKVDDSFFHRLEESFLVEEDKKHERHPIFGNIVDEVAYHEKYPTIYHLRKKLVDSTDKADLRLIYLALAHMIKFRGHFLIEGDLNPDNSDVDKLFIQLVQTYNQLFEENPINASGVDAKAILSARLSKSRRLENLIAQLPGEKKNGLFGNLIALSLGLTPNFKSNFDLAEDAKLQLSKDTYDDDLDNLLAQIGDQYADLFLAAKNLSDAILLSDILRVNTEITKAPLSASMIKRYDEHHQDLTLLKALVRQQLPEKYKEIFFDQSKNGYAGYIDGGASQEEFYKFIKPILEKMDGTEELLVKLNREDLLRKQRTFDNGSIPHQIHLGELHAILRRQEDFYPFLKDNREKIEKILTFRIPYYVGPLARGNSRFAWMTRKSEETITPWNFEEVVDKGASAQSFIERMTNFDKNLPNEKVLPKHSLLYEYFTVYNELTKVKYVTEGMRKPAFLSGEQKKAIVDLLFKTNRKVTVKQLKEDYFKKIECFDSVEISGVEDRFNASLGTYHDLLKIIKDKDFLDNEENEDILEDIVLTLTLFEDREMIEERLKTYAHLFDDKVMKQLKRRRYTGWGRLSRKLINGIRDKQSGKTILDFLKSDGFANRNFMQLIHDDSLTFKEDIQKAQVSGQGDSLHEHIANLAGSPAIKKGILQTVKVVDELVKVMGRHKPENIVIEMARENQTTQKGQKNSRERMKRIEEGIKELGSQILKEHPVENTQLQNEKLYLYYLQNGRDMYVDQELDINRLSDYDVDHIVPQSFLKDDSIDNKVLTRSDKARGKSDNVPSEEVVKKMKNYWRQLLNAKLITQRKFDNLTKAERGGLSELDKAGFIKRQLVETRQITKHVAQILDSRMNTKYDENDKLIREVKVITLKSKLVSDFRKDFQFYKVREINNYHHAHDAYLNAVVGTALIKKYPKLESEFVYGDYKVYDVRKMIAKSEQEIGKATAKYFFYSNIMNFFKTEITLANGEIRKRPLIETNGETGEIVWDKGRDFATVRKVLSMPQVNIVKKTEVQTGGFSKESILPKRNSDKLIARKKDWDPKKYGGFDSPTVAYSVLVVAKVEKGKSKKLKSVKELLGITIMERSSFEKNPIDFLEAKGYKEVKKDLIIKLPKYSLFELENGRKRMLASAGELQKGNELALPSKYVNFLYLASHYEKLKGSPEDNEQKQLFVEQHKHYLDEIIEQISEFSKRVILADANLDKVLSAYNKHRDKPIREQAENIIHLFTLTNLGAPAAFKYFDTTIDRKRYTSTKEVLDATLIHQSITGLYETRIDLSQLGGDGGPAPGSSGGSGGVLNLEEEYRLHEKPVPSSIDPSWLQLFPTVWAERAGMGLANQVPPVVVELRSGASPVAVRQYPMSKEAREGIRPHIQRFLDLGVLVPCQSPWNTPLLPVKKPGTNDYRPVQDLREINKRVQDIHPTVPNPYNLLSSLPPSHTWYSVLDLKDAFFCLKLHPNSQPLFAFEWRDPEKGNTGQLTWTRLPQGFKNSPTLFNEALHRDLAPFRALNPQVVLLQYVDDLLVAAPTYRDCKEGTQKLLQELSKLGYRVSAKKAQLCQKEVTYLGYLLKEGKRWLTPARKATVMKIPPPTTPRQVREFLGKAGFCRLFIPGFASLAAPLYPLTKPSIPFIWTEEHQKAFDRIKEALLSAPALALPDLTKPFTLYVDERAGVARGVLTQTLGPWRRPVAYLSKKLDPVASGWPTCLKAVAAVALLLKDADKLTLGQNVTVIASHSLESIVRQPPDRWMTNARMTHYQSLLLNERVSFAPPAVLNPATLLPVESEATPVHRCSEILAEETGTRRDLKDQPLPGVPAWYTDGSSFIAEGKRRAGAAIVDGKRTVWASSLPEGTSAQKAELVALTQALRLAEGKDINIYTDSRYAFATAHIHGAIYKQRGWLTSAGKDIKNKEEILALLEAIHLPKRVAIIHCPGHQKGNDPVATGNRRADEAAKQAALSTRVLAETTKPAGKRTADGSEFEKRTADGSEFESPKKKAKVE

SEQ ID NO: 7193 - protein, 2095 aa, synthetic construct
MPAAKRVKLDGGDKKYSIGLDIGTNSVGWAVITDEYKVPSKKFKVLGNTDRHSIKKNLIGALLFDSGETAEATRLKRTARRRYTRRKNRICYLQEIFSNEMAKVDDSFFHRLEESFLVEEDKKHERHPIFGNIVDEVAYHEKYPTIYHLRKKLVDSTDKADLRLIYLALAHMIKFRGHFLIEGDLNPDNSDVDKLFIQLVQTYNQLFEENPINASGVDAKAILSARLSKSRRLENLIAQLPGEKKNGLFGNLIALSLGLTPNFKSNFDLAEDAKLQLSKDTYDDDLDNLLAQIGDQYADLFLAAKNLSDAILLSDILRVNTEITKAPLSASMIKRYDEHHQDLTLLKALVRQQLPEKYKEIFFDQSKNGYAGYIDGGASQEEFYKFIKPILEKMDGTEELLVKLNREDLLRKQRTFDNGSIPHQIHLGELHAILRRQEDFYPFLKDNREKIEKILTFRIPYYVGPLARGNSRFAWMTRKSEETITPWNFEEVVDKGASAQSFIERMTNFDKNLPNEKVLPKHSLLYEYFTVYNELTKVKYVTEGMRKPAFLSGEQKKAIVDLLFKTNRKVTVKQLKEDYFKKIECFDSVEISGVEDRFNASLGTYHDLLKIIKDKDFLDNEENEDILEDIVLTLTLFEDREMIEERLKTYAHLFDDKVMKQLKRRRYTGWGRLSRKLINGIRDKQSGKTILDFLKSDGFANRNFMQLIHDDSLTFKEDIQKAQVSGQGDSLHEHIANLAGSPAIKKGILQTVKVVDELVKVMGRHKPENIVIEMARENQTTQKGQKNSRERMKRIEEGIKELGSQILKEHPVENTQLQNEKLYLYYLQNGRDMYVDQELDINRLSDYDVDHIVPQSFLKDDSIDNKVLTRSDKARGKSDNVPSEEVVKKMKNYWRQLLNAKLITQRKFDNLTKAERGGLSELDKAGFIKRQLVETRQITKHVAQILDSRMNTKYDENDKLIREVKVITLKSKLVSDFRKDFQFYKVREINNYHHAHDAYLNAVVGTALIKKYPKLESEFVYGDYKVYDVRKMIAKSEQEIGKATAKYFFYSNIMNFFKTEITLANGEIRKRPLIETNGETGEIVWDKGRDFATVRKVLSMPQVNIVKKTEVQTGGFSKESILPKRNSDKLIARKKDWDPKKYGGFDSPTVAYSVLVVAKVEKGKSKKLKSVKELLGITIMERSSFEKNPIDFLEAKGYKEVKKDLIIKLPKYSLFELENGRKRMLASAGELQKGNELALPSKYVNFLYLASHYEKLKGSPEDNEQKQLFVEQHKHYLDEIIEQISEFSKRVILADANLDKVLSAYNKHRDKPIREQAENIIHLFTLTNLGAPAAFKYFDTTIDRKRYTSTKEVLDATLIHQSITGLYETRIDLSQLGGDGGGGSEAAAKPAPGGTLQLEEEYRLFEPESTQKQEMDIWLKNFPQAWAETGGMGTAHCQAPVLIQLKATATPISIRQYPMPHEAYQGIKPHIRRMLDQGILKPCQSPWNTPLLPVKKPGTEDYRPVQDLREVNKRVEDIHPTVPNPYNLLSTLPPSHPWYTVLDLKDAFFCLRLHSESQLLFAFEWRDPEIGLSGQLTWTRLPQGFKNSPTLFNEALHSDLADFRVRYPALVLLQYVDDLLLAAATRTECLEGTKALLETLGNKGYRASAKKAQICLQEVTYLGYSLKDGQRWLTKARKEAILSIPVPKNSRQVREFLGTAGYCRLWIPGFAELAAPLYPLTRPGTLFQWGTEQQLAFEDIKKALLSSPALGLPDITKPFELFIDENSGFAKGVLVQKLGPWKRPVAYLSKKLDTVASGWPPCLRMVAAIAILVKDAGKLTLGQPLTILTSHPVEALVRQPPNKWLSNARMTHYQAMLLDAERVHFGPTVSLNPATLLPLPSGGNHHDCLQILAETHGTRPDLTDQPLPDADLTWYTDGSSFIRNGEREAGAAVTTESEVIWAAPLPPGTSAQRAELIALTQALKMAEGKKLTVYTDSRYAFATTHVHGEIYRRRGWLTSEGKEIKNKNEILALLEALFLPKRLSIIHCPGHQKGDSPQAKGNRLADDTAKKAATETHSSLTVLPAGKRTADGSEFEKRTADGSEFESPKKKAKVE

SEQ ID NO: 7194 - protein, 2095 aa, synthetic construct
MPAAKRVKLDGGDKKYSIGLDIGTNSVGWAVITDEYKVPSKKFKVLGNTDRHSIKKNLIGALLFDSGETAEATRLKRTARRRYTRRKNRICYLQEIFSNEMAKVDDSFFHRLEESFLVEEDKKHERHPIFGNIVDEVAYHEKYPTIYHLRKKLVDSTDKADLRLIYLALAHMIKFRGHFLIEGDLNPDNSDVDKLFIQLVQTYNQLFEENPINASGVDAKAILSARLSKSRRLENLIAQLPGEKKNGLFGNLIALSLGLTPNFKSNFDLAEDAKLQLSKDTYDDDLDNLLAQIGDQYADLFLAAKNLSDAILLSDILRVNTEITKAPLSASMIKRYDEHHQDLTLLKALVRQQLPEKYKEIFFDQSKNGYAGYIDGGASQEEFYKFIKPILEKMDGTEELLVKLNREDLLRKQRTFDNGSIPHQIHLGELHAILRRQEDFYPFLKDNREKIEKILTFRIPYYVGPLARGNSRFAWMTRKSEETITPWNFEEVVDKGASAQSFIERMTNFDKNLPNEKVLPKHSLLYEYFTVYNELTKVKYVTEGMRKPAFLSGEQKKAIVDLLFKTNRKVTVKQLKEDYFKKIECFDSVEISGVEDRFNASLGTYHDLLKIIKDKDFLDNEENEDILEDIVLTLTLFEDREMIEERLKTYAHLFDDKVMKQLKRRRYTGWGRLSRKLINGIRDKQSGKTILDFLKSDGFANRNFMQLIHDDSLTFKEDIQKAQVSGQGDSLHEHIANLAGSPAIKKGILQTVKVVDELVKVMGRHKPENIVIEMARENQTTQKGQKNSRERMKRIEEGIKELGSQILKEHPVENTQLQNEKLYLYYLQNGRDMYVDQELDINRLSDYDVDHIVPQSFLKDDSIDNKVLTRSDKARGKSDNVPSEEVVKKMKNYWRQLLNAKLITQRKFDNLTKAERGGLSELDKAGFIKRQLVETRQITKHVAQILDSRMNTKYDENDKLIREVKVITLKSKLVSDFRKDFQFYKVREINNYHHAHDAYLNAVVGTALIKKYPKLESEFVYGDYKVYDVRKMIAKSEQEIGKATAKYFFYSNIMNFFKTEITLANGEIRKRPLIETNGETGEIVWDKGRDFATVRKVLSMPQVNIVKKTEVQTGGFSKESILPKRNSDKLIARKKDWDPKKYGGFDSPTVAYSVLVVAKVEKGKSKKLKSVKELLGITIMERSSFEKNPIDFLEAKGYKEVKKDLIIKLPKYSLFELENGRKRMLASAGELQKGNELALPSKYVNFLYLASHYEKLKGSPEDNEQKQLFVEQHKHYLDEIIEQISEFSKRVILADANLDKVLSAYNKHRDKPIREQAENIIHLFTLTNLGAPAAFKYFDTTIDRKRYTSTKEVLDATLIHQSITGLYETRIDLSQLGGDGGGGSEAAAKPAPGGTLQLEEEYRLFEPESTQKQEMDIWLKNFPQAWAETGGMGTAHCQAPVLIQLKATATPISIRQYPMPHEAYQGIKPHIRRMLDQGILKPCQSPWNTPLLPVKKPGTEDYRPVQDLREVNKRVEDIHPTVPNPYNLLSTLPPSHPWYTVLDLKDAFFCLRLHSESQLLFAFEWRDPEIGLSGQLTWTRLPQGFKNSPTLFNEALHSDLADFRVRYPALVLLQYVDDLLLAAATRTECLEGTKALLETLGNKGYRASAKKAQICLQEVTYLGYSLKDGQRWLTKARKEAILSIPVPKNSRQVREFLGKAGYCRLFIPGFAELAAPLYPLTRPGTLFQWGTEQQLAFEDIKKALLSSPALGLPDITKPFELFIDENSGFAKGVLVQKLGPWKRPVAYLSKKLDTVASGWPPCLRMVAAIAILVKDAGKLTLGQPLTILTSHPVEALVRQPPNKWLSNARMTHYQAMLLDAERVHFGPTVSLNPATLLPLPSGGNHHDCLQILAETHGTRPDLTDQPLPDADLTWYTDGSSFIRNGEREAGAAVTTESEVIWAAPLPPGTSAQRAELIALTQALKMAEGKKLTVYTDSRYAFATTHVHGEIYRRRGWLTSEGKEIKNKNEILALLEALFLPKRLSIIHCPGHQKGDSPQAKGNRLADDTAKKAATETHSSLTVLPAGKRTADGSEFEKRTADGSEFESPKKKAKVE

SEQ ID NO: 7195 - protein, 2176 aa, synthetic construct
MPAAKRVKLDGGDKKYSIGLDIGTNSVGWAVITDEYKVPSKKFKVLGNTDRHSIKKNLIGALLFDSGETAEATRLKRTARRRYTRRKNRICYLQEIFSNEMAKVDDSFFHRLEESFLVEEDKKHERHPIFGNIVDEVAYHEKYPTIYHLRKKLVDSTDKADLRLIYLALAHMIKFRGHFLIEGDLNPDNSDVDKLFIQLVQTYNQLFEENPINASGVDAKAILSARLSKSRRLENLIAQLPGEKKNGLFGNLIALSLGLTPNFKSNFDLAEDAKLQLSKDTYDDDLDNLLAQIGDQYADLFLAAKNLSDAILLSDILRVNTEITKAPLSASMIKRYDEHHQDLTLLKALVRQQLPEKYKEIFFDQSKNGYAGYIDGGASQEEFYKFIKPILEKMDGTEELLVKLNREDLLRKQRTFDNGSIPHQIHLGELHAILRRQEDFYPFLKDNREKIEKILTFRIPYYVGPLARGNSRFAWMTRKSEETITPWNFEEVVDKGASAQSFIERMTNFDKNLPNEKVLPKHSLLYEYFTVYNELTKVKYVTEGMRKPAFLSGEQKKAIVDLLFKTNRKVTVKQLKEDYFKKIECFDSVEISGVEDRFNASLGTYHDLLKIIKDKDFLDNEENEDILEDIVLTLTLFEDREMIEERLKTYAHLFDDKVMKQLKRRRYTGWGRLSRKLINGIRDKQSGKTILDFLKSDGFANRNFMQLIHDDSLTFKEDIQKAQVSGQGDSLHEHIANLAGSPAIKKGILQTVKVVDELVKVMGRHKPENIVIEMARENQTTQKGQKNSRERMKRIEEGIKELGSQILKEHPVENTQLQNEKLYLYYLQNGRDMYVDQELDINRLSDYDVDHIVPQSFLKDDSIDNKVLTRSDKARGKSDNVPSEEVVKKMKNYWRQLLNAKLITQRKFDNLTKAERGGLSELDKAGFIKRQLVETRQITKHVAQILDSRMNTKYDENDKLIREVKVITLKSKLVSDFRKDFQFYKVREINNYHHAHDAYLNAVVGTALIKKYPKLESEFVYGDYKVYDVRKMIAKSEQEIGKATAKYFFYSNIMNFFKTEITLANGEIRKRPLIETNGETGEIVWDKGRDFATVRKVLSMPQVNIVKKTEVQTGGFSKESILPKRNSDKLIARKKDWDPKKYGGFDSPTVAYSVLVVAKVEKGKSKKLKSVKELLGITIMERSSFEKNPIDFLEAKGYKEVKKDLIIKLPKYSLFELENGRKRMLASAGELQKGNELALPSKYVNFLYLASHYEKLKGSPEDNEQKQLFVEQHKHYLDEIIEQISEFSKRVILADANLDKVLSAYNKHRDKPIREQAENIIHLFTLTNLGAPAAFKYFDTTIDRKRYTSTKEVLDATLIHQSITGLYETRIDLSQLGGDGGGGSEAAAKPAPGGMNPLQLLQPLPAEIKGTKLLAHWNSGATITCIPESFLEDEQPIKKTLIKTIHGEKQQNVYYVTFKVKGRKVEAEVIASPYEYILLSPTDVPWLTQQPLQLTILVPLQEYQEKILSKTALPEDQKQQLKTLFVKYDNLWQHWENQVGHRKIRPHNIATGDYPPRPQKQYPINPKAKPSIQIVIDDLLKQGVLTPQNSTMNTPVYPVPKPDGRWRMVLDYREVNKTIPLTAAQNQHSAGILATIVRQKYKTTLDLANGFWAHPITPESYWLTAFTWQGKQYCWTRLPQGFLNSPALFNADVVDLLKEIPNVQVYVDDIYLSHDDPKEHVQQLEKVFQILLQAGYVVSLKKSEIGQKTVEFLGFNITKEGRGLTDTFKTKLLNITPPKDLKQLQSILGKLNFARNFIPNFAELVQPLYNLIAPAKGKYIEWSEENTKQLNMVIEALNTASNLEERLPEQRLVIKVNTSPSAGYVRYYNETGKKPIMYLNYVFSKAELKFSMLEKLLTTMHKALIKAMDLAMGQEILVYSPIVSMTKIQKTPLPERKALPIRWITWMTYLEDPRIQFHYDKTLPELKHIPDVYTSSQSPVKHPSQYEGVFYTDGSAIKSPDPTKSNNAGMGIVHATYKPEYQVLNQWSIPLGNHTAQMAEIAAVEFACKKALKIPGPVLVITDSFYVAESANKELPYWKSNGFVNNKKKPLKHISKWKSIAECLSMKPDITIQHEKGISLQIPVFILKGNALADKLATQGSYVVNAGKRTADGSEFEKRTADGSEFESPKKKAKVE

SEQ ID NO: 7196 - protein, 2218 aa, synthetic construct
MPAAKRVKLDGGDKKYSIGLDIGTNSVGWAVITDEYKVPSKKFKVLGNTDRHSIKKNLIGALLFDSGETAEATRLKRTARRRYTRRKNRICYLQEIFSNEMAKVDDSFFHRLEESFLVEEDKKHERHPIFGNIVDEVAYHEKYPTIYHLRKKLVDSTDKADLRLIYLALAHMIKFRGHFLIEGDLNPDNSDVDKLFIQLVQTYNQLFEENPINASGVDAKAILSARLSKSRRLENLIAQLPGEKKNGLFGNLIALSLGLTPNFKSNFDLAEDAKLQLSKDTYDDDLDNLLAQIGDQYADLFLAAKNLSDAILLSDILRVNTEITKAPLSASMIKRYDEHHQDLTLLKALVRQQLPEKYKEIFFDQSKNGYAGYIDGGASQEEFYKFIKPILEKMDGTEELLVKLNREDLLRKQRTFDNGSIPHQIHLGELHAILRRQEDFYPFLKDNREKIEKILTFRIPYYVGPLARGNSRFAWMTRKSEETITPWNFEEVVDKGASAQSFIERMTNFDKNLPNEKVLPKHSLLYEYFTVYNELTKVKYVTEGMRKPAFLSGEQKKAIVDLLFKTNRKVTVKQLKEDYFKKIECFDSVEISGVEDRFNASLGTYHDLLKIIKDKDFLDNEENEDILEDIVLTLTLFEDREMIEERLKTYAHLFDDKVMKQLKRRRYTGWGRLSRKLINGIRDKQSGKTILDFLKSDGFANRNFMQLIHDDSLTFKEDIQKAQVSGQGDSLHEHIANLAGSPAIKKGILQTVKVVDELVKVMGRHKPENIVIEMARENQTTQKGQKNSRERMKRIEEGIKELGSQILKEHPVENTQLQNEKLYLYYLQNGRDMYVDQELDINRLSDYDVDHIVPQSFLKDDSIDNKVLTRSDKARGKSDNVPSEEVVKKMKNYWRQLLNAKLITQRKFDNLTKAERGGLSELDKAGFIKRQLVETRQITKHVAQILDSRMNTKYDENDKLIREVKVITLKSKLVSDFRKDFQFYKVREINNYHHAHDAYLNAVVGTALIKKYPKLESEFVYGDYKVYDVRKMIAKSEQEIGKATAKYFFYSNIMNFFKTEITLANGEIRKRPLIETNGETGEIVWDKGRDFATVRKVLSMPQVNIVKKTEVQTGGFSKESILPKRNSDKLIARKKDWDPKKYGGFDSPTVAYSVLVVAKVEKGKSKKLKSVKELLGITIMERSSFEKNPIDFLEAKGYKEVKKDLIIKLPKYSLFELENGRKRMLASAGELQKGNELALPSKYVNFLYLASHYEKLKGSPEDNEQKQLFVEQHKHYLDEIIEQISEFSKRVILADANLDKVLSAYNKHRDKPIREQAENIIHLFTLTNLGAPAAFKYFDTTIDRKRYTSTKEVLDATLIHQSITGLYETRIDLSQLGGDGGGGSEAAAKPAPGGTLGDQGSRGSDPLPEPRVTLTVEGIPTEFLVNTGAEHSVLTKPMGKMGSKRTVVAGATGSKVYPWTTKRLLKIGQKQVTHSFLVIPECPAPLLGRDLLTKLKAQIQFSTEGPQVTWEDRPAMCLVLNLEEEYRLHEKPVPPSIDPSWLQLFPMVWAEKAGMGLANQVPPVVVELKSDASPVAVRQYPMSKEAREGIRPHIQRFLDLGILVPCQSPWNTPLLPVKKPGTNDYRPVQDLREVNKRVQDIHPTVPNPYNLLSSLPPSHTWYSVLDLKDAFFCLKLHPNSQPLFAFEWRDPEKGNTGQLTWTRLPQGFKNSPTLFNEALHRDLASFRALNPQVVMLQYVDDLLVAAPTYRDCKEGTRRLLQELSKLGYRVSAKKAQLCREEVTYLGYLLKGGKRWLTPARKATVMKIPTPTTPRQVREFLGTAGFCRLWIPGFASLAAPLYPLTRPKVPFTWTEAHQEAFGRIKEALLSAPALALPDLTKPFALYVDEKEGVARGVLTQTLGPWRRPVAYLSKKLDPVASGWPTCLKAIAAVALLLKDADKLTLGQNVLVIAPHNLESIVRQPPDRWMTNARMTHYQSLLLNERVSFAPPAILNPATLLPVESDDTPIHICSEILAEETGTRPDLRDQPLPGVPAWYTDGSSFIMDGRRQAGAAIVDNKRTVWASNLPEGTSAQKAELIALTQALRLAEGKSINIYTDSRYAFATAHVHGAIYKQRGWLTSAGKDIKNKEEILALLEAIHLPKRVAIIHCPGHQRGTDPVATGNRKADEAAKQAAQSTRILTETTKNAGKRTADGSEFEKRTADGSEFESPKKKAKVE

SEQ ID NO: 7197 - protein, 2218 aa, synthetic construct
MPAAKRVKLDGGDKKYSIGLDIGTNSVGWAVITDEYKVPSKKFKVLGNTDRHSIKKNLIGALLFDSGETAEATRLKRTARRRYTRRKNRICYLQEIFSNEMAKVDDSFFHRLEESFLVEEDKKHERHPIFGNIVDEVAYHEKYPTIYHLRKKLVDSTDKADLRLIYLALAHMIKFRGHFLIEGDLNPDNSDVDKLFIQLVQTYNQLFEENPINASGVDAKAILSARLSKSRRLENLIAQLPGEKKNGLFGNLIALSLGLTPNFKSNFDLAEDAKLQLSKDTYDDDLDNLLAQIGDQYADLFLAAKNLSDAILLSDILRVNTEITKAPLSASMIKRYDEHHQDLTLLKALVRQQLPEKYKEIFFDQSKNGYAGYIDGGASQEEFYKFIKPILEKMDGTEELLVKLNREDLLRKQRTFDNGSIPHQIHLGELHAILRRQEDFYPFLKDNREKIEKILTFRIPYYVGPLARGNSRFAWMTRKSEETITPWNFEEVVDKGASAQSFIERMTNFDKNLPNEKVLPKHSLLYEYFTVYNELTKVKYVTEGMRKPAFLSGEQKKAIVDLLFKTNRKVTVKQLKEDYFKKIECFDSVEISGVEDRFNASLGTYHDLLKIIKDKDFLDNEENEDILEDIVLTLTLFEDREMIEERLKTYAHLFDDKVMKQLKRRRYTGWGRLSRKLINGIRDKQSGKTILDFLKSDGFANRNFMQLIHDDSLTFKEDIQKAQVSGQGDSLHEHIANLAGSPAIKKGILQTVKVVDELVKVMGRHKPENIVIEMARENQTTQKGQKNSRERMKRIEEGIKELGSQILKEHPVENTQLQNEKLYLYYLQNGRDMYVDQELDINRLSDYDVDHIVPQSFLKDDSIDNKVLTRSDKARGKSDNVPSEEVVKKMKNYWRQLLNAKLITQRKFDNLTKAERGGLSELDKAGFIKRQLVETRQITKHVAQILDSRMNTKYDENDKLIREVKVITLKSKLVSDFRKDFQFYKVREINNYHHAHDAYLNAVVGTALIKKYPKLESEFVYGDYKVYDVRKMIAKSEQEIGKATAKYFFYSNIMNFFKTEITLANGEIRKRPLIETNGETGEIVWDKGRDFATVRKVLSMPQVNIVKKTEVQTGGFSKESILPKRNSDKLIARKKDWDPKKYGGFDSPTVAYSVLVVAKVEKGKSKKLKSVKELLGITIMERSSFEKNPIDFLEAKGYKEVKKDLIIKLPKYSLFELENGRKRMLASAGELQKGNELALPSKYVNFLYLASHYEKLKGSPEDNEQKQLFVEQHKHYLDEIIEQISEFSKRVILADANLDKVLSAYNKHRDKPIREQAENIIHLFTLTNLGAPAAFKYFDTTIDRKRYTSTKEVLDATLIHQSITGLYETRIDLSQLGGDGGGGSEAAAKPAPGGTLGDQGSRGSDPLPEPRVTLTVEGIPTEFLVNTGAEHSVLTKPMGKMGSKRTVVAGATGSKVYPWTTKRLLKIGQKQVTHSFLVIPECPAPLLGRDLLTKLKAQIQFSTEGPQVTWEDRPAMCLVLNLEEEYRLHEKPVPPSIDPSWLQLFPMVWAEKAGMGLANQVPPVVVELKSDASPVAVRQYPMSKEAREGIRPHIQRFLDLGILVPCQSPWNTPLLPVKKPGTNDYRPVQDLREVNKRVQDIHPTVPNPYNLLSSLPPSHTWYSVLDLKDAFFCLKLHPNSQPLFAFEWRDPEKGNTGQLTWTRLPQGFKNSPTLFNEALHRDLASFRALNPQVVMLQYVDDLLVAAPTYRDCKEGTRRLLQELSKLGYRVSAKKAQLCREEVTYLGYLLKGGKRWLTPARKATVMKIPTPTTPRQVREFLGKAGFCRLFIPGFASLAAPLYPLTRPKVPFTWTEAHQEAFGRIKEALLSAPALALPDLTKPFALYVDEKEGVARGVLTQTLGPWRRPVAYLSKKLDPVASGWPTCLKAIAAVALLLKDADKLTLGQNVLVIAPHNLESIVRQPPDRWMTNARMTHYQSLLLNERVSFAPPAILNPATLLPVESDDTPIHICSEILAEETGTRPDLRDQPLPGVPAWYTDGSSFIMDGRRQAGAAIVDNKRTVWASNLPEGTSAQKAELIALTQALRLAEGKSINIYTDSRYAFATAHVHGAIYKQRGWLTSAGKDIKNKEEILALLEAIHLPKRVAIIHCPGHQRGTDPVATGNRKADEAAKQAAQSTRILTETTKNAGKRTADGSEFEKRTADGSEFESPKKKAKVE

SEQ ID NO: 7198 - protein, 2096 aa, synthetic construct
MPAAKRVKLDGGDKKYSIGLDIGTNSVGWAVITDEYKVPSKKFKVLGNTDRHSIKKNLIGALLFDSGETAEATRLKRTARRRYTRRKNRICYLQEIFSNEMAKVDDSFFHRLEESFLVEEDKKHERHPIFGNIVDEVAYHEKYPTIYHLRKKLVDSTDKADLRLIYLALAHMIKFRGHFLIEGDLNPDNSDVDKLFIQLVQTYNQLFEENPINASGVDAKAILSARLSKSRRLENLIAQLPGEKKNGLFGNLIALSLGLTPNFKSNFDLAEDAKLQLSKDTYDDDLDNLLAQIGDQYADLFLAAKNLSDAILLSDILRVNTEITKAPLSASMIKRYDEHHQDLTLLKALVRQQLPEKYKEIFFDQSKNGYAGYIDGGASQEEFYKFIKPILEKMDGTEELLVKLNREDLLRKQRTFDNGSIPHQIHLGELHAILRRQEDFYPFLKDNREKIEKILTFRIPYYVGPLARGNSRFAWMTRKSEETITPWNFEEVVDKGASAQSFIERMTNFDKNLPNEKVLPKHSLLYEYFTVYNELTKVKYVTEGMRKPAFLSGEQKKAIVDLLFKTNRKVTVKQLKEDYFKKIECFDSVEISGVEDRFNASLGTYHDLLKIIKDKDFLDNEENEDILEDIVLTLTLFEDREMIEERLKTYAHLFDDKVMKQLKRRRYTGWGRLSRKLINGIRDKQSGKTILDFLKSDGFANRNFMQLIHDDSLTFKEDIQKAQVSGQGDSLHEHIANLAGSPAIKKGILQTVKVVDELVKVMGRHKPENIVIEMARENQTTQKGQKNSRERMKRIEEGIKELGSQILKEHPVENTQLQNEKLYLYYLQNGRDMYVDQELDINRLSDYDVDHIVPQSFLKDDSIDNKVLTRSDKARGKSDNVPSEEVVKKMKNYWRQLLNAKLITQRKFDNLTKAERGGLSELDKAGFIKRQLVETRQITKHVAQILDSRMNTKYDENDKLIREVKVITLKSKLVSDFRKDFQFYKVREINNYHHAHDAYLNAVVGTALIKKYPKLESEFVYGDYKVYDVRKMIAKSEQEIGKATAKYFFYSNIMNFFKTEITLANGEIRKRPLIETNGETGEIVWDKGRDFATVRKVLSMPQVNIVKKTEVQTGGFSKESILPKRNSDKLIARKKDWDPKKYGGFDSPTVAYSVLVVAKVEKGKSKKLKSVKELLGITIMERSSFEKNPIDFLEAKGYKEVKKDLIIKLPKYSLFELENGRKRMLASAGELQKGNELALPSKYVNFLYLASHYEKLKGSPEDNEQKQLFVEQHKHYLDEIIEQISEFSKRVILADANLDKVLSAYNKHRDKPIREQAENIIHLFTLTNLGAPAAFKYFDTTIDRKRYTSTKEVLDATLIHQSITGLYETRIDLSQLGGDGGGGSEAAAKPAPGGTLNLEDEYRLYETSAEPEVSPGSTWLSDFPQAWAETGGMGLAVRQAPLIIPLKATSTPVSIKQYPMSQEAKLGIKPHIQRLLDQGILVPCQSPWNTPLLPVKKPGTNDYRPVQDLREVNKRVEDIHPTVPNPYNLLSGLPPSHRWYTVLDLKDAFFCLRLHPTSQPLFAFEWRDPGMGISGQLTWTRLPQGFKNSPTLFNEALHRDLADFRIQHPDLILLQYVDDILLAATSELDCQQGTRALLLTLGNLGYRASAKKAQLCQKQVKYLGYLLKEGQRWLTEARKETVMGQPTPKTPRQLREFLGKAGFCRLFIPGFAEMAAPLYPLTKPGTLFNWGPDQQKAYQEIKQALLTAPALGLPDLTKPFELFVDEKQGYAKGVLTQKLGPWRRPVAYLSKKLDPVAAGWPPCLRMVAAIAVLRKDAGKLTMGQPLVILAPHAVEALVKQPPDRWLSNARMTHYQAMLLDTDRVQFGPVVALNPATLLPLPEEGAPHDCLEILAETHGTRPDLTDQPIPDADHTWYTDGSSFLQEGQRKAGAAVTTETEVIWARALPAGTSAQRAELIALTQALKMAEGKRLNVYTDSRYAFATAHIHGEIYRRRGWLTSEGREIKNKSEILALLKALFLPKRLSIIHCLGHQKGDSAEARGNRLADQAAREAAIKTPPDTSTLLAGKRTADGSEFEKRTADGSEFESPKKKAKVE

SEQ ID NO: 7199 - protein, 2096 aa, synthetic construct
MPAAKRVKLDGGDKKYSIGLDIGTNSVGWAVITDEYKVPSKKFKVLGNTDRHSIKKNLIGALLFDSGETAEATRLKRTARRRYTRRKNRICYLQEIFSNEMAKVDDSFFHRLEESFLVEEDKKHERHPIFGNIVDEVAYHEKYPTIYHLRKKLVDSTDKADLRLIYLALAHMIKFRGHFLIEGDLNPDNSDVDKLFIQLVQTYNQLFEENPINASGVDAKAILSARLSKSRRLENLIAQLPGEKKNGLFGNLIALSLGLTPNFKSNFDLAEDAKLQLSKDTYDDDLDNLLAQIGDQYADLFLAAKNLSDAILLSDILRVNTEITKAPLSASMIKRYDEHHQDLTLLKALVRQQLPEKYKEIFFDQSKNGYAGYIDGGASQEEFYKFIKPILEKMDGTEELLVKLNREDLLRKQRTFDNGSIPHQIHLGELHAILRRQEDFYPFLKDNREKIEKILTFRIPYYVGPLARGNSRFAWMTRKSEETITPWNFEEVVDKGASAQSFIERMTNFDKNLPNEKVLPKHSLLYEYFTVYNELTKVKYVTEGMRKPAFLSGEQKKAIVDLLFKTNRKVTVKQLKEDYFKKIECFDSVEISGVEDRFNASLGTYHDLLKIIKDKDFLDNEENEDILEDIVLTLTLFEDREMIEERLKTYAHLFDDKVMKQLKRRRYTGWGRLSRKLINGIRDKQSGKTILDFLKSDGFANRNFMQLIHDDSLTFKEDIQKAQVSGQGDSLHEHIANLAGSPAIKKGILQTVKVVDELVKVMGRHKPENIVIEMARENQTTQKGQKNSRERMKRIEEGIKELGSQILKEHPVENTQLQNEKLYLYYLQNGRDMYVDQELDINRLSDYDVDHIVPQSFLKDDSIDNKVLTRSDKARGKSDNVPSEEVVKKMKNYWRQLLNAKLITQRKFDNLTKAERGGLSELDKAGFIKRQLVETRQITKHVAQILDSRMNTKYDENDKLIREVKVITLKSKLVSDFRKDFQFYKVREINNYHHAHDAYLNAVVGTALIKKYPKLESEFVYGDYKVYDVRKMIAKSEQEIGKATAKYFFYSNIMNFFKTEITLANGEIRKRPLIETNGETGEIVWDKGRDFATVRKVLSMPQVNIVKKTEVQTGGFSKESILPKRNSDKLIARKKDWDPKKYGGFDSPTVAYSVLVVAKVEKGKSKKLKSVKELLGITIMERSSFEKNPIDFLEAKGYKEVKKDLIIKLPKYSLFELENGRKRMLASAGELQKGNELALPSKYVNFLYLASHYEKLKGSPEDNEQKQLFVEQHKHYLDEIIEQISEFSKRVILADANLDKVLSAYNKHRDKPIREQAENIIHLFTLTNLGAPAAFKYFDTTIDRKRYTSTKEVLDATLIHQSITGLYETRIDLSQLGGDGGGGSEAAAKPAPGGTLNIEDEYRLHETSKGPDVPLGSTWLSDFPQAWAETGGMGLAFRQAPLIISLKATSTPVSIKQYPMSQEARLGIKPHIQRLLDQGILVPCQSPWNTPLLPVKKPGTNDYRPVQDLREVNKRVEDIHPTVPNPYNLLSGLPPSHQWYTVLDLKDAFFCLRLHPTSQSLFAFEWKDPEMGISGQLTWTRLPQGFKNSPTLFNEALHRDLADFRIQHPDLILLQYVDDLLLAATSELDCQQGTRALLQTLGDLGYRASAKKAQICQKQVKYLGYLLKEGQRWLTEARKETVMGQPTPKTPRQLREFLGKAGLCRLFIPGFAEMAAPLYPLTKPGTLFKWGPDQQKAYQEIKQALLTAPALGLPDLTKPFELFVDEKQGYAKGVLTQKLGPWRRPVAYLSKKLDPVAAGWPPCLRMVAAIAVLTKDVGKLTMGQPLVILAPHAVEALVKQPPDRWLSNARMTHYQALLLDTDRVQFGPIVALNPATLLPLPEEGLQHDCLDILAEAHGTRPDLTDQPLPDADHTWYTDGSSFLQEGQRRAGAAVTTETEVIWAKALPAGTSAQRAELIALTQALKMAAGKKLNVYTDSRYAFATAHIHGEIYRRRGWLTSEGKEIKNKDEILALLKALFLPKRLSIIHCPGHQKGNHAEARGNRMADQAAREVATRETPETSTLLAGKRTADGSEFEKRTADGSEFESPKKKAKVE

SEQ ID NO: 7200 - protein, 2096 aa, synthetic construct
MPAAKRVKLDGGDKKYSIGLDIGTNSVGWAVITDEYKVPSKKFKVLGNTDRHSIKKNLIGALLFDSGETAEATRLKRTARRRYTRRKNRICYLQEIFSNEMAKVDDSFFHRLEESFLVEEDKKHERHPIFGNIVDEVAYHEKYPTIYHLRKKLVDSTDKADLRLIYLALAHMIKFRGHFLIEGDLNPDNSDVDKLFIQLVQTYNQLFEENPINASGVDAKAILSARLSKSRRLENLIAQLPGEKKNGLFGNLIALSLGLTPNFKSNFDLAEDAKLQLSKDTYDDDLDNLLAQIGDQYADLFLAAKNLSDAILLSDILRVNTEITKAPLSASMIKRYDEHHQDLTLLKALVRQQLPEKYKEIFFDQSKNGYAGYIDGGASQEEFYKFIKPILEKMDGTEELLVKLNREDLLRKQRTFDNGSIPHQIHLGELHAILRRQEDFYPFLKDNREKIEKILTFRIPYYVGPLARGNSRFAWMTRKSEETITPWNFEEVVDKGASAQSFIERMTNFDKNLPNEKVLPKHSLLYEYFTVYNELTKVKYVTEGMRKPAFLSGEQKKAIVDLLFKTNRKVTVKQLKEDYFKKIECFDSVEISGVEDRFNASLGTYHDLLKIIKDKDFLDNEENEDILEDIVLTLTLFEDREMIEERLKTYAHLFDDKVMKQLKRRRYTGWGRLSRKLINGIRDKQSGKTILDFLKSDGFANRNFMQLIHDDSLTFKEDIQKAQVSGQGDSLHEHIANLAGSPAIKKGILQTVKVVDELVKVMGRHKPENIVIEMARENQTTQKGQKNSRERMKRIEEGIKELGSQILKEHPVENTQLQNEKLYLYYLQNGRDMYVDQELDINRLSDYDVDHIVPQSFLKDDSIDNKVLTRSDKARGKSDNVPSEEVVKKMKNYWRQLLNAKLITQRKFDNLTKAERGGLSELDKAGFIKRQLVETRQITKHVAQILDSRMNTKYDENDKLIREVKVITLKSKLVSDFRKDFQFYKVREINNYHHAHDAYLNAVVGTALIKKYPKLESEFVYGDYKVYDVRKMIAKSEQEIGKATAKYFFYSNIMNFFKTEITLANGEIRKRPLIETNGETGEIVWDKGRDFATVRKVLSMPQVNIVKKTEVQTGGFSKESILPKRNSDKLIARKKDWDPKKYGGFDSPTVAYSVLVVAKVEKGKSKKLKSVKELLGITIMERSSFEKNPIDFLEAKGYKEVKKDLIIKLPKYSLFELENGRKRMLASAGELQKGNELALPSKYVNFLYLASHYEKLKGSPEDNEQKQLFVEQHKHYLDEIIEQISEFSKRVILADANLDKVLSAYNKHRDKPIREQAENIIHLFTLTNLGAPAAFKYFDTTIDRKRYTSTKEVLDATLIHQSITGLYETRIDLSQLGGDGGGGSEAAAKPAPGGTLNIEDEHRLHETSKEPDVSLGSTWLSDFPQAWAETGGMGLAVRQAPLIIPLKATSTPVSIKQYPMSQEARLGIKPHIQRLLDQGILVPCQSPWNTPLLPVKKPGTNDYRPVQDLREVNKRVEDIHPTVPNPYNLLSGLPPSHQWYTVLDLKDAFFCLRLHPTSQPLFAFEWRDPEMGISGQLTWTRLPQGFKNSPTLFDEALHRDLADFRIQHPDLILLQYVDDLLLAATSELDCQQGTRALLQTLGNLGYRASAKKAQICQKQVKYLGYLLKEGQRWLTEARKETVMGQPTPKTPRQLREFLGTAGFCRLWIPGFAEMAAPLYPLTKTGTLFNWGPDQQKAYQEIKQALLTAPALGLPDLTKPFELFVDEKQGYAKGVLTQKLGPWRRPVAYLSKKLDPVAAGWPPCLRMVAAIAVLTKDAGKLTMGQPLVILAPHAVEALVKQPPDRWLSNARMTHYQALLLDTDRVQFGPVVALNPATLLPLPEEGLQHNCLDILAEAHGTRPDLTDQPLPDADHTWYTDGSSLLQEGQRKAGAAVTTETEVIWAKALPAGTSAQRAELIALTQALKMAEGKKLNVYTDSRYAFATAHIHGEIYRRRGLLTSEGKEIKNKDEILALLKALFLPKRLSIIHCPGHQKGHSAEARGNRMADQAARKAAITETPDTSTLLAGKRTADGSEFEKRTADGSEFESPKKKAKVE

SEQ ID NO: 7201 - protein, 2090 aa, synthetic construct
MPAAKRVKLDGGDKKYSIGLDIGTNSVGWAVITDEYKVPSKKFKVLGNTDRHSIKKNLIGALLFDSGETAEATRLKRTARRRYTRRKNRICYLQEIFSNEMAKVDDSFFHRLEESFLVEEDKKHERHPIFGNIVDEVAYHEKYPTIYHLRKKLVDSTDKADLRLIYLALAHMIKFRGHFLIEGDLNPDNSDVDKLFIQLVQTYNQLFEENPINASGVDAKAILSARLSKSRRLENLIAQLPGEKKNGLFGNLIALSLGLTPNFKSNFDLAEDAKLQLSKDTYDDDLDNLLAQIGDQYADLFLAAKNLSDAILLSDILRVNTEITKAPLSASMIKRYDEHHQDLTLLKALVRQQLPEKYKEIFFDQSKNGYAGYIDGGASQEEFYKFIKPILEKMDGTEELLVKLNREDLLRKQRTFDNGSIPHQIHLGELHAILRRQEDFYPFLKDNREKIEKILTFRIPYYVGPLARGNSRFAWMTRKSEETITPWNFEEVVDKGASAQSFIERMTNFDKNLPNEKVLPKHSLLYEYFTVYNELTKVKYVTEGMRKPAFLSGEQKKAIVDLLFKTNRKVTVKQLKEDYFKKIECFDSVEISGVEDRFNASLGTYHDLLKIIKDKDFLDNEENEDILEDIVLTLTLFEDREMIEERLKTYAHLFDDKVMKQLKRRRYTGWGRLSRKLINGIRDKQSGKTILDFLKSDGFANRNFMQLIHDDSLTFKEDIQKAQVSGQGDSLHEHIANLAGSPAIKKGILQTVKVVDELVKVMGRHKPENIVIEMARENQTTQKGQKNSRERMKRIEEGIKELGSQILKEHPVENTQLQNEKLYLYYLQNGRDMYVDQELDINRLSDYDVDHIVPQSFLKDDSIDNKVLTRSDKARGKSDNVPSEEVVKKMKNYWRQLLNAKLITQRKFDNLTKAERGGLSELDKAGFIKRQLVETRQITKHVAQILDSRMNTKYDENDKLIREVKVITLKSKLVSDFRKDFQFYKVREINNYHHAHDAYLNAVVGTALIKKYPKLESEFVYGDYKVYDVRKMIAKSEQEIGKATAKYFFYSNIMNFFKTEITLANGEIRKRPLIETNGETGEIVWDKGRDFATVRKVLSMPQVNIVKKTEVQTGGFSKESILPKRNSDKLIARKKDWDPKKYGGFDSPTVAYSVLVVAKVEKGKSKKLKSVKELLGITIMERSSFEKNPIDFLEAKGYKEVKKDLIIKLPKYSLFELENGRKRMLASAGELQKGNELALPSKYVNFLYLASHYEKLKGSPEDNEQKQLFVEQHKHYLDEIIEQISEFSKRVILADANLDKVLSAYNKHRDKPIREQAENIIHLFTLTNLGAPAAFKYFDTTIDRKRYTSTKEVLDATLIHQSITGLYETRIDLSQLGGDGGGGSEAAAKPAPGGTLQLDDEYRLYSPLVKPDQNIQFWLEQFPQAWAETAGMGLAKQVPPQVIQLKASATPVSVRQYPLSKEAQEGIRPHVQRLIQQGILVPVQSPWNTPLLPVRKPGTNDYRPVQDLREVNKRVQDIHPTVPNPYNLLCALPPQRSWYTVLDLKDAFFCLRLHPTSQPLFAFEWRDPGTGRTGQLTWTRLPQGFKNSPTIFDEALHRDLANFRIQHPQVTLLQYVDDLLLAGATKQDCLEGTKALLLELSDLGYRASAKKAQICRREVTYLGYSLRDGQRWLTEARKKTVVQIPAPTTAKQVREFLGTAGFCRLWIPGFATLAAPLYPLTKEKGEFSWAPEHQKAFDAIKKALLSAPALALPDVTKPFTLYVDERKGVARGVLTQTLGPWRRPVAYLSKKLDPVASGWPVCLKAIAAVAILVKDADKLTLGQNITVIAPHALENIVRQPPDRWMTNARMTHYQSLLLTERVTFAPPAALNPATLLPEETDEPVTHDCHQLLIEETGVRKDLTDIPLTGEVLTWFTDGSSYVVEGKRMAGAAVVDGTRTIWASSLPEGTSAQKAELMALTQALRLAEGKSINIYTDSRYAFATAHVHGAIYKQRGLLTSAGREIKNKEEILSLLEALHLPKRLAIIHCPGHQKAKDPISRGNQMADRVAKQAAQGVNLLAGKRTADGSEFEKRTADGSEFESPKKKAKVE

SEQ ID NO: 7202 - protein, 2096 aa, synthetic construct
MPAAKRVKLDGGDKKYSIGLDIGTNSVGWAVITDEYKVPSKKFKVLGNTDRHSIKKNLIGALLFDSGETAEATRLKRTARRRYTRRKNRICYLQEIFSNEMAKVDDSFFHRLEESFLVEEDKKHERHPIFGNIVDEVAYHEKYPTIYHLRKKLVDSTDKADLRLIYLALAHMIKFRGHFLIEGDLNPDNSDVDKLFIQLVQTYNQLFEENPINASGVDAKAILSARLSKSRRLENLIAQLPGEKKNGLFGNLIALSLGLTPNFKSNFDLAEDAKLQLSKDTYDDDLDNLLAQIGDQYADLFLAAKNLSDAILLSDILRVNTEITKAPLSASMIKRYDEHHQDLTLLKALVRQQLPEKYKEIFFDQSKNGYAGYIDGGASQEEFYKFIKPILEKMDGTEELLVKLNREDLLRKQRTFDNGSIPHQIHLGELHAILRRQEDFYPFLKDNREKIEKILTFRIPYYVGPLARGNSRFAWMTRKSEETITPWNFEEVVDKGASAQSFIERMTNFDKNLPNEKVLPKHSLLYEYFTVYNELTKVKYVTEGMRKPAFLSGEQKKAIVDLLFKTNRKVTVKQLKEDYFKKIECFDSVEISGVEDRFNASLGTYHDLLKIIKDKDFLDNEENEDILEDIVLTLTLFEDREMIEERLKTYAHLFDDKVMKQLKRRRYTGWGRLSRKLINGIRDKQSGKTILDFLKSDGFANRNFMQLIHDDSLTFKEDIQKAQVSGQGDSLHEHIANLAGSPAIKKGILQTVKVVDELVKVMGRHKPENIVIEMARENQTTQKGQKNSRERMKRIEEGIKELGSQILKEHPVENTQLQNEKLYLYYLQNGRDMYVDQELDINRLSDYDVDHIVPQSFLKDDSIDNKVLTRSDKARGKSDNVPSEEVVKKMKNYWRQLLNAKLITQRKFDNLTKAERGGLSELDKAGFIKRQLVETRQITKHVAQILDSRMNTKYDENDKLIREVKVITLKSKLVSDFRKDFQFYKVREINNYHHAHDAYLNAVVGTALIKKYPKLESEFVYGDYKVYDVRKMIAKSEQEIGKATAKYFFYSNIMNFFKTEITLANGEIRKRPLIETNGETGEIVWDKGRDFATVRKVLSMPQVNIVKKTEVQTGGFSKESILPKRNSDKLIARKKDWDPKKYGGFDSPTVAYSVLVVAKVEKGKSKKLKSVKELLGITIMERSSFEKNPIDFLEAKGYKEVKKDLIIKLPKYSLFELENGRKRMLASAGELQKGNELALPSKYVNFLYLASHYEKLKGSPEDNEQKQLFVEQHKHYLDEIIEQISEFSKRVILADANLDKVLSAYNKHRDKPIREQAENIIHLFTLTNLGAPAAFKYFDTTIDRKRYTSTKEVLDATLIHQSITGLYETRIDLSQLGGDGGGGSEAAAKPAPGGTLNIEDEYRLHETSKEPDVPLGSTWLSDFPQAWAETGGMGLAVRQAPLIIPLKATSTPVSIKQYPMSQEARLGIKPHIQRLLDQGILVPCQSPWNTPLLPVKKPGTNDYRPVQDLREVNKRVEDIHPTVPNPYNLLSGLPPSHQWYTVLDLKDAFFCLRLHPTSQPLFAFEWRDPEMGISGQLTWTRLPQGFKNSPTLFDEALHRDLADFRIQHPDLILLQYVDDLLLAATSEQDCQRGTRALLQTLGNLGYRASAKKAQICQKQVKYLGYLLKEGQRWLTEARKETVMGQPTPKTPRQLREFLGTAGFCRLWIPGFAEMAAPLYPLTKTGTLFNWGPDQQKAYQEIKQALLTAPALGLPDLTKPFELFVDEKQGYAKGVLTQKLGPWRRPVAYLSKKLDPVAAGWPPCLRMVAAIAVLTKDAGKLTMGQPLVILAPHAVEALVKQPPDRWLSNARMTHYQAMLLDTDRVQFGPVVALNPATLLPLPEKEAPHDCLEILAETHGTRPDLTDQPIPDADYTWYTDGSSFLQEGQRRAGAAVTTETEVIWARALPAGTSAQRAELIALTQALKMAEGKKLNVYTDSRYAFATAHVHGEIYRRRGLLTSEGREIKNKNEILALLKALFLPKRLSIIHCPGHQKGNSAEARGNRMADQAAREAAMKAVLETSTLLAGKRTADGSEFEKRTADGSEFESPKKKAKVE

SEQ ID NO: 7203 - protein, 2096 aa, synthetic construct
MPAAKRVKLDGGDKKYSIGLDIGTNSVGWAVITDEYKVPSKKFKVLGNTDRHSIKKNLIGALLFDSGETAEATRLKRTARRRYTRRKNRICYLQEIFSNEMAKVDDSFFHRLEESFLVEEDKKHERHPIFGNIVDEVAYHEKYPTIYHLRKKLVDSTDKADLRLIYLALAHMIKFRGHFLIEGDLNPDNSDVDKLFIQLVQTYNQLFEENPINASGVDAKAILSARLSKSRRLENLIAQLPGEKKNGLFGNLIALSLGLTPNFKSNFDLAEDAKLQLSKDTYDDDLDNLLAQIGDQYADLFLAAKNLSDAILLSDILRVNTEITKAPLSASMIKRYDEHHQDLTLLKALVRQQLPEKYKEIFFDQSKNGYAGYIDGGASQEEFYKFIKPILEKMDGTEELLVKLNREDLLRKQRTFDNGSIPHQIHLGELHAILRRQEDFYPFLKDNREKIEKILTFRIPYYVGPLARGNSRFAWMTRKSEETITPWNFEEVVDKGASAQSFIERMTNFDKNLPNEKVLPKHSLLYEYFTVYNELTKVKYVTEGMRKPAFLSGEQKKAIVDLLFKTNRKVTVKQLKEDYFKKIECFDSVEISGVEDRFNASLGTYHDLLKIIKDKDFLDNEENEDILEDIVLTLTLFEDREMIEERLKTYAHLFDDKVMKQLKRRRYTGWGRLSRKLINGIRDKQSGKTILDFLKSDGFANRNFMQLIHDDSLTFKEDIQKAQVSGQGDSLHEHIANLAGSPAIKKGILQTVKVVDELVKVMGRHKPENIVIEMARENQTTQKGQKNSRERMKRIEEGIKELGSQILKEHPVENTQLQNEKLYLYYLQNGRDMYVDQELDINRLSDYDVDHIVPQSFLKDDSIDNKVLTRSDKARGKSDNVPSEEVVKKMKNYWRQLLNAKLITQRKFDNLTKAERGGLSELDKAGFIKRQLVETRQITKHVAQILDSRMNTKYDENDKLIREVKVITLKSKLVSDFRKDFQFYKVREINNYHHAHDAYLNAVVGTALIKKYPKLESEFVYGDYKVYDVRKMIAKSEQEIGKATAKYFFYSNIMNFFKTEITLANGEIRKRPLIETNGETGEIVWDKGRDFATVRKVLSMPQVNIVKKTEVQTGGFSKESILPKRNSDKLIARKKDWDPKKYGGFDSPTVAYSVLVVAKVEKGKSKKLKSVKELLGITIMERSSFEKNPIDFLEAKGYKEVKKDLIIKLPKYSLFELENGRKRMLASAGELQKGNELALPSKYVNFLYLASHYEKLKGSPEDNEQKQLFVEQHKHYLDEIIEQISEFSKRVILADANLDKVLSAYNKHRDKPIREQAENIIHLFTLTNLGAPAAFKYFDTTIDRKRYTSTKEVLDATLIHQSITGLYETRIDLSQLGGDGGGGSEAAAKPAPGGTLNIEDEYRLHETSKEPDVPLGSTWLSDFPQAWAETGGMGLAVRQAPLIIPLKATSTPVSIKQYPMSQEARLGIKPHIQRLLDQGILVPCQSPWNTPLLPVKKPGTNDYRPVQDLREVNKRVEDIHPTVPNPYNLLSGLPPSHQWYTVLDLKDAFFCLRLHPTSQPLFAFEWRDPEMGISGQLTWTRLPQGFKNSPTLFNEALHRDLADFRIQHPDLILLQYVDDLLLAATSEQDCQRGTRALLQTLGNLGYRASAKKAQICQKQVKYLGYLLKEGQRWLTEARKETVMGQPTPKTPRQLREFLGTAGFCRLWIPGFAEMAAPLYPLTKPGTLFNWGPDQQKAYQEIKQALLTAPALGLPDLTKPFELFVDEKQGYAKGVLTQKLGPWRRPVAYLSKKLDPVAAGWPPCLRMVAAIAVLTKDAGKLTMGQPLVILAPHAVEALVKQPPDRWLSNARMTHYQAMLLDTDRVQFGPVVALNPATLLPLPEKEAPHDCLEILAETHGTRPDLTDQPIPDADYTWYTDGSSFLQEGQRRAGAAVTTETEVIWARALPAGTSAQRAELIALTQALKMAEGKKLNVYTDSRYAFATAHVHGEIYRRRGWLTSEGREIKNKNEILALLKALFLPKRLSIIHCPGHQKGNSAEARGNRMADQAAREAAMKAVLETSTLLAGKRTADGSEFEKRTADGSEFESPKKKAKVE

SEQ ID NO: 7204 - protein, 2098 aa, synthetic construct
MPAAKRVKLDGGDKKYSIGLDIGTNSVGWAVITDEYKVPSKKFKVLGNTDRHSIKKNLIGALLFDSGETAEATRLKRTARRRYTRRKNRICYLQEIFSNEMAKVDDSFFHRLEESFLVEEDKKHERHPIFGNIVDEVAYHEKYPTIYHLRKKLVDSTDKADLRLIYLALAHMIKFRGHFLIEGDLNPDNSDVDKLFIQLVQTYNQLFEENPINASGVDAKAILSARLSKSRRLENLIAQLPGEKKNGLFGNLIALSLGLTPNFKSNFDLAEDAKLQLSKDTYDDDLDNLLAQIGDQYADLFLAAKNLSDAILLSDILRVNTEITKAPLSASMIKRYDEHHQDLTLLKALVRQQLPEKYKEIFFDQSKNGYAGYIDGGASQEEFYKFIKPILEKMDGTEELLVKLNREDLLRKQRTFDNGSIPHQIHLGELHAILRRQEDFYPFLKDNREKIEKILTFRIPYYVGPLARGNSRFAWMTRKSEETITPWNFEEVVDKGASAQSFIERMTNFDKNLPNEKVLPKHSLLYEYFTVYNELTKVKYVTEGMRKPAFLSGEQKKAIVDLLFKTNRKVTVKQLKEDYFKKIECFDSVEISGVEDRFNASLGTYHDLLKIIKDKDFLDNEENEDILEDIVLTLTLFEDREMIEERLKTYAHLFDDKVMKQLKRRRYTGWGRLSRKLINGIRDKQSGKTILDFLKSDGFANRNFMQLIHDDSLTFKEDIQKAQVSGQGDSLHEHIANLAGSPAIKKGILQTVKVVDELVKVMGRHKPENIVIEMARENQTTQKGQKNSRERMKRIEEGIKELGSQILKEHPVENTQLQNEKLYLYYLQNGRDMYVDQELDINRLSDYDVDHIVPQSFLKDDSIDNKVLTRSDKARGKSDNVPSEEVVKKMKNYWRQLLNAKLITQRKFDNLTKAERGGLSELDKAGFIKRQLVETRQITKHVAQILDSRMNTKYDENDKLIREVKVITLKSKLVSDFRKDFQFYKVREINNYHHAHDAYLNAVVGTALIKKYPKLESEFVYGDYKVYDVRKMIAKSEQEIGKATAKYFFYSNIMNFFKTEITLANGEIRKRPLIETNGETGEIVWDKGRDFATVRKVLSMPQVNIVKKTEVQTGGFSKESILPKRNSDKLIARKKDWDPKKYGGFDSPTVAYSVLVVAKVEKGKSKKLKSVKELLGITIMERSSFEKNPIDFLEAKGYKEVKKDLIIKLPKYSLFELENGRKRMLASAGELQKGNELALPSKYVNFLYLASHYEKLKGSPEDNEQKQLFVEQHKHYLDEIIEQISEFSKRVILADANLDKVLSAYNKHRDKPIREQAENIIHLFTLTNLGAPAAFKYFDTTIDRKRYTSTKEVLDATLIHQSITGLYETRIDLSQLGGDGGGGSPAPEAAAKGGTAPLEEEYRLFLEAPIQNVTLLEQWKREIPKVWAEINPPGLASTQAPIHVQLLSTALPVRVRQYPITLEAKRSLRETIRKFRAAGILRPVHSPWNTPLLPVRKSGTSEYRMVQDLREVNKRVETIHPTVPNPYTLLSLLPPDRIWYSVLDLKDAFFCIPLAPESQLIFAFEWADAEEGESGQLTWTRLPQGFKNSPTLFNEALNRDLQGFRLDHPSVSLLQYVDDLLIAADTQAACLSATRDLLMTLAELGYRVSGKKAQLCQEEVTYLGFKIHKGSRSLSNSRTQAILQIPVPKTKRQVREFLGKIGYCRLFIPGFAELAQPLYAATRPGNDPLVWGEKEEEAFQSLKLALTQPPALALPSLDKPFQLFVEETSGAAKGVLTQALGPWKRPVAYLSKRLDPVAAGWPRCLRAIAAAALLTREASKLTFGQDIEITSSHNLESLLRSPPDKWLTNARITQYQVLLLDPPRVRFKQTAALNPATLLPETDDTLPIHHCLDTLDSLTSTRPDLTDQPLAQAEATLFTDGSSYIRDGKRYAGAAVVTLDSVIWAEPLPIGTSAQKAELIALTKALEWSKDKSVNIYTDSRYAFATLHVHGMIYRERGWLTAGGKAIKNAPEILALLTAVWLPKRVAVMHCKGHQKDDAPTSTGNRRADEVAREVAIRPLSTQATISAGKRTADGSEFEKRTADGSEFESPKKKAKVE

SEQ ID NO: 7205 - protein, 2218 aa, synthetic construct
MPAAKRVKLDGGDKKYSIGLDIGTNSVGWAVITDEYKVPSKKFKVLGNTDRHSIKKNLIGALLFDSGETAEATRLKRTARRRYTRRKNRICYLQEIFSNEMAKVDDSFFHRLEESFLVEEDKKHERHPIFGNIVDEVAYHEKYPTIYHLRKKLVDSTDKADLRLIYLALAHMIKFRGHFLIEGDLNPDNSDVDKLFIQLVQTYNQLFEENPINASGVDAKAILSARLSKSRRLENLIAQLPGEKKNGLFGNLIALSLGLTPNFKSNFDLAEDAKLQLSKDTYDDDLDNLLAQIGDQYADLFLAAKNLSDAILLSDILRVNTEITKAPLSASMIKRYDEHHQDLTLLKALVRQQLPEKYKEIFFDQSKNGYAGYIDGGASQEEFYKFIKPILEKMDGTEELLVKLNREDLLRKQRTFDNGSIPHQIHLGELHAILRRQEDFYPFLKDNREKIEKILTFRIPYYVGPLARGNSRFAWMTRKSEETITPWNFEEVVDKGASAQSFIERMTNFDKNLPNEKVLPKHSLLYEYFTVYNELTKVKYVTEGMRKPAFLSGEQKKAIVDLLFKTNRKVTVKQLKEDYFKKIECFDSVEISGVEDRFNASLGTYHDLLKIIKDKDFLDNEENEDILEDIVLTLTLFEDREMIEERLKTYAHLFDDKVMKQLKRRRYTGWGRLSRKLINGIRDKQSGKTILDFLKSDGFANRNFMQLIHDDSLTFKEDIQKAQVSGQGDSLHEHIANLAGSPAIKKGILQTVKVVDELVKVMGRHKPENIVIEMARENQTTQKGQKNSRERMKRIEEGIKELGSQILKEHPVENTQLQNEKLYLYYLQNGRDMYVDQELDINRLSDYDVDHIVPQSFLKDDSIDNKVLTRSDKARGKSDNVPSEEVVKKMKNYWRQLLNAKLITQRKFDNLTKAERGGLSELDKAGFIKRQLVETRQITKHVAQILDSRMNTKYDENDKLIREVKVITLKSKLVSDFRKDFQFYKVREINNYHHAHDAYLNAVVGTALIKKYPKLESEFVYGDYKVYDVRKMIAKSEQEIGKATAKYFFYSNIMNFFKTEITLANGEIRKRPLIETNGETGEIVWDKGRDFATVRKVLSMPQVNIVKKTEVQTGGFSKESILPKRNSDKLIARKKDWDPKKYGGFDSPTVAYSVLVVAKVEKGKSKKLKSVKELLGITIMERSSFEKNPIDFLEAKGYKEVKKDLIIKLPKYSLFELENGRKRMLASAGELQKGNELALPSKYVNFLYLASHYEKLKGSPEDNEQKQLFVEQHKHYLDEIIEQISEFSKRVILADANLDKVLSAYNKHRDKPIREQAENIIHLFTLTNLGAPAAFKYFDTTIDRKRYTSTKEVLDATLIHQSITGLYETRIDLSQLGGDGGGGSPAPEAAAKGGTLGDQGSRGSDPLPEPRVTLTVEGIPTEFLVNTGAEHSVLTKPMGKMGSKRTVVAGATGSKVYPWTTKRLLKIGQKQVTHSFLVIPECPAPLLGRDLLTKLKAQIQFSTEGPQVTWEDRPAMCLVLNLEEEYRLHEKPVPPSIDPSWLQLFPMVWAEKAGMGLANQVPPVVVELKSDASPVAVRQYPMSKEAREGIRPHIQRFLDLGILVPCQSPWNTPLLPVKKPGTNDYRPVQDLREVNKRVQDIHPTVPNPYNLLSSLPPSHTWYSVLDLKDAFFCLKLHPNSQPLFAFEWRDPEKGNTGQLTWTRLPQGFKNSPTLFNEALHRDLASFRALNPQVVMLQYVDDLLVAAPTYRDCKEGTRRLLQELSKLGYRVSAKKAQLCREEVTYLGYLLKGGKRWLTPARKATVMKIPTPTTPRQVREFLGTAGFCRLWIPGFASLAAPLYPLTRPKVPFTWTEAHQEAFGRIKEALLSAPALALPDLTKPFALYVDEKEGVARGVLTQTLGPWRRPVAYLSKKLDPVASGWPTCLKAIAAVALLLKDADKLTLGQNVLVIAPHNLESIVRQPPDRWMTNARMTHYQSLLLNERVSFAPPAILNPATLLPVESDDTPIHICSEILAEETGTRPDLRDQPLPGVPAWYTDGSSFIMDGRRQAGAAIVDNKRTVWASNLPEGTSAQKAELIALTQALRLAEGKSINIYTDSRYAFATAHVHGAIYKQRGWLTSAGKDIKNKEEILALLEAIHLPKRVAIIHCPGHQRGTDPVATGNRKADEAAKQAAQSTRILTETTKNAGKRTADGSEFEKRTADGSEFESPKKKAKVE

SEQ ID NO: 7206 - protein, 2096 aa, synthetic construct
MPAAKRVKLDGGDKKYSIGLDIGTNSVGWAVITDEYKVPSKKFKVLGNTDRHSIKKNLIGALLFDSGETAEATRLKRTARRRYTRRKNRICYLQEIFSNEMAKVDDSFFHRLEESFLVEEDKKHERHPIFGNIVDEVAYHEKYPTIYHLRKKLVDSTDKADLRLIYLALAHMIKFRGHFLIEGDLNPDNSDVDKLFIQLVQTYNQLFEENPINASGVDAKAILSARLSKSRRLENLIAQLPGEKKNGLFGNLIALSLGLTPNFKSNFDLAEDAKLQLSKDTYDDDLDNLLAQIGDQYADLFLAAKNLSDAILLSDILRVNTEITKAPLSASMIKRYDEHHQDLTLLKALVRQQLPEKYKEIFFDQSKNGYAGYIDGGASQEEFYKFIKPILEKMDGTEELLVKLNREDLLRKQRTFDNGSIPHQIHLGELHAILRRQEDFYPFLKDNREKIEKILTFRIPYYVGPLARGNSRFAWMTRKSEETITPWNFEEVVDKGASAQSFIERMTNFDKNLPNEKVLPKHSLLYEYFTVYNELTKVKYVTEGMRKPAFLSGEQKKAIVDLLFKTNRKVTVKQLKEDYFKKIECFDSVEISGVEDRFNASLGTYHDLLKIIKDKDFLDNEENEDILEDIVLTLTLFEDREMIEERLKTYAHLFDDKVMKQLKRRRYTGWGRLSRKLINGIRDKQSGKTILDFLKSDGFANRNFMQLIHDDSLTFKEDIQKAQVSGQGDSLHEHIANLAGSPAIKKGILQTVKVVDELVKVMGRHKPENIVIEMARENQTTQKGQKNSRERMKRIEEGIKELGSQILKEHPVENTQLQNEKLYLYYLQNGRDMYVDQELDINRLSDYDVDHIVPQSFLKDDSIDNKVLTRSDKARGKSDNVPSEEVVKKMKNYWRQLLNAKLITQRKFDNLTKAERGGLSELDKAGFIKRQLVETRQITKHVAQILDSRMNTKYDENDKLIREVKVITLKSKLVSDFRKDFQFYKVREINNYHHAHDAYLNAVVGTALIKKYPKLESEFVYGDYKVYDVRKMIAKSEQEIGKATAKYFFYSNIMNFFKTEITLANGEIRKRPLIETNGETGEIVWDKGRDFATVRKVLSMPQVNIVKKTEVQTGGFSKESILPKRNSDKLIARKKDWDPKKYGGFDSPTVAYSVLVVAKVEKGKSKKLKSVKELLGITIMERSSFEKNPIDFLEAKGYKEVKKDLIIKLPKYSLFELENGRKRMLASAGELQKGNELALPSKYVNFLYLASHYEKLKGSPEDNEQKQLFVEQHKHYLDEIIEQISEFSKRVILADANLDKVLSAYNKHRDKPIREQAENIIHLFTLTNLGAPAAFKYFDTTIDRKRYTSTKEVLDATLIHQSITGLYETRIDLSQLGGDGGGGSPAPEAAAKGGTLNIEDEHRLHETSKEPDVSLGSTWLSDFPQAWAETGGMGLAVRQAPLIIPLKATSTPVSIKQYPMSQEARLGIKPHIQRLLDQGILVPCQSPWNTPLLPVKKPGTNDYRPVQDLREVNKRVEDIHPTVPNPYNLLSGLPPSHQWYTVLDLKDAFFCLRLHPTSQPLFAFEWRDPEMGISGQLTWTRLPQGFKNSPTLFDEALHRDLADFRIQHPDLILLQYVDDLLLAATSELDCQQGTRALLQTLGNLGYRASAKKAQICQKQVKYLGYLLKEGQRWLTEARKETVMGQPTPKTPRQLREFLGTAGFCRLWIPGFAEMAAPLYPLTKTGTLFNWGPDQQKAYQEIKQALLTAPALGLPDLTKPFELFVDEKQGYAKGVLTQKLGPWRRPVAYLSKKLDPVAAGWPPCLRMVAAIAVLTKDAGKLTMGQPLVILAPHAVEALVKQPPDRWLSNARMTHYQALLLDTDRVQFGPVVALNPATLLPLPEEGLQHNCLDILAEAHGTRPDLTDQPLPDADHTWYTDGSSLLQEGQRKAGAAVTTETEVIWAKALPAGTSAQRAELIALTQALKMAEGKKLNVYTDSRYAFATAHIHGEIYRRRGLLTSEGKEIKNKDEILALLKALFLPKRLSIIHCPGHQKGHSAEARGNRMADQAARKAAITETPDTSTLLAGKRTADGSEFEKRTADGSEFESPKKKAKVE

SEQ ID NO: 7207 - protein, 2090 aa, synthetic construct
MPAAKRVKLDGGDKKYSIGLDIGTNSVGWAVITDEYKVPSKKFKVLGNTDRHSIKKNLIGALLFDSGETAEATRLKRTARRRYTRRKNRICYLQEIFSNEMAKVDDSFFHRLEESFLVEEDKKHERHPIFGNIVDEVAYHEKYPTIYHLRKKLVDSTDKADLRLIYLALAHMIKFRGHFLIEGDLNPDNSDVDKLFIQLVQTYNQLFEENPINASGVDAKAILSARLSKSRRLENLIAQLPGEKKNGLFGNLIALSLGLTPNFKSNFDLAEDAKLQLSKDTYDDDLDNLLAQIGDQYADLFLAAKNLSDAILLSDILRVNTEITKAPLSASMIKRYDEHHQDLTLLKALVRQQLPEKYKEIFFDQSKNGYAGYIDGGASQEEFYKFIKPILEKMDGTEELLVKLNREDLLRKQRTFDNGSIPHQIHLGELHAILRRQEDFYPFLKDNREKIEKILTFRIPYYVGPLARGNSRFAWMTRKSEETITPWNFEEVVDKGASAQSFIERMTNFDKNLPNEKVLPKHSLLYEYFTVYNELTKVKYVTEGMRKPAFLSGEQKKAIVDLLFKTNRKVTVKQLKEDYFKKIECFDSVEISGVEDRFNASLGTYHDLLKIIKDKDFLDNEENEDILEDIVLTLTLFEDREMIEERLKTYAHLFDDKVMKQLKRRRYTGWGRLSRKLINGIRDKQSGKTILDFLKSDGFANRNFMQLIHDDSLTFKEDIQKAQVSGQGDSLHEHIANLAGSPAIKKGILQTVKVVDELVKVMGRHKPENIVIEMARENQTTQKGQKNSRERMKRIEEGIKELGSQILKEHPVENTQLQNEKLYLYYLQNGRDMYVDQELDINRLSDYDVDHIVPQSFLKDDSIDNKVLTRSDKARGKSDNVPSEEVVKKMKNYWRQLLNAKLITQRKFDNLTKAERGGLSELDKAGFIKRQLVETRQITKHVAQILDSRMNTKYDENDKLIREVKVITLKSKLVSDFRKDFQFYKVREINNYHHAHDAYLNAVVGTALIKKYPKLESEFVYGDYKVYDVRKMIAKSEQEIGKATAKYFFYSNIMNFFKTEITLANGEIRKRPLIETNGETGEIVWDKGRDFATVRKVLSMPQVNIVKKTEVQTGGFSKESILPKRNSDKLIARKKDWDPKKYGGFDSPTVAYSVLVVAKVEKGKSKKLKSVKELLGITIMERSSFEKNPIDFLEAKGYKEVKKDLIIKLPKYSLFELENGRKRMLASAGELQKGNELALPSKYVNFLYLASHYEKLKGSPEDNEQKQLFVEQHKHYLDEIIEQISEFSKRVILADANLDKVLSAYNKHRDKPIREQAENIIHLFTLTNLGAPAAFKYFDTTIDRKRYTSTKEVLDATLIHQSITGLYETRIDLSQLGGDGGGGSPAPEAAAKGGTLQLDDEYRLYSPLVKPDQNIQFWLEQFPQAWAETAGMGLAKQVPPQVIQLKASATPVSVRQYPLSKEAQEGIRPHVQRLIQQGILVPVQSPWNTPLLPVRKPGTNDYRPVQDLREVNKRVQDIHPTVPNPYNLLCALPPQRSWYTVLDLKDAFFCLRLHPTSQPLFAFEWRDPGTGRTGQLTWTRLPQGFKNSPTIFDEALHRDLANFRIQHPQVTLLQYVDDLLLAGATKQDCLEGTKALLLELSDLGYRASAKKAQICRREVTYLGYSLRDGQRWLTEARKKTVVQIPAPTTAKQVREFLGTAGFCRLWIPGFATLAAPLYPLTKEKGEFSWAPEHQKAFDAIKKALLSAPALALPDVTKPFTLYVDERKGVARGVLTQTLGPWRRPVAYLSKKLDPVASGWPVCLKAIAAVAILVKDADKLTLGQNITVIAPHALENIVRQPPDRWMTNARMTHYQSLLLTERVTFAPPAALNPATLLPEETDEPVTHDCHQLLIEETGVRKDLTDIPLTGEVLTWFTDGSSYVVEGKRMAGAAVVDGTRTIWASSLPEGTSAQKAELMALTQALRLAEGKSINIYTDSRYAFATAHVHGAIYKQRGLLTSAGREIKNKEEILSLLEALHLPKRLAIIHCPGHQKAKDPISRGNQMADRVAKQAAQGVNLLAGKRTADGSEFEKRTADGSEFESPKKKAKVE

SEQ ID NO: 7208 - protein, 2087 aa, synthetic construct
MPAAKRVKLDGGDKKYSIGLDIGTNSVGWAVITDEYKVPSKKFKVLGNTDRHSIKKNLIGALLFDSGETAEATRLKRTARRRYTRRKNRICYLQEIFSNEMAKVDDSFFHRLEESFLVEEDKKHERHPIFGNIVDEVAYHEKYPTIYHLRKKLVDSTDKADLRLIYLALAHMIKFRGHFLIEGDLNPDNSDVDKLFIQLVQTYNQLFEENPINASGVDAKAILSARLSKSRRLENLIAQLPGEKKNGLFGNLIALSLGLTPNFKSNFDLAEDAKLQLSKDTYDDDLDNLLAQIGDQYADLFLAAKNLSDAILLSDILRVNTEITKAPLSASMIKRYDEHHQDLTLLKALVRQQLPEKYKEIFFDQSKNGYAGYIDGGASQEEFYKFIKPILEKMDGTEELLVKLNREDLLRKQRTFDNGSIPHQIHLGELHAILRRQEDFYPFLKDNREKIEKILTFRIPYYVGPLARGNSRFAWMTRKSEETITPWNFEEVVDKGASAQSFIERMTNFDKNLPNEKVLPKHSLLYEYFTVYNELTKVKYVTEGMRKPAFLSGEQKKAIVDLLFKTNRKVTVKQLKEDYFKKIECFDSVEISGVEDRFNASLGTYHDLLKIIKDKDFLDNEENEDILEDIVLTLTLFEDREMIEERLKTYAHLFDDKVMKQLKRRRYTGWGRLSRKLINGIRDKQSGKTILDFLKSDGFANRNFMQLIHDDSLTFKEDIQKAQVSGQGDSLHEHIANLAGSPAIKKGILQTVKVVDELVKVMGRHKPENIVIEMARENQTTQKGQKNSRERMKRIEEGIKELGSQILKEHPVENTQLQNEKLYLYYLQNGRDMYVDQELDINRLSDYDVDHIVPQSFLKDDSIDNKVLTRSDKARGKSDNVPSEEVVKKMKNYWRQLLNAKLITQRKFDNLTKAERGGLSELDKAGFIKRQLVETRQITKHVAQILDSRMNTKYDENDKLIREVKVITLKSKLVSDFRKDFQFYKVREINNYHHAHDAYLNAVVGTALIKKYPKLESEFVYGDYKVYDVRKMIAKSEQEIGKATAKYFFYSNIMNFFKTEITLANGEIRKRPLIETNGETGEIVWDKGRDFATVRKVLSMPQVNIVKKTEVQTGGFSKESILPKRNSDKLIARKKDWDPKKYGGFDSPTVAYSVLVVAKVEKGKSKKLKSVKELLGITIMERSSFEKNPIDFLEAKGYKEVKKDLIIKLPKYSLFELENGRKRMLASAGELQKGNELALPSKYVNFLYLASHYEKLKGSPEDNEQKQLFVEQHKHYLDEIIEQISEFSKRVILADANLDKVLSAYNKHRDKPIREQAENIIHLFTLTNLGAPAAFKYFDTTIDRKRYTSTKEVLDATLIHQSITGLYETRIDLSQLGGDGGGGSPAPEAAAKGGIPWLMKKPLQLTTLVPLQEYEERLLKQTMLTGSYKEKLQSLFLKYDALWQHWENQVGHRRIKPHHIATGTVNPRPQKQYPINPKAKASIQTVINDLLKQGVLIQQNSIMNTPVYPVPKPDGKWRMVLDYREVNKTIPLIAAQNQHSAGILSSIFRGKYKTTLDLSNGFWAHSITPESYWLTAFTWLGQQYCWTRLPQGFLNSPALFNADVVDLLKEVPNVQVYVDDIYISHDDPREHLEQLEKVFSLLLNAGYVVSLKKSEIAQHEVEFLGFNITKEGRGLTETFKQKLLNITPPRDLKQLQSILGLLNFARNFIPNFSELVKPLYNIIATAPGKYITWTTDNSQQLQNIISMLNSAENLEERNPEVRLIMKVNTSPSAGYIRFYNEFAKRPIMYLNYVYTKAEVKFTNTEKLLTTIHKGLIKALDLGMGQEILVYSPIVSMTKIQKTPLPERKALPIRWITWMSYLEDPRIQFHYDKTLPELQQVPTVTDDIIAKIKHPSEFSMVFYTDGSAIKHPNVNKSHNAGMGIAQVQFKPEFTVINTWSIPLGDHTAQLAEVAAVEFACKKALKIDGPVLIVTDSFYVAESVNKELPYWQSNGFFNNKKKPLKHVSKWKSIADCIQLKPDIIIIHEKGHQPTASTFHTEGNNLADKLATQGSYVVNAGKRTADGSEFEKRTADGSEFESPKKKAKVE

SEQ ID NO: 7209 - protein, 2094 aa, synthetic construct
MPAAKRVKLDGGDKKYSIGLDIGTNSVGWAVITDEYKVPSKKFKVLGNTDRHSIKKNLIGALLFDSGETAEATRLKRTARRRYTRRKNRICYLQEIFSNEMAKVDDSFFHRLEESFLVEEDKKHERHPIFGNIVDEVAYHEKYPTIYHLRKKLVDSTDKADLRLIYLALAHMIKFRGHFLIEGDLNPDNSDVDKLFIQLVQTYNQLFEENPINASGVDAKAILSARLSKSRRLENLIAQLPGEKKNGLFGNLIALSLGLTPNFKSNFDLAEDAKLQLSKDTYDDDLDNLLAQIGDQYADLFLAAKNLSDAILLSDILRVNTEITKAPLSASMIKRYDEHHQDLTLLKALVRQQLPEKYKEIFFDQSKNGYAGYIDGGASQEEFYKFIKPILEKMDGTEELLVKLNREDLLRKQRTFDNGSIPHQIHLGELHAILRRQEDFYPFLKDNREKIEKILTFRIPYYVGPLARGNSRFAWMTRKSEETITPWNFEEVVDKGASAQSFIERMTNFDKNLPNEKVLPKHSLLYEYFTVYNELTKVKYVTEGMRKPAFLSGEQKKAIVDLLFKTNRKVTVKQLKEDYFKKIECFDSVEISGVEDRFNASLGTYHDLLKIIKDKDFLDNEENEDILEDIVLTLTLFEDREMIEERLKTYAHLFDDKVMKQLKRRRYTGWGRLSRKLINGIRDKQSGKTILDFLKSDGFANRNFMQLIHDDSLTFKEDIQKAQVSGQGDSLHEHIANLAGSPAIKKGILQTVKVVDELVKVMGRHKPENIVIEMARENQTTQKGQKNSRERMKRIEEGIKELGSQILKEHPVENTQLQNEKLYLYYLQNGRDMYVDQELDINRLSDYDVDHIVPQSFLKDDSIDNKVLTRSDKARGKSDNVPSEEVVKKMKNYWRQLLNAKLITQRKFDNLTKAERGGLSELDKAGFIKRQLVETRQITKHVAQILDSRMNTKYDENDKLIREVKVITLKSKLVSDFRKDFQFYKVREINNYHHAHDAYLNAVVGTALIKKYPKLESEFVYGDYKVYDVRKMIAKSEQEIGKATAKYFFYSNIMNFFKTEITLANGEIRKRPLIETNGETGEIVWDKGRDFATVRKVLSMPQVNIVKKTEVQTGGFSKESILPKRNSDKLIARKKDWDPKKYGGFDSPTVAYSVLVVAKVEKGKSKKLKSVKELLGITIMERSSFEKNPIDFLEAKGYKEVKKDLIIKLPKYSLFELENGRKRMLASAGELQKGNELALPSKYVNFLYLASHYEKLKGSPEDNEQKQLFVEQHKHYLDEIIEQISEFSKRVILADANLDKVLSAYNKHRDKPIREQAENIIHLFTLTNLGAPAAFKYFDTTIDRKRYTSTKEVLDATLIHQSITGLYETRIDLSQLGGDGGGGSPAPEAAAKGGVLNLEEEYRLHEKPVPSSIDPSWLQLFPTVWAERAGMGLANQVPPVVVELRSGASPVAVRQYPMSKEAREGIRPHIQRFLDLGVLVPCQSPWNTPLLPVKKPGTNDYRPVQDLREINKRVQDIHPTVPNPYNLLSSLPPSHTWYSVLDLKDAFFCLKLHPNSQPLFAFEWRDPEKGNTGQLTWTRLPQGFKNSPTLFNEALHRDLAPFRALNPQVVLLQYVDDLLVAAPTYRDCKEGTQKLLQELSKLGYRVSAKKAQLCQKEVTYLGYLLKEGKRWLTPARKATVMKIPPPTTPRQVREFLGTAGFCRLWIPGFASLAAPLYPLTKPSIPFIWTEEHQKAFDRIKEALLSAPALALPDLTKPFTLYVDERAGVARGVLTQTLGPWRRPVAYLSKKLDPVASGWPTCLKAVAAVALLLKDADKLTLGQNVTVIASHSLESIVRQPPDRWMTNARMTHYQSLLLNERVSFAPPAVLNPATLLPVESEATPVHRCSEILAEETGTRRDLKDQPLPGVPAWYTDGSSFIAEGKRRAGAAIVDGKRTVWASSLPEGTSAQKAELVALTQALRLAEGKDINIYTDSRYAFATAHIHGAIYKQRGWLTSAGKDIKNKEEILALLEAIHLPKRVAIIHCPGHQKGNDPVATGNRRADEAAKQAALSTRVLAETTKPAGKRTADGSEFEKRTADGSEFESPKKKAKVE

SEQ ID NO: 7210 - protein, 2102 aa, synthetic construct
MPAAKRVKLDGGDKKYSIGLDIGTNSVGWAVITDEYKVPSKKFKVLGNTDRHSIKKNLIGALLFDSGETAEATRLKRTARRRYTRRKNRICYLQEIFSNEMAKVDDSFFHRLEESFLVEEDKKHERHPIFGNIVDEVAYHEKYPTIYHLRKKLVDSTDKADLRLIYLALAHMIKFRGHFLIEGDLNPDNSDVDKLFIQLVQTYNQLFEENPINASGVDAKAILSARLSKSRRLENLIAQLPGEKKNGLFGNLIALSLGLTPNFKSNFDLAEDAKLQLSKDTYDDDLDNLLAQIGDQYADLFLAAKNLSDAILLSDILRVNTEITKAPLSASMIKRYDEHHQDLTLLKALVRQQLPEKYKEIFFDQSKNGYAGYIDGGASQEEFYKFIKPILEKMDGTEELLVKLNREDLLRKQRTFDNGSIPHQIHLGELHAILRRQEDFYPFLKDNREKIEKILTFRIPYYVGPLARGNSRFAWMTRKSEETITPWNFEEVVDKGASAQSFIERMTNFDKNLPNEKVLPKHSLLYEYFTVYNELTKVKYVTEGMRKPAFLSGEQKKAIVDLLFKTNRKVTVKQLKEDYFKKIECFDSVEISGVEDRFNASLGTYHDLLKIIKDKDFLDNEENEDILEDIVLTLTLFEDREMIEERLKTYAHLFDDKVMKQLKRRRYTGWGRLSRKLINGIRDKQSGKTILDFLKSDGFANRNFMQLIHDDSLTFKEDIQKAQVSGQGDSLHEHIANLAGSPAIKKGILQTVKVVDELVKVMGRHKPENIVIEMARENQTTQKGQKNSRERMKRIEEGIKELGSQILKEHPVENTQLQNEKLYLYYLQNGRDMYVDQELDINRLSDYDVDHIVPQSFLKDDSIDNKVLTRSDKARGKSDNVPSEEVVKKMKNYWRQLLNAKLITQRKFDNLTKAERGGLSELDKAGFIKRQLVETRQITKHVAQILDSRMNTKYDENDKLIREVKVITLKSKLVSDFRKDFQFYKVREINNYHHAHDAYLNAVVGTALIKKYPKLESEFVYGDYKVYDVRKMIAKSEQEIGKATAKYFFYSNIMNFFKTEITLANGEIRKRPLIETNGETGEIVWDKGRDFATVRKVLSMPQVNIVKKTEVQTGGFSKESILPKRNSDKLIARKKDWDPKKYGGFDSPTVAYSVLVVAKVEKGKSKKLKSVKELLGITIMERSSFEKNPIDFLEAKGYKEVKKDLIIKLPKYSLFELENGRKRMLASAGELQKGNELALPSKYVNFLYLASHYEKLKGSPEDNEQKQLFVEQHKHYLDEIIEQISEFSKRVILADANLDKVLSAYNKHRDKPIREQAENIIHLFTLTNLGAPAAFKYFDTTIDRKRYTSTKEVLDATLIHQSITGLYETRIDLSQLGGDGGEAAAKGGSPAPGGTVSLQDEHRLFDIPVTTSLPDVWLQDFPQAWAETGGLGRAKCQAPIIIDLKPTAVPVSIKQYPMSLEAHMGIRQHIIKFLELGVLRPCRSPWNTPLLPVKKPGTQDYRPVQDLREINKRTVDIHPTVPNPYNLLSTLKPDYSWYTVLDLKDAFFCLPLAPQSQELFAFEWKDPERGISGQLTWTRLPQGFKNSPTLFNEALHRDLTDFRTQHPEVTLLQYVDDLLLAAPTKKACTQGTRHLLQELGEKGYRASAKKAQICQTKVTYLGYILSEGKRWLTPGRIETVARIPPPRNPREVREFLGTAGFCRLWIPGFAELAAPLYALTKPSTPFTWQTEHQLAFEALKKALLSAPALGLPDTSKPFTLFLDERQGIAKGVLTQKLGPWKRPVAYLSKKLDPVAAGWPPCLRIMAATAMLVKDSAKLTLGQPLTVITPHTLEAIVRQPPDRWITNARLTHYQALLLDTDRVQFGPPVTLNPATLLPVPENQPSPHDCRQVLAETHGTREDLKDQELPDADHTWYTDGSSYLDSGTRRAGAAVVDGHNTIWAQSLPPGTSAQKAELIALTKALELSKGKKANIYTDSRYAFATAHTHGSIYERRGWLTSEGKEIKNKAEIIALLKALFLPQEVAIIHCPGHQKGQDPVAVGNRQADRVARQAAMAEVLTLATEPDNTSHITAGKRTADGSEFEKRTADGSEFESPKKKAKVE

SEQ ID NO: 7211 - protein, 2087 aa, synthetic construct
MPAAKRVKLDGGDKKYSIGLDIGTNSVGWAVITDEYKVPSKKFKVLGNTDRHSIKKNLIGALLFDSGETAEATRLKRTARRRYTRRKNRICYLQEIFSNEMAKVDDSFFHRLEESFLVEEDKKHERHPIFGNIVDEVAYHEKYPTIYHLRKKLVDSTDKADLRLIYLALAHMIKFRGHFLIEGDLNPDNSDVDKLFIQLVQTYNQLFEENPINASGVDAKAILSARLSKSRRLENLIAQLPGEKKNGLFGNLIALSLGLTPNFKSNFDLAEDAKLQLSKDTYDDDLDNLLAQIGDQYADLFLAAKNLSDAILLSDILRVNTEITKAPLSASMIKRYDEHHQDLTLLKALVRQQLPEKYKEIFFDQSKNGYAGYIDGGASQEEFYKFIKPILEKMDGTEELLVKLNREDLLRKQRTFDNGSIPHQIHLGELHAILRRQEDFYPFLKDNREKIEKILTFRIPYYVGPLARGNSRFAWMTRKSEETITPWNFEEVVDKGASAQSFIERMTNFDKNLPNEKVLPKHSLLYEYFTVYNELTKVKYVTEGMRKPAFLSGEQKKAIVDLLFKTNRKVTVKQLKEDYFKKIECFDSVEISGVEDRFNASLGTYHDLLKIIKDKDFLDNEENEDILEDIVLTLTLFEDREMIEERLKTYAHLFDDKVMKQLKRRRYTGWGRLSRKLINGIRDKQSGKTILDFLKSDGFANRNFMQLIHDDSLTFKEDIQKAQVSGQGDSLHEHIANLAGSPAIKKGILQTVKVVDELVKVMGRHKPENIVIEMARENQTTQKGQKNSRERMKRIEEGIKELGSQILKEHPVENTQLQNEKLYLYYLQNGRDMYVDQELDINRLSDYDVDHIVPQSFLKDDSIDNKVLTRSDKARGKSDNVPSEEVVKKMKNYWRQLLNAKLITQRKFDNLTKAERGGLSELDKAGFIKRQLVETRQITKHVAQILDSRMNTKYDENDKLIREVKVITLKSKLVSDFRKDFQFYKVREINNYHHAHDAYLNAVVGTALIKKYPKLESEFVYGDYKVYDVRKMIAKSEQEIGKATAKYFFYSNIMNFFKTEITLANGEIRKRPLIETNGETGEIVWDKGRDFATVRKVLSMPQVNIVKKTEVQTGGFSKESILPKRNSDKLIARKKDWDPKKYGGFDSPTVAYSVLVVAKVEKGKSKKLKSVKELLGITIMERSSFEKNPIDFLEAKGYKEVKKDLIIKLPKYSLFELENGRKRMLASAGELQKGNELALPSKYVNFLYLASHYEKLKGSPEDNEQKQLFVEQHKHYLDEIIEQISEFSKRVILADANLDKVLSAYNKHRDKPIREQAENIIHLFTLTNLGAPAAFKYFDTTIDRKRYTSTKEVLDATLIHQSITGLYETRIDLSQLGGDGGEAAAKGGSPAPGGVPWILKKPLELTIKLDLEEQQGTLLNNSILSKKGKEELKQLFEKYSALWQSWENQVGHRRIRPHKIATGTVKPTPQKQYHINPKAKPDIQIVINDLLKQGVLIQKESTMNTPVYPVPKPNGRWRMVLDYRAVNKVTPLIAVQNQHSYGILGSLFKGRYKTTIDLSNGFWAHPIVPEDYWITAFTWQGKQYCWTVLPQGFLNSPGLFNGDVVDLLQGIPNVEVYVDDVYISHDSEKEHLEYLDILFNRLKEAGYIISLKKSNIANSIVDFLGFQITNEGRGLTDTFKEKLENITAPTTLKQLQSILGLLNFARNFIPDFTELIAPLYALIPKSPKNYVPWQIEHSTTLETLITKLNGAEYLQGRKGDKTLIMKVNASYTTGYIRYYNEGEKKPISYVSIVFSKTELKFTELEKLLTTVHKGLLKALDLSMGQNIHVYSPIVSMQNIQKTPQTAKKALASRWLSWLSYLEDPRIRFFYDPQMPALKDLPAVDTGKDNKKHPSNFQHIFYTDGSAITSPTKEGHLNAGMGIVYFINKDGNLQKQQEWSISLGNHTAQFAEIAAFEFALKKCLPLGGNILVVTDSNYVAKAYNEELDVWASNGFVNNRKKPLKHISKWKSVADLKRLRPDVVVTHEPGHQKLDSSPHAYGNNLADQLATQASFKVHAGKRTADGSEFEKRTADGSEFESPKKKAKVE

SEQ ID NO: 7212 - protein, 2095 aa, synthetic construct
MPAAKRVKLDGGDKKYSIGLDIGTNSVGWAVITDEYKVPSKKFKVLGNTDRHSIKKNLIGALLFDSGETAEATRLKRTARRRYTRRKNRICYLQEIFSNEMAKVDDSFFHRLEESFLVEEDKKHERHPIFGNIVDEVAYHEKYPTIYHLRKKLVDSTDKADLRLIYLALAHMIKFRGHFLIEGDLNPDNSDVDKLFIQLVQTYNQLFEENPINASGVDAKAILSARLSKSRRLENLIAQLPGEKKNGLFGNLIALSLGLTPNFKSNFDLAEDAKLQLSKDTYDDDLDNLLAQIGDQYADLFLAAKNLSDAILLSDILRVNTEITKAPLSASMIKRYDEHHQDLTLLKALVRQQLPEKYKEIFFDQSKNGYAGYIDGGASQEEFYKFIKPILEKMDGTEELLVKLNREDLLRKQRTFDNGSIPHQIHLGELHAILRRQEDFYPFLKDNREKIEKILTFRIPYYVGPLARGNSRFAWMTRKSEETITPWNFEEVVDKGASAQSFIERMTNFDKNLPNEKVLPKHSLLYEYFTVYNELTKVKYVTEGMRKPAFLSGEQKKAIVDLLFKTNRKVTVKQLKEDYFKKIECFDSVEISGVEDRFNASLGTYHDLLKIIKDKDFLDNEENEDILEDIVLTLTLFEDREMIEERLKTYAHLFDDKVMKQLKRRRYTGWGRLSRKLINGIRDKQSGKTILDFLKSDGFANRNFMQLIHDDSLTFKEDIQKAQVSGQGDSLHEHIANLAGSPAIKKGILQTVKVVDELVKVMGRHKPENIVIEMARENQTTQKGQKNSRERMKRIEEGIKELGSQILKEHPVENTQLQNEKLYLYYLQNGRDMYVDQELDINRLSDYDVDHIVPQSFLKDDSIDNKVLTRSDKARGKSDNVPSEEVVKKMKNYWRQLLNAKLITQRKFDNLTKAERGGLSELDKAGFIKRQLVETRQITKHVAQILDSRMNTKYDENDKLIREVKVITLKSKLVSDFRKDFQFYKVREINNYHHAHDAYLNAVVGTALIKKYPKLESEFVYGDYKVYDVRKMIAKSEQEIGKATAKYFFYSNIMNFFKTEITLANGEIRKRPLIETNGETGEIVWDKGRDFATVRKVLSMPQVNIVKKTEVQTGGFSKESILPKRNSDKLIARKKDWDPKKYGGFDSPTVAYSVLVVAKVEKGKSKKLKSVKELLGITIMERSSFEKNPIDFLEAKGYKEVKKDLIIKLPKYSLFELENGRKRMLASAGELQKGNELALPSKYVNFLYLASHYEKLKGSPEDNEQKQLFVEQHKHYLDEIIEQISEFSKRVILADANLDKVLSAYNKHRDKPIREQAENIIHLFTLTNLGAPAAFKYFDTTIDRKRYTSTKEVLDATLIHQSITGLYETRIDLSQLGGDGGEAAAKGGSPAPGGTLQLEEEYRLFEPESTQKQEMDIWLKNFPQAWAETGGMGTAHCQAPVLIQLKATATPISIRQYPMPHEAYQGIKPHIRRMLDQGILKPCQSPWNTPLLPVKKPGTEDYRPVQDLREVNKRVEDIHPTVPNPYNLLSTLPPSHPWYTVLDLKDAFFCLRLHSESQLLFAFEWRDPEIGLSGQLTWTRLPQGFKNSPTLFNEALHSDLADFRVRYPALVLLQYVDDLLLAAATRTECLEGTKALLETLGNKGYRASAKKAQICLQEVTYLGYSLKDGQRWLTKARKEAILSIPVPKNSRQVREFLGKAGYCRLFIPGFAELAAPLYPLTRPGTLFQWGTEQQLAFEDIKKALLSSPALGLPDITKPFELFIDENSGFAKGVLVQKLGPWKRPVAYLSKKLDTVASGWPPCLRMVAAIAILVKDAGKLTLGQPLTILTSHPVEALVRQPPNKWLSNARMTHYQAMLLDAERVHFGPTVSLNPATLLPLPSGGNHHDCLQILAETHGTRPDLTDQPLPDADLTWYTDGSSFIRNGEREAGAAVTTESEVIWAAPLPPGTSAQRAELIALTQALKMAEGKKLTVYTDSRYAFATTHVHGEIYRRRGWLTSEGKEIKNKNEILALLEALFLPKRLSIIHCPGHQKGDSPQAKGNRLADDTAKKAATETHSSLTVLPAGKRTADGSEFEKRTADGSEFESPKKKAKVE

SEQ ID NO: 7213 - protein, 2176 aa, synthetic construct
MPAAKRVKLDGGDKKYSIGLDIGTNSVGWAVITDEYKVPSKKFKVLGNTDRHSIKKNLIGALLFDSGETAEATRLKRTARRRYTRRKNRICYLQEIFSNEMAKVDDSFFHRLEESFLVEEDKKHERHPIFGNIVDEVAYHEKYPTIYHLRKKLVDSTDKADLRLIYLALAHMIKFRGHFLIEGDLNPDNSDVDKLFIQLVQTYNQLFEENPINASGVDAKAILSARLSKSRRLENLIAQLPGEKKNGLFGNLIALSLGLTPNFKSNFDLAEDAKLQLSKDTYDDDLDNLLAQIGDQYADLFLAAKNLSDAILLSDILRVNTEITKAPLSASMIKRYDEHHQDLTLLKALVRQQLPEKYKEIFFDQSKNGYAGYIDGGASQEEFYKFIKPILEKMDGTEELLVKLNREDLLRKQRTFDNGSIPHQIHLGELHAILRRQEDFYPFLKDNREKIEKILTFRIPYYVGPLARGNSRFAWMTRKSEETITPWNFEEVVDKGASAQSFIERMTNFDKNLPNEKVLPKHSLLYEYFTVYNELTKVKYVTEGMRKPAFLSGEQKKAIVDLLFKTNRKVTVKQLKEDYFKKIECFDSVEISGVEDRFNASLGTYHDLLKIIKDKDFLDNEENEDILEDIVLTLTLFEDREMIEERLKTYAHLFDDKVMKQLKRRRYTGWGRLSRKLINGIRDKQSGKTILDFLKSDGFANRNFMQLIHDDSLTFKEDIQKAQVSGQGDSLHEHIANLAGSPAIKKGILQTVKVVDELVKVMGRHKPENIVIEMARENQTTQKGQKNSRERMKRIEEGIKELGSQILKEHPVENTQLQNEKLYLYYLQNGRDMYVDQELDINRLSDYDVDHIVPQSFLKDDSIDNKVLTRSDKARGKSDNVPSEEVVKKMKNYWRQLLNAKLITQRKFDNLTKAERGGLSELDKAGFIKRQLVETRQITKHVAQILDSRMNTKYDENDKLIREVKVITLKSKLVSDFRKDFQFYKVREINNYHHAHDAYLNAVVGTALIKKYPKLESEFVYGDYKVYDVRKMIAKSEQEIGKATAKYFFYSNIMNFFKTEITLANGEIRKRPLIETNGETGEIVWDKGRDFATVRKVLSMPQVNIVKKTEVQTGGFSKESILPKRNSDKLIARKKDWDPKKYGGFDSPTVAYSVLVVAKVEKGKSKKLKSVKELLGITIMERSSFEKNPIDFLEAKGYKEVKKDLIIKLPKYSLFELENGRKRMLASAGELQKGNELALPSKYVNFLYLASHYEKLKGSPEDNEQKQLFVEQHKHYLDEIIEQISEFSKRVILADANLDKVLSAYNKHRDKPIREQAENIIHLFTLTNLGAPAAFKYFDTTIDRKRYTSTKEVLDATLIHQSITGLYETRIDLSQLGGDGGEAAAKGGSPAPGGMNPLQLLQPLPAEIKGTKLLAHWNSGATITCIPESFLEDEQPIKKTLIKTIHGEKQQNVYYVTFKVKGRKVEAEVIASPYEYILLSPTDVPWLTQQPLQLTILVPLQEYQEKILSKTALPEDQKQQLKTLFVKYDNLWQHWENQVGHRKIRPHNIATGDYPPRPQKQYPINPKAKPSIQIVIDDLLKQGVLTPQNSTMNTPVYPVPKPDGRWRMVLDYREVNKTIPLTAAQNQHSAGILATIVRQKYKTTLDLANGFWAHPITPESYWLTAFTWQGKQYCWTRLPQGFLNSPALFNADVVDLLKEIPNVQVYVDDIYLSHDDPKEHVQQLEKVFQILLQAGYVVSLKKSEIGQKTVEFLGFNITKEGRGLTDTFKTKLLNITPPKDLKQLQSILGKLNFARNFIPNFAELVQPLYNLIAPAKGKYIEWSEENTKQLNMVIEALNTASNLEERLPEQRLVIKVNTSPSAGYVRYYNETGKKPIMYLNYVFSKAELKFSMLEKLLTTMHKALIKAMDLAMGQEILVYSPIVSMTKIQKTPLPERKALPIRWITWMTYLEDPRIQFHYDKTLPELKHIPDVYTSSQSPVKHPSQYEGVFYTDGSAIKSPDPTKSNNAGMGIVHATYKPEYQVLNQWSIPLGNHTAQMAEIAAVEFACKKALKIPGPVLVITDSFYVAESANKELPYWKSNGFVNNKKKPLKHISKWKSIAECLSMKPDITIQHEKGISLQIPVFILKGNALADKLATQGSYVVNAGKRTADGSEFEKRTADGSEFESPKKKAKVE

SEQ ID NO: 7214 - protein, 2094 aa, synthetic construct
MPAAKRVKLDGGDKKYSIGLDIGTNSVGWAVITDEYKVPSKKFKVLGNTDRHSIKKNLIGALLFDSGETAEATRLKRTARRRYTRRKNRICYLQEIFSNEMAKVDDSFFHRLEESFLVEEDKKHERHPIFGNIVDEVAYHEKYPTIYHLRKKLVDSTDKADLRLIYLALAHMIKFRGHFLIEGDLNPDNSDVDKLFIQLVQTYNQLFEENPINASGVDAKAILSARLSKSRRLENLIAQLPGEKKNGLFGNLIALSLGLTPNFKSNFDLAEDAKLQLSKDTYDDDLDNLLAQIGDQYADLFLAAKNLSDAILLSDILRVNTEITKAPLSASMIKRYDEHHQDLTLLKALVRQQLPEKYKEIFFDQSKNGYAGYIDGGASQEEFYKFIKPILEKMDGTEELLVKLNREDLLRKQRTFDNGSIPHQIHLGELHAILRRQEDFYPFLKDNREKIEKILTFRIPYYVGPLARGNSRFAWMTRKSEETITPWNFEEVVDKGASAQSFIERMTNFDKNLPNEKVLPKHSLLYEYFTVYNELTKVKYVTEGMRKPAFLSGEQKKAIVDLLFKTNRKVTVKQLKEDYFKKIECFDSVEISGVEDRFNASLGTYHDLLKIIKDKDFLDNEENEDILEDIVLTLTLFEDREMIEERLKTYAHLFDDKVMKQLKRRRYTGWGRLSRKLINGIRDKQSGKTILDFLKSDGFANRNFMQLIHDDSLTFKEDIQKAQVSGQGDSLHEHIANLAGSPAIKKGILQTVKVVDELVKVMGRHKPENIVIEMARENQTTQKGQKNSRERMKRIEEGIKELGSQILKEHPVENTQLQNEKLYLYYLQNGRDMYVDQELDINRLSDYDVDHIVPQSFLKDDSIDNKVLTRSDKARGKSDNVPSEEVVKKMKNYWRQLLNAKLITQRKFDNLTKAERGGLSELDKAGFIKRQLVETRQITKHVAQILDSRMNTKYDENDKLIREVKVITLKSKLVSDFRKDFQFYKVREINNYHHAHDAYLNAVVGTALIKKYPKLESEFVYGDYKVYDVRKMIAKSEQEIGKATAKYFFYSNIMNFFKTEITLANGEIRKRPLIETNGETGEIVWDKGRDFATVRKVLSMPQVNIVKKTEVQTGGFSKESILPKRNSDKLIARKKDWDPKKYGGFDSPTVAYSVLVVAKVEKGKSKKLKSVKELLGITIMERSSFEKNPIDFLEAKGYKEVKKDLIIKLPKYSLFELENGRKRMLASAGELQKGNELALPSKYVNFLYLASHYEKLKGSPEDNEQKQLFVEQHKHYLDEIIEQISEFSKRVILADANLDKVLSAYNKHRDKPIREQAENIIHLFTLTNLGAPAAFKYFDTTIDRKRYTSTKEVLDATLIHQSITGLYETRIDLSQLGGDGGEAAAKGGSPAPGGVLNLEEEYRLHEKPVPSSIDPSWLQLFPTVWAERAGMGLANQVPPVVVELRSGASPVAVRQYPMSKEAREGIRPHIQKFLDLGVLVPCRSPWNTPLLPVKKPGTNDYRPVQDLREINKRVQDIHPTVPNPYNLLSSLPPSYTWYSVLDLKDAFFCLRLHPNSQPLFAFEWKDPEKGNTGQLTWTRLPQGFKNSPTLFNEALHRDLAPFRALNPQVVLLQYVDDLLVAAPTYEDCKKGTQKLLQELSKLGYRVSAKKAQLCQREVTYLGYLLKEGKRWLTPARKATVMKIPVPTTPRQVREFLGTAGFCRLWIPGFASLAAPLYPLTKPSIPFIWTEEHQQAFDHIKKALLSAPALALPDLTKPFTLYIDERAGVARGVLTQTLGPWRRPVAYLSKKLDPVASGWPTCLKAVAAVALLLKDADKLTLGQNVTVIASHSLESIVRQPPDRWMTNARMTHYQSLLLNERVSFAPPAVLNPATLLPVESEATPVHRCSEILAEETGTRRDLEDQPLPGVPTWYTDGSSFITEGKRRAGAPIVDGKRTVWASSLPEGTSAQKAELVALTQALRLAEGKNINIYTDSRYAFATAHIHGAIYKQRGWLTSAGKDIKNKEEILALLEAIHLPRRVAIIHCPGHQRGSNPVATGNRRADEAAKQAALSTRVLAGTTKPAGKRTADGSEFEKRTADGSEFESPKKKAKVE

SEQ ID NO: 7215 - protein, 2127 aa, synthetic construct
MPAAKRVKLDGGDKKYSIGLDIGTNSVGWAVITDEYKVPSKKFKVLGNTDRHSIKKNLIGALLFDSGETAEATRLKRTARRRYTRRKNRICYLQEIFSNEMAKVDDSFFHRLEESFLVEEDKKHERHPIFGNIVDEVAYHEKYPTIYHLRKKLVDSTDKADLRLIYLALAHMIKFRGHFLIEGDLNPDNSDVDKLFIQLVQTYNQLFEENPINASGVDAKAILSARLSKSRRLENLIAQLPGEKKNGLFGNLIALSLGLTPNFKSNFDLAEDAKLQLSKDTYDDDLDNLLAQIGDQYADLFLAAKNLSDAILLSDILRVNTEITKAPLSASMIKRYDEHHQDLTLLKALVRQQLPEKYKEIFFDQSKNGYAGYIDGGASQEEFYKFIKPILEKMDGTEELLVKLNREDLLRKQRTFDNGSIPHQIHLGELHAILRRQEDFYPFLKDNREKIEKILTFRIPYYVGPLARGNSRFAWMTRKSEETITPWNFEEVVDKGASAQSFIERMTNFDKNLPNEKVLPKHSLLYEYFTVYNELTKVKYVTEGMRKPAFLSGEQKKAIVDLLFKTNRKVTVKQLKEDYFKKIECFDSVEISGVEDRFNASLGTYHDLLKIIKDKDFLDNEENEDILEDIVLTLTLFEDREMIEERLKTYAHLFDDKVMKQLKRRRYTGWGRLSRKLINGIRDKQSGKTILDFLKSDGFANRNFMQLIHDDSLTFKEDIQKAQVSGQGDSLHEHIANLAGSPAIKKGILQTVKVVDELVKVMGRHKPENIVIEMARENQTTQKGQKNSRERMKRIEEGIKELGSQILKEHPVENTQLQNEKLYLYYLQNGRDMYVDQELDINRLSDYDVDHIVPQSFLKDDSIDNKVLTRSDKARGKSDNVPSEEVVKKMKNYWRQLLNAKLITQRKFDNLTKAERGGLSELDKAGFIKRQLVETRQITKHVAQILDSRMNTKYDENDKLIREVKVITLKSKLVSDFRKDFQFYKVREINNYHHAHDAYLNAVVGTALIKKYPKLESEFVYGDYKVYDVRKMIAKSEQEIGKATAKYFFYSNIMNFFKTEITLANGEIRKRPLIETNGETGEIVWDKGRDFATVRKVLSMPQVNIVKKTEVQTGGFSKESILPKRNSDKLIARKKDWDPKKYGGFDSPTVAYSVLVVAKVEKGKSKKLKSVKELLGITIMERSSFEKNPIDFLEAKGYKEVKKDLIIKLPKYSLFELENGRKRMLASAGELQKGNELALPSKYVNFLYLASHYEKLKGSPEDNEQKQLFVEQHKHYLDEIIEQISEFSKRVILADANLDKVLSAYNKHRDKPIREQAENIIHLFTLTNLGAPAAFKYFDTTIDRKRYTSTKEVLDATLIHQSITGLYETRIDLSQLGGDGGEAAAKGGSPAPGGLLGRDLLTKLKAQIQFSTEGPQVTWEDRPAMCLVLNLEEEYRLHEKPVPPSIDPSWLQLFPMVWAEKAGMGLANQVPPVVVELKSDASPVAVRQYPMSKEAREGIRPHIQRFLDLGILVPCQSPWNTPLLPVKKPGTNDYRPVQDLREVNKRVQDIHPTVPNPYNLLSSLPPSHTWYSVLDLKDAFFCLKLHPNSQPLFAFEWRDPEKGNTGQLTWTRLPQGFKNSPTLFNEALHRDLASFRALNPQVVMLQYVDDLLVAAPTYRDCKEGTRRLLQELSKLGYRVSAKKAQLCREEVTYLGYLLKGGKRWLTPARKATVMKIPTPTTPRQVREFLGTAGFCRLWIPGFASLAAPLYPLTRPKVPFTWTEAHQEAFGRIKEALLSAPALALPDLTKPFALYVDEKEGVARGVLTQTLGPWRRPVAYLSKKLDPVASGWPTCLKAIAAVALLLKDADKLTLGQNVLVIAPHNLESIVRQPPDRWMTNARMTHYQSLLLNERVSFAPPAILNPATLLPVESDDTPIHICSEILAEETGTRPDLRDQPLPGVPAWYTDGSSFIMDGRRQAGAAIVDNKRTVWASNLPEGTSAQKAELIALTQALRLAEGKSINIYTDSRYAFATAHVHGAIYKQRGWLTSAGKDIKNKEEILALLEAIHLPKRVAIIHCPGHQRGTDPVATGNRKADEAAKQAAQSTRILTETTKNAGKRTADGSEFEKRTADGSEFESPKKKAKVE

SEQ ID NO: 7216 - protein, 2127 aa, synthetic construct
MPAAKRVKLDGGDKKYSIGLDIGTNSVGWAVITDEYKVPSKKFKVLGNTDRHSIKKNLIGALLFDSGETAEATRLKRTARRRYTRRKNRICYLQEIFSNEMAKVDDSFFHRLEESFLVEEDKKHERHPIFGNIVDEVAYHEKYPTIYHLRKKLVDSTDKADLRLIYLALAHMIKFRGHFLIEGDLNPDNSDVDKLFIQLVQTYNQLFEENPINASGVDAKAILSARLSKSRRLENLIAQLPGEKKNGLFGNLIALSLGLTPNFKSNFDLAEDAKLQLSKDTYDDDLDNLLAQIGDQYADLFLAAKNLSDAILLSDILRVNTEITKAPLSASMIKRYDEHHQDLTLLKALVRQQLPEKYKEIFFDQSKNGYAGYIDGGASQEEFYKFIKPILEKMDGTEELLVKLNREDLLRKQRTFDNGSIPHQIHLGELHAILRRQEDFYPFLKDNREKIEKILTFRIPYYVGPLARGNSRFAWMTRKSEETITPWNFEEVVDKGASAQSFIERMTNFDKNLPNEKVLPKHSLLYEYFTVYNELTKVKYVTEGMRKPAFLSGEQKKAIVDLLFKTNRKVTVKQLKEDYFKKIECFDSVEISGVEDRFNASLGTYHDLLKIIKDKDFLDNEENEDILEDIVLTLTLFEDREMIEERLKTYAHLFDDKVMKQLKRRRYTGWGRLSRKLINGIRDKQSGKTILDFLKSDGFANRNFMQLIHDDSLTFKEDIQKAQVSGQGDSLHEHIANLAGSPAIKKGILQTVKVVDELVKVMGRHKPENIVIEMARENQTTQKGQKNSRERMKRIEEGIKELGSQILKEHPVENTQLQNEKLYLYYLQNGRDMYVDQELDINRLSDYDVDHIVPQSFLKDDSIDNKVLTRSDKARGKSDNVPSEEVVKKMKNYWRQLLNAKLITQRKFDNLTKAERGGLSELDKAGFIKRQLVETRQITKHVAQILDSRMNTKYDENDKLIREVKVITLKSKLVSDFRKDFQFYKVREINNYHHAHDAYLNAVVGTALIKKYPKLESEFVYGDYKVYDVRKMIAKSEQEIGKATAKYFFYSNIMNFFKTEITLANGEIRKRPLIETNGETGEIVWDKGRDFATVRKVLSMPQVNIVKKTEVQTGGFSKESILPKRNSDKLIARKKDWDPKKYGGFDSPTVAYSVLVVAKVEKGKSKKLKSVKELLGITIMERSSFEKNPIDFLEAKGYKEVKKDLIIKLPKYSLFELENGRKRMLASAGELQKGNELALPSKYVNFLYLASHYEKLKGSPEDNEQKQLFVEQHKHYLDEIIEQISEFSKRVILADANLDKVLSAYNKHRDKPIREQAENIIHLFTLTNLGAPAAFKYFDTTIDRKRYTSTKEVLDATLIHQSITGLYETRIDLSQLGGDGGEAAAKGGSPAPGGLLGRDLLTKLKAQIQFSTEGPQVTWEDRPAMCLVLNLEEEYRLHEKPVPPSIDPSWLQLFPMVWAEKAGMGLANQVPPVVVELKSDASPVAVRQYPMSKEAREGIRPHIQRFLDLGILVPCQSPWNTPLLPVKKPGTNDYRPVQDLREVNKRVQDIHPTVPNPYNLLSSLPPSHTWYSVLDLKDAFFCLKLHPNSQPLFAFEWRDPEKGNTGQLTWTRLPQGFKNSPTLFNEALHRDLASFRALNPQVVMLQYVDDLLVAAPTYRDCKEGTRRLLQELSKLGYRVSAKKAQLCREEVTYLGYLLKGGKRWLTPARKATVMKIPTPTTPRQVREFLGKAGFCRLFIPGFASLAAPLYPLTRPKVPFTWTEAHQEAFGRIKEALLSAPALALPDLTKPFALYVDEKEGVARGVLTQTLGPWRRPVAYLSKKLDPVASGWPTCLKAIAAVALLLKDADKLTLGQNVLVIAPHNLESIVRQPPDRWMTNARMTHYQSLLLNERVSFAPPAILNPATLLPVESDDTPIHICSEILAEETGTRPDLRDQPLPGVPAWYTDGSSFIMDGRRQAGAAIVDNKRTVWASNLPEGTSAQKAELIALTQALRLAEGKSINIYTDSRYAFATAHVHGAIYKQRGWLTSAGKDIKNKEEILALLEAIHLPKRVAIIHCPGHQRGTDPVATGNRKADEAAKQAAQSTRILTETTKNAGKRTADGSEFEKRTADGSEFESPKKKAKVE

SEQ ID NO: 7217 - protein, 2218 aa, synthetic construct
MPAAKRVKLDGGDKKYSIGLDIGTNSVGWAVITDEYKVPSKKFKVLGNTDRHSIKKNLIGALLFDSGETAEATRLKRTARRRYTRRKNRICYLQEIFSNEMAKVDDSFFHRLEESFLVEEDKKHERHPIFGNIVDEVAYHEKYPTIYHLRKKLVDSTDKADLRLIYLALAHMIKFRGHFLIEGDLNPDNSDVDKLFIQLVQTYNQLFEENPINASGVDAKAILSARLSKSRRLENLIAQLPGEKKNGLFGNLIALSLGLTPNFKSNFDLAEDAKLQLSKDTYDDDLDNLLAQIGDQYADLFLAAKNLSDAILLSDILRVNTEITKAPLSASMIKRYDEHHQDLTLLKALVRQQLPEKYKEIFFDQSKNGYAGYIDGGASQEEFYKFIKPILEKMDGTEELLVKLNREDLLRKQRTFDNGSIPHQIHLGELHAILRRQEDFYPFLKDNREKIEKILTFRIPYYVGPLARGNSRFAWMTRKSEETITPWNFEEVVDKGASAQSFIERMTNFDKNLPNEKVLPKHSLLYEYFTVYNELTKVKYVTEGMRKPAFLSGEQKKAIVDLLFKTNRKVTVKQLKEDYFKKIECFDSVEISGVEDRFNASLGTYHDLLKIIKDKDFLDNEENEDILEDIVLTLTLFEDREMIEERLKTYAHLFDDKVMKQLKRRRYTGWGRLSRKLINGIRDKQSGKTILDFLKSDGFANRNFMQLIHDDSLTFKEDIQKAQVSGQGDSLHEHIANLAGSPAIKKGILQTVKVVDELVKVMGRHKPENIVIEMARENQTTQKGQKNSRERMKRIEEGIKELGSQILKEHPVENTQLQNEKLYLYYLQNGRDMYVDQELDINRLSDYDVDHIVPQSFLKDDSIDNKVLTRSDKARGKSDNVPSEEVVKKMKNYWRQLLNAKLITQRKFDNLTKAERGGLSELDKAGFIKRQLVETRQITKHVAQILDSRMNTKYDENDKLIREVKVITLKSKLVSDFRKDFQFYKVREINNYHHAHDAYLNAVVGTALIKKYPKLESEFVYGDYKVYDVRKMIAKSEQEIGKATAKYFFYSNIMNFFKTEITLANGEIRKRPLIETNGETGEIVWDKGRDFATVRKVLSMPQVNIVKKTEVQTGGFSKESILPKRNSDKLIARKKDWDPKKYGGFDSPTVAYSVLVVAKVEKGKSKKLKSVKELLGITIMERSSFEKNPIDFLEAKGYKEVKKDLIIKLPKYSLFELENGRKRMLASAGELQKGNELALPSKYVNFLYLASHYEKLKGSPEDNEQKQLFVEQHKHYLDEIIEQISEFSKRVILADANLDKVLSAYNKHRDKPIREQAENIIHLFTLTNLGAPAAFKYFDTTIDRKRYTSTKEVLDATLIHQSITGLYETRIDLSQLGGDGGEAAAKGGSPAPGGTLGDQGSRGSDPLPEPRVTLTVEGIPTEFLVNTGAEHSVLTKPMGKMGSKRTVVAGATGSKVYPWTTKRLLKIGQKQVTHSFLVIPECPAPLLGRDLLTKLKAQIQFSTEGPQVTWEDRPAMCLVLNLEEEYRLHEKPVPPSIDPSWLQLFPMVWAEKAGMGLANQVPPVVVELKSDASPVAVRQYPMSKEAREGIRPHIQRFLDLGILVPCQSPWNTPLLPVKKPGTNDYRPVQDLREVNKRVQDIHPTVPNPYNLLSSLPPSHTWYSVLDLKDAFFCLKLHPNSQPLFAFEWRDPEKGNTGQLTWTRLPQGFKNSPTLFNEALHRDLASFRALNPQVVMLQYVDDLLVAAPTYRDCKEGTRRLLQELSKLGYRVSAKKAQLCREEVTYLGYLLKGGKRWLTPARKATVMKIPTPTTPRQVREFLGTAGFCRLWIPGFASLAAPLYPLTRPKVPFTWTEAHQEAFGRIKEALLSAPALALPDLTKPFALYVDEKEGVARGVLTQTLGPWRRPVAYLSKKLDPVASGWPTCLKAIAAVALLLKDADKLTLGQNVLVIAPHNLESIVRQPPDRWMTNARMTHYQSLLLNERVSFAPPAILNPATLLPVESDDTPIHICSEILAEETGTRPDLRDQPLPGVPAWYTDGSSFIMDGRRQAGAAIVDNKRTVWASNLPEGTSAQKAELIALTQALRLAEGKSINIYTDSRYAFATAHVHGAIYKQRGWLTSAGKDIKNKEEILALLEAIHLPKRVAIIHCPGHQRGTDPVATGNRKADEAAKQAAQSTRILTETTKNAGKRTADGSEFEKRTADGSEFESPKKKAKVE

SEQ ID NO: 7218 - protein, 2096 aa, synthetic construct
MPAAKRVKLDGGDKKYSIGLDIGTNSVGWAVITDEYKVPSKKFKVLGNTDRHSIKKNLIGALLFDSGETAEATRLKRTARRRYTRRKNRICYLQEIFSNEMAKVDDSFFHRLEESFLVEEDKKHERHPIFGNIVDEVAYHEKYPTIYHLRKKLVDSTDKADLRLIYLALAHMIKFRGHFLIEGDLNPDNSDVDKLFIQLVQTYNQLFEENPINASGVDAKAILSARLSKSRRLENLIAQLPGEKKNGLFGNLIALSLGLTPNFKSNFDLAEDAKLQLSKDTYDDDLDNLLAQIGDQYADLFLAAKNLSDAILLSDILRVNTEITKAPLSASMIKRYDEHHQDLTLLKALVRQQLPEKYKEIFFDQSKNGYAGYIDGGASQEEFYKFIKPILEKMDGTEELLVKLNREDLLRKQRTFDNGSIPHQIHLGELHAILRRQEDFYPFLKDNREKIEKILTFRIPYYVGPLARGNSRFAWMTRKSEETITPWNFEEVVDKGASAQSFIERMTNFDKNLPNEKVLPKHSLLYEYFTVYNELTKVKYVTEGMRKPAFLSGEQKKAIVDLLFKTNRKVTVKQLKEDYFKKIECFDSVEISGVEDRFNASLGTYHDLLKIIKDKDFLDNEENEDILEDIVLTLTLFEDREMIEERLKTYAHLFDDKVMKQLKRRRYTGWGRLSRKLINGIRDKQSGKTILDFLKSDGFANRNFMQLIHDDSLTFKEDIQKAQVSGQGDSLHEHIANLAGSPAIKKGILQTVKVVDELVKVMGRHKPENIVIEMARENQTTQKGQKNSRERMKRIEEGIKELGSQILKEHPVENTQLQNEKLYLYYLQNGRDMYVDQELDINRLSDYDVDHIVPQSFLKDDSIDNKVLTRSDKARGKSDNVPSEEVVKKMKNYWRQLLNAKLITQRKFDNLTKAERGGLSELDKAGFIKRQLVETRQITKHVAQILDSRMNTKYDENDKLIREVKVITLKSKLVSDFRKDFQFYKVREINNYHHAHDAYLNAVVGTALIKKYPKLESEFVYGDYKVYDVRKMIAKSEQEIGKATAKYFFYSNIMNFFKTEITLANGEIRKRPLIETNGETGEIVWDKGRDFATVRKVLSMPQVNIVKKTEVQTGGFSKESILPKRNSDKLIARKKDWDPKKYGGFDSPTVAYSVLVVAKVEKGKSKKLKSVKELLGITIMERSSFEKNPIDFLEAKGYKEVKKDLIIKLPKYSLFELENGRKRMLASAGELQKGNELALPSKYVNFLYLASHYEKLKGSPEDNEQKQLFVEQHKHYLDEIIEQISEFSKRVILADANLDKVLSAYNKHRDKPIREQAENIIHLFTLTNLGAPAAFKYFDTTIDRKRYTSTKEVLDATLIHQSITGLYETRIDLSQLGGDGGEAAAKGGSPAPGGTLNLEDEYRLYETSAEPEVSPGSTWLSDFPQAWAETGGMGLAVRQAPLIIPLKATSTPVSIKQYPMSQEAKLGIKPHIQRLLDQGILVPCQSPWNTPLLPVKKPGTNDYRPVQDLREVNKRVEDIHPTVPNPYNLLSGLPPSHRWYTVLDLKDAFFCLRLHPTSQPLFAFEWRDPGMGISGQLTWTRLPQGFKNSPTLFNEALHRDLADFRIQHPDLILLQYVDDILLAATSELDCQQGTRALLLTLGNLGYRASAKKAQLCQKQVKYLGYLLKEGQRWLTEARKETVMGQPTPKTPRQLREFLGTAGFCRLWIPGFAEMAAPLYPLTKPGTLFNWGPDQQKAYQEIKQALLTAPALGLPDLTKPFELFVDEKQGYAKGVLTQKLGPWRRPVAYLSKKLDPVAAGWPPCLRMVAAIAVLRKDAGKLTMGQPLVILAPHAVEALVKQPPDRWLSNARMTHYQAMLLDTDRVQFGPVVALNPATLLPLPEEGAPHDCLEILAETHGTRPDLTDQPIPDADHTWYTDGSSFLQEGQRKAGAAVTTETEVIWARALPAGTSAQRAELIALTQALKMAEGKRLNVYTDSRYAFATAHIHGEIYRRRGWLTSEGREIKNKSEILALLKALFLPKRLSIIHCLGHQKGDSAEARGNRLADQAAREAAIKTPPDTSTLLAGKRTADGSEFEKRTADGSEFESPKKKAKVE

SEQ ID NO: 7219 - protein, 2096 aa, synthetic construct
MPAAKRVKLDGGDKKYSIGLDIGTNSVGWAVITDEYKVPSKKFKVLGNTDRHSIKKNLIGALLFDSGETAEATRLKRTARRRYTRRKNRICYLQEIFSNEMAKVDDSFFHRLEESFLVEEDKKHERHPIFGNIVDEVAYHEKYPTIYHLRKKLVDSTDKADLRLIYLALAHMIKFRGHFLIEGDLNPDNSDVDKLFIQLVQTYNQLFEENPINASGVDAKAILSARLSKSRRLENLIAQLPGEKKNGLFGNLIALSLGLTPNFKSNFDLAEDAKLQLSKDTYDDDLDNLLAQIGDQYADLFLAAKNLSDAILLSDILRVNTEITKAPLSASMIKRYDEHHQDLTLLKALVRQQLPEKYKEIFFDQSKNGYAGYIDGGASQEEFYKFIKPILEKMDGTEELLVKLNREDLLRKQRTFDNGSIPHQIHLGELHAILRRQEDFYPFLKDNREKIEKILTFRIPYYVGPLARGNSRFAWMTRKSEETITPWNFEEVVDKGASAQSFIERMTNFDKNLPNEKVLPKHSLLYEYFTVYNELTKVKYVTEGMRKPAFLSGEQKKAIVDLLFKTNRKVTVKQLKEDYFKKIECFDSVEISGVEDRFNASLGTYHDLLKIIKDKDFLDNEENEDILEDIVLTLTLFEDREMIEERLKTYAHLFDDKVMKQLKRRRYTGWGRLSRKLINGIRDKQSGKTILDFLKSDGFANRNFMQLIHDDSLTFKEDIQKAQVSGQGDSLHEHIANLAGSPAIKKGILQTVKVVDELVKVMGRHKPENIVIEMARENQTTQKGQKNSRERMKRIEEGIKELGSQILKEHPVENTQLQNEKLYLYYLQNGRDMYVDQELDINRLSDYDVDHIVPQSFLKDDSIDNKVLTRSDKARGKSDNVPSEEVVKKMKNYWRQLLNAKLITQRKFDNLTKAERGGLSELDKAGFIKRQLVETRQITKHVAQILDSRMNTKYDENDKLIREVKVITLKSKLVSDFRKDFQFYKVREINNYHHAHDAYLNAVVGTALIKKYPKLESEFVYGDYKVYDVRKMIAKSEQEIGKATAKYFFYSNIMNFFKTEITLANGEIRKRPLIETNGETGEIVWDKGRDFATVRKVLSMPQVNIVKKTEVQTGGFSKESILPKRNSDKLIARKKDWDPKKYGGFDSPTVAYSVLVVAKVEKGKSKKLKSVKELLGITIMERSSFEKNPIDFLEAKGYKEVKKDLIIKLPKYSLFELENGRKRMLASAGELQKGNELALPSKYVNFLYLASHYEKLKGSPEDNEQKQLFVEQHKHYLDEIIEQISEFSKRVILADANLDKVLSAYNKHRDKPIREQAENIIHLFTLTNLGAPAAFKYFDTTIDRKRYTSTKEVLDATLIHQSITGLYETRIDLSQLGGDGGEAAAKGGSPAPGGTLNLEDEYRLYETSAEPEVSPGSTWLSDFPQAWAETGGMGLAVRQAPLIIPLKATSTPVSIKQYPMSQEAKLGIKPHIQRLLDQGILVPCQSPWNTPLLPVKKPGTNDYRPVQDLREVNKRVEDIHPTVPNPYNLLSGLPPSHRWYTVLDLKDAFFCLRLHPTSQPLFAFEWRDPGMGISGQLTWTRLPQGFKNSPTLFNEALHRDLADFRIQHPDLILLQYVDDILLAATSELDCQQGTRALLLTLGNLGYRASAKKAQLCQKQVKYLGYLLKEGQRWLTEARKETVMGQPTPKTPRQLREFLGKAGFCRLFIPGFAEMAAPLYPLTKPGTLFNWGPDQQKAYQEIKQALLTAPALGLPDLTKPFELFVDEKQGYAKGVLTQKLGPWRRPVAYLSKKLDPVAAGWPPCLRMVAAIAVLRKDAGKLTMGQPLVILAPHAVEALVKQPPDRWLSNARMTHYQAMLLDTDRVQFGPVVALNPATLLPLPEEGAPHDCLEILAETHGTRPDLTDQPIPDADHTWYTDGSSFLQEGQRKAGAAVTTETEVIWARALPAGTSAQRAELIALTQALKMAEGKRLNVYTDSRYAFATAHIHGEIYRRRGWLTSEGREIKNKSEILALLKALFLPKRLSIIHCLGHQKGDSAEARGNRLADQAAREAAIKTPPDTSTLLAGKRTADGSEFEKRTADGSEFESPKKKAKVE

SEQ ID NO: 7220 - protein, 2096 aa, synthetic construct
MPAAKRVKLDGGDKKYSIGLDIGTNSVGWAVITDEYKVPSKKFKVLGNTDRHSIKKNLIGALLFDSGETAEATRLKRTARRRYTRRKNRICYLQEIFSNEMAKVDDSFFHRLEESFLVEEDKKHERHPIFGNIVDEVAYHEKYPTIYHLRKKLVDSTDKADLRLIYLALAHMIKFRGHFLIEGDLNPDNSDVDKLFIQLVQTYNQLFEENPINASGVDAKAILSARLSKSRRLENLIAQLPGEKKNGLFGNLIALSLGLTPNFKSNFDLAEDAKLQLSKDTYDDDLDNLLAQIGDQYADLFLAAKNLSDAILLSDILRVNTEITKAPLSASMIKRYDEHHQDLTLLKALVRQQLPEKYKEIFFDQSKNGYAGYIDGGASQEEFYKFIKPILEKMDGTEELLVKLNREDLLRKQRTFDNGSIPHQIHLGELHAILRRQEDFYPFLKDNREKIEKILTFRIPYYVGPLARGNSRFAWMTRKSEETITPWNFEEVVDKGASAQSFIERMTNFDKNLPNEKVLPKHSLLYEYFTVYNELTKVKYVTEGMRKPAFLSGEQKKAIVDLLFKTNRKVTVKQLKEDYFKKIECFDSVEISGVEDRFNASLGTYHDLLKIIKDKDFLDNEENEDILEDIVLTLTLFEDREMIEERLKTYAHLFDDKVMKQLKRRRYTGWGRLSRKLINGIRDKQSGKTILDFLKSDGFANRNFMQLIHDDSLTFKEDIQKAQVSGQGDSLHEHIANLAGSPAIKKGILQTVKVVDELVKVMGRHKPENIVIEMARENQTTQKGQKNSRERMKRIEEGIKELGSQILKEHPVENTQLQNEKLYLYYLQNGRDMYVDQELDINRLSDYDVDHIVPQSFLKDDSIDNKVLTRSDKARGKSDNVPSEEVVKKMKNYWRQLLNAKLITQRKFDNLTKAERGGLSELDKAGFIKRQLVETRQITKHVAQILDSRMNTKYDENDKLIREVKVITLKSKLVSDFRKDFQFYKVREINNYHHAHDAYLNAVVGTALIKKYPKLESEFVYGDYKVYDVRKMIAKSEQEIGKATAKYFFYSNIMNFFKTEITLANGEIRKRPLIETNGETGEIVWDKGRDFATVRKVLSMPQVNIVKKTEVQTGGFSKESILPKRNSDKLIARKKDWDPKKYGGFDSPTVAYSVLVVAKVEKGKSKKLKSVKELLGITIMERSSFEKNPIDFLEAKGYKEVKKDLIIKLPKYSLFELENGRKRMLASAGELQKGNELALPSKYVNFLYLASHYEKLKGSPEDNEQKQLFVEQHKHYLDEIIEQISEFSKRVILADANLDKVLSAYNKHRDKPIREQAENIIHLFTLTNLGAPAAFKYFDTTIDRKRYTSTKEVLDATLIHQSITGLYETRIDLSQLGGDGGEAAAKGGSPAPGGTLGIEDEYRLHETSTEPDVSLGSTWLSDFPQAWAETGGMGLAVRQAPLIIPLKATSTPVSIQQYPMSHEARLGIKPHIQRLLDQGILVPCQSPWNTPLLPVKKPGTNDYRPVQDLREVNKRVEDIHPTVPNPYNLLSGLPPSHQWYTVLDLKDAFFCLRLHPTSQPLFAFEWRDPGMGISGQLTWTRLPQGFKNSPTLFNEALHRDLADFRIQHPDLILLQYVDDILLAATSELDCQQGTRALLQTLGDLGYRASAKKAQICQKQVKYLGYLLREGQRWLTEARKETVMGQPVPKTPRQLREFLGTAGFCRLWIPGFAEMAAPLYPLTKPGTLFSWGPDQQKAYQEIKQALLTAPALGLPDLTKPFELFVDEKQGYAKGVLTQKLGPWRRPVAYLSKKLDPVAAGWPPCLRMVAAIAVLTKDAGKLTMGQPLVILAPHAVEALVKQPPDRWLSNARMTHYQAMLLDTDRVQFGPVVALNPATLLPLPEEGAPHDCLEILAETHGTRPDLTDQPIPDADHTWYTDGSSFLQEGQRKAGAAVTTETEVIWAGALPAGTSAQRAELIALTQALKMAEGKRLNVYTDSRYAFATAHIHGEIYRRRGWLTSEGREIKNKSEILALLKALFLPKRLSIIHCLGHQKGDSAEARGNRLADQAAREAAIKTPPDTSTLLAGKRTADGSEFEKRTADGSEFESPKKKAKVE

SEQ ID NO: 7221 - protein, 2096 aa, synthetic construct
MPAAKRVKLDGGDKKYSIGLDIGTNSVGWAVITDEYKVPSKKFKVLGNTDRHSIKKNLIGALLFDSGETAEATRLKRTARRRYTRRKNRICYLQEIFSNEMAKVDDSFFHRLEESFLVEEDKKHERHPIFGNIVDEVAYHEKYPTIYHLRKKLVDSTDKADLRLIYLALAHMIKFRGHFLIEGDLNPDNSDVDKLFIQLVQTYNQLFEENPINASGVDAKAILSARLSKSRRLENLIAQLPGEKKNGLFGNLIALSLGLTPNFKSNFDLAEDAKLQLSKDTYDDDLDNLLAQIGDQYADLFLAAKNLSDAILLSDILRVNTEITKAPLSASMIKRYDEHHQDLTLLKALVRQQLPEKYKEIFFDQSKNGYAGYIDGGASQEEFYKFIKPILEKMDGTEELLVKLNREDLLRKQRTFDNGSIPHQIHLGELHAILRRQEDFYPFLKDNREKIEKILTFRIPYYVGPLARGNSRFAWMTRKSEETITPWNFEEVVDKGASAQSFIERMTNFDKNLPNEKVLPKHSLLYEYFTVYNELTKVKYVTEGMRKPAFLSGEQKKAIVDLLFKTNRKVTVKQLKEDYFKKIECFDSVEISGVEDRFNASLGTYHDLLKIIKDKDFLDNEENEDILEDIVLTLTLFEDREMIEERLKTYAHLFDDKVMKQLKRRRYTGWGRLSRKLINGIRDKQSGKTILDFLKSDGFANRNFMQLIHDDSLTFKEDIQKAQVSGQGDSLHEHIANLAGSPAIKKGILQTVKVVDELVKVMGRHKPENIVIEMARENQTTQKGQKNSRERMKRIEEGIKELGSQILKEHPVENTQLQNEKLYLYYLQNGRDMYVDQELDINRLSDYDVDHIVPQSFLKDDSIDNKVLTRSDKARGKSDNVPSEEVVKKMKNYWRQLLNAKLITQRKFDNLTKAERGGLSELDKAGFIKRQLVETRQITKHVAQILDSRMNTKYDENDKLIREVKVITLKSKLVSDFRKDFQFYKVREINNYHHAHDAYLNAVVGTALIKKYPKLESEFVYGDYKVYDVRKMIAKSEQEIGKATAKYFFYSNIMNFFKTEITLANGEIRKRPLIETNGETGEIVWDKGRDFATVRKVLSMPQVNIVKKTEVQTGGFSKESILPKRNSDKLIARKKDWDPKKYGGFDSPTVAYSVLVVAKVEKGKSKKLKSVKELLGITIMERSSFEKNPIDFLEAKGYKEVKKDLIIKLPKYSLFELENGRKRMLASAGELQKGNELALPSKYVNFLYLASHYEKLKGSPEDNEQKQLFVEQHKHYLDEIIEQISEFSKRVILADANLDKVLSAYNKHRDKPIREQAENIIHLFTLTNLGAPAAFKYFDTTIDRKRYTSTKEVLDATLIHQSITGLYETRIDLSQLGGDGGEAAAKGGSPAPGGTLNIEDEYRLHETSKGPDVPLGSTWLSDFPQAWAETGGMGLAVRQAPLIIPLKATSTPVSIKQYPMSQEARLGIKPHIQRLLDQGILVPCQSPWNTPLLPVKKPGTNDYRPVQDLREVNKRVEDIHPTVPNPYNLLSGLPPSHQWYTVLDLKDAFFCLRLHPTSQSLFAFEWRDPEMGISGQLTWTRLPQGFKNSPTLFDEALHRDLADFRIQHPDLILLQYVDDLLLAATSELDCQQGTRALLQTLGDLGYRASAKKAQICQKQVKYLGYLLKEGQRWLTEARKETVMGQPTPKTPRQLREFLGTAGFCRLWIPGFAEMAAPLYPLTKTGTLFEWGPDQQKAYQEIKQALLTAPALGLPDLTKPFELFVDEKQGYAKGVLTQKLGPWRRPVAYLSKKLDPVAAGWPPCLRMVAAIAVLTKDAGKLTMGQPLVILAPHAVEALVKQPPDRWLSNARMTHYQALLLDTDRVQFGPIVALNPATLLPLPEEGLQHDCLDILAEAHGTRPDLTDQPLPDADHTWYTDGSSFLQEGQRKAGAAVTTETEVVWAKALPAGTSAQRAELIALTQALKMAEGKKLNVYTDSRYAFATAHIHGEIYRRRGLLTSEGKEIKNKDEILALLKALFLPKRLSIIHCPGHQKGNRAEARGNRMADQAAREVATRETPETSTLLAGKRTADGSEFEKRTADGSEFESPKKKAKVE

SEQ ID NO: 7222 - protein, 2096 aa, synthetic construct
MPAAKRVKLDGGDKKYSIGLDIGTNSVGWAVITDEYKVPSKKFKVLGNTDRHSIKKNLIGALLFDSGETAEATRLKRTARRRYTRRKNRICYLQEIFSNEMAKVDDSFFHRLEESFLVEEDKKHERHPIFGNIVDEVAYHEKYPTIYHLRKKLVDSTDKADLRLIYLALAHMIKFRGHFLIEGDLNPDNSDVDKLFIQLVQTYNQLFEENPINASGVDAKAILSARLSKSRRLENLIAQLPGEKKNGLFGNLIALSLGLTPNFKSNFDLAEDAKLQLSKDTYDDDLDNLLAQIGDQYADLFLAAKNLSDAILLSDILRVNTEITKAPLSASMIKRYDEHHQDLTLLKALVRQQLPEKYKEIFFDQSKNGYAGYIDGGASQEEFYKFIKPILEKMDGTEELLVKLNREDLLRKQRTFDNGSIPHQIHLGELHAILRRQEDFYPFLKDNREKIEKILTFRIPYYVGPLARGNSRFAWMTRKSEETITPWNFEEVVDKGASAQSFIERMTNFDKNLPNEKVLPKHSLLYEYFTVYNELTKVKYVTEGMRKPAFLSGEQKKAIVDLLFKTNRKVTVKQLKEDYFKKIECFDSVEISGVEDRFNASLGTYHDLLKIIKDKDFLDNEENEDILEDIVLTLTLFEDREMIEERLKTYAHLFDDKVMKQLKRRRYTGWGRLSRKLINGIRDKQSGKTILDFLKSDGFANRNFMQLIHDDSLTFKEDIQKAQVSGQGDSLHEHIANLAGSPAIKKGILQTVKVVDELVKVMGRHKPENIVIEMARENQTTQKGQKNSRERMKRIEEGIKELGSQILKEHPVENTQLQNEKLYLYYLQNGRDMYVDQELDINRLSDYDVDHIVPQSFLKDDSIDNKVLTRSDKARGKSDNVPSEEVVKKMKNYWRQLLNAKLITQRKFDNLTKAERGGLSELDKAGFIKRQLVETRQITKHVAQILDSRMNTKYDENDKLIREVKVITLKSKLVSDFRKDFQFYKVREINNYHHAHDAYLNAVVGTALIKKYPKLESEFVYGDYKVYDVRKMIAKSEQEIGKATAKYFFYSNIMNFFKTEITLANGEIRKRPLIETNGETGEIVWDKGRDFATVRKVLSMPQVNIVKKTEVQTGGFSKESILPKRNSDKLIARKKDWDPKKYGGFDSPTVAYSVLVVAKVEKGKSKKLKSVKELLGITIMERSSFEKNPIDFLEAKGYKEVKKDLIIKLPKYSLFELENGRKRMLASAGELQKGNELALPSKYVNFLYLASHYEKLKGSPEDNEQKQLFVEQHKHYLDEIIEQISEFSKRVILADANLDKVLSAYNKHRDKPIREQAENIIHLFTLTNLGAPAAFKYFDTTIDRKRYTSTKEVLDATLIHQSITGLYETRIDLSQLGGDGGEAAAKGGSPAPGGTLNIEDEYRLHETSKGPDVPLGSTWLSDFPQAWAETGGMGLAVRQAPLIIPLKATSTPVSIKQYPMSQEARLGIKPHIQRLLDQGILVPCQSPWNTPLLPVKKPGTNDYRPVQDLREVNKRVEDIHPTVPNPYNLLSGLPPSHQWYTVLDLKDAFFCLRLHPTSQSLFAFEWRDPEMGISGQLTWTRLPQGFKNSPTLFNEALHRDLADFRIQHPDLILLQYVDDLLLAATSELDCQQGTRALLQTLGDLGYRASAKKAQICQKQVKYLGYLLKEGQRWLTEARKETVMGQPTPKTPRQLREFLGKAGFCRLFIPGFAEMAAPLYPLTKPGTLFEWGPDQQKAYQEIKQALLTAPALGLPDLTKPFELFVDEKQGYAKGVLTQKLGPWRRPVAYLSKKLDPVAAGWPPCLRMVAAIAVLTKDAGKLTMGQPLVILAPHAVEALVKQPPDRWLSNARMTHYQALLLDTDRVQFGPIVALNPATLLPLPEEGLQHDCLDILAEAHGTRPDLTDQPLPDADHTWYTDGSSFLQEGQRKAGAAVTTETEVVWAKALPAGTSAQRAELIALTQALKMAEGKKLNVYTDSRYAFATAHIHGEIYRRRGWLTSEGKEIKNKDEILALLKALFLPKRLSIIHCPGHQKGNRAEARGNRMADQAAREVATRETPETSTLLAGKRTADGSEFEKRTADGSEFESPKKKAKVE

SEQ ID NO: 7223 - protein, 2087 aa, synthetic construct
MPAAKRVKLDGGDKKYSIGLDIGTNSVGWAVITDEYKVPSKKFKVLGNTDRHSIKKNLIGALLFDSGETAEATRLKRTARRRYTRRKNRICYLQEIFSNEMAKVDDSFFHRLEESFLVEEDKKHERHPIFGNIVDEVAYHEKYPTIYHLRKKLVDSTDKADLRLIYLALAHMIKFRGHFLIEGDLNPDNSDVDKLFIQLVQTYNQLFEENPINASGVDAKAILSARLSKSRRLENLIAQLPGEKKNGLFGNLIALSLGLTPNFKSNFDLAEDAKLQLSKDTYDDDLDNLLAQIGDQYADLFLAAKNLSDAILLSDILRVNTEITKAPLSASMIKRYDEHHQDLTLLKALVRQQLPEKYKEIFFDQSKNGYAGYIDGGASQEEFYKFIKPILEKMDGTEELLVKLNREDLLRKQRTFDNGSIPHQIHLGELHAILRRQEDFYPFLKDNREKIEKILTFRIPYYVGPLARGNSRFAWMTRKSEETITPWNFEEVVDKGASAQSFIERMTNFDKNLPNEKVLPKHSLLYEYFTVYNELTKVKYVTEGMRKPAFLSGEQKKAIVDLLFKTNRKVTVKQLKEDYFKKIECFDSVEISGVEDRFNASLGTYHDLLKIIKDKDFLDNEENEDILEDIVLTLTLFEDREMIEERLKTYAHLFDDKVMKQLKRRRYTGWGRLSRKLINGIRDKQSGKTILDFLKSDGFANRNFMQLIHDDSLTFKEDIQKAQVSGQGDSLHEHIANLAGSPAIKKGILQTVKVVDELVKVMGRHKPENIVIEMARENQTTQKGQKNSRERMKRIEEGIKELGSQILKEHPVENTQLQNEKLYLYYLQNGRDMYVDQELDINRLSDYDVDHIVPQSFLKDDSIDNKVLTRSDKARGKSDNVPSEEVVKKMKNYWRQLLNAKLITQRKFDNLTKAERGGLSELDKAGFIKRQLVETRQITKHVAQILDSRMNTKYDENDKLIREVKVITLKSKLVSDFRKDFQFYKVREINNYHHAHDAYLNAVVGTALIKKYPKLESEFVYGDYKVYDVRKMIAKSEQEIGKATAKYFFYSNIMNFFKTEITLANGEIRKRPLIETNGETGEIVWDKGRDFATVRKVLSMPQVNIVKKTEVQTGGFSKESILPKRNSDKLIARKKDWDPKKYGGFDSPTVAYSVLVVAKVEKGKSKKLKSVKELLGITIMERSSFEKNPIDFLEAKGYKEVKKDLIIKLPKYSLFELENGRKRMLASAGELQKGNELALPSKYVNFLYLASHYEKLKGSPEDNEQKQLFVEQHKHYLDEIIEQISEFSKRVILADANLDKVLSAYNKHRDKPIREQAENIIHLFTLTNLGAPAAFKYFDTTIDRKRYTSTKEVLDATLIHQSITGLYETRIDLSQLGGDGGEAAAKGGSPAPGGIPWLMKKPLQLTTLVPLQEYEERLLKQTMLTGSYKEKLQSLFLKYDALWQHWENQVGHRRIKPHHIATGTVNPRPQKQYPINPKAKASIQTVINDLLKQGVLIQQNSIMNTPVYPVPKPDGKWRMVLDYREVNKTIPLIAAQNQHSAGILSSIFRGKYKTTLDLSNGFWAHSITPESYWLTAFTWLGQQYCWTRLPQGFLNSPALFTADVVDLLKEVPNVQVYVDDIYISHDDPREHLEQLEKVFSLLLNAGYVVSLKKSEIAQHEVEFLGFNITKEGRGLTETFKQKLLNITPPRDLKQLQSILGLLNFARNFIPNFSELVKPLYNIIATANGKYITWTTDNSQQLQNIISMLNSAENLEERNPEVRLIMKVNTSPSAGYIRFYNEFAKRPIMYLNYVYTKAEVKFTNTEKLLTTIHKGLIKALDLGMGQEILVYSPIVSMTKIQKTPLPERKALPIRWITWMSYLEDPRIQFHYDKTLPELQQVPTVTDDIIAKIKHPSEFSMVFYTDGSAIKHPNVNKSHNAGMGIAQVQFKPEFTVINTWSIPLGDHTAQLAEVAAVEFACKKALKIDGPVLIVTDSFYVAESVNKELPYWQSNGFFNNKKKPLKHVSKWKSIADCIQLKPDIIIIHEKGHQPTASTFHTEGNNLADKLATQGSYVVNAGKRTADGSEFEKRTADGSEFESPKKKAKVE

SEQ ID NO: 7224 - protein, 2087 aa, synthetic construct
MPAAKRVKLDGGDKKYSIGLDIGTNSVGWAVITDEYKVPSKKFKVLGNTDRHSIKKNLIGALLFDSGETAEATRLKRTARRRYTRRKNRICYLQEIFSNEMAKVDDSFFHRLEESFLVEEDKKHERHPIFGNIVDEVAYHEKYPTIYHLRKKLVDSTDKADLRLIYLALAHMIKFRGHFLIEGDLNPDNSDVDKLFIQLVQTYNQLFEENPINASGVDAKAILSARLSKSRRLENLIAQLPGEKKNGLFGNLIALSLGLTPNFKSNFDLAEDAKLQLSKDTYDDDLDNLLAQIGDQYADLFLAAKNLSDAILLSDILRVNTEITKAPLSASMIKRYDEHHQDLTLLKALVRQQLPEKYKEIFFDQSKNGYAGYIDGGASQEEFYKFIKPILEKMDGTEELLVKLNREDLLRKQRTFDNGSIPHQIHLGELHAILRRQEDFYPFLKDNREKIEKILTFRIPYYVGPLARGNSRFAWMTRKSEETITPWNFEEVVDKGASAQSFIERMTNFDKNLPNEKVLPKHSLLYEYFTVYNELTKVKYVTEGMRKPAFLSGEQKKAIVDLLFKTNRKVTVKQLKEDYFKKIECFDSVEISGVEDRFNASLGTYHDLLKIIKDKDFLDNEENEDILEDIVLTLTLFEDREMIEERLKTYAHLFDDKVMKQLKRRRYTGWGRLSRKLINGIRDKQSGKTILDFLKSDGFANRNFMQLIHDDSLTFKEDIQKAQVSGQGDSLHEHIANLAGSPAIKKGILQTVKVVDELVKVMGRHKPENIVIEMARENQTTQKGQKNSRERMKRIEEGIKELGSQILKEHPVENTQLQNEKLYLYYLQNGRDMYVDQELDINRLSDYDVDHIVPQSFLKDDSIDNKVLTRSDKARGKSDNVPSEEVVKKMKNYWRQLLNAKLITQRKFDNLTKAERGGLSELDKAGFIKRQLVETRQITKHVAQILDSRMNTKYDENDKLIREVKVITLKSKLVSDFRKDFQFYKVREINNYHHAHDAYLNAVVGTALIKKYPKLESEFVYGDYKVYDVRKMIAKSEQEIGKATAKYFFYSNIMNFFKTEITLANGEIRKRPLIETNGETGEIVWDKGRDFATVRKVLSMPQVNIVKKTEVQTGGFSKESILPKRNSDKLIARKKDWDPKKYGGFDSPTVAYSVLVVAKVEKGKSKKLKSVKELLGITIMERSSFEKNPIDFLEAKGYKEVKKDLIIKLPKYSLFELENGRKRMLASAGELQKGNELALPSKYVNFLYLASHYEKLKGSPEDNEQKQLFVEQHKHYLDEIIEQISEFSKRVILADANLDKVLSAYNKHRDKPIREQAENIIHLFTLTNLGAPAAFKYFDTTIDRKRYTSTKEVLDATLIHQSITGLYETRIDLSQLGGDGGEAAAKGGSPAPGGIPWLMKKPLQLTTLVPLQEYEERLLKQTMLTGSYKEKLQSLFLKYDALWQHWENQVGHRRIKPHHIATGTVNPRPQKQYPINPKAKASIQTVINDLLKQGVLIQQNSIMNTPVYPVPKPDGKWRMVLDYREVNKTIPLIAAQNQHSAGILSSIFRGKYKTTLDLSNGFWAHSITPESYWLTAFTWLGQQYCWTRLPQGFLNSPALFNADVVDLLKEVPNVQVYVDDIYISHDDPREHLEQLEKVFSLLLNAGYVVSLKKSEIAQHEVEFLGFNITKEGRGLTETFKQKLLNITPPRDLKQLQSILGLLNFARNFIPNFSELVKPLYNIIATAPGKYITWTTDNSQQLQNIISMLNSAENLEERNPEVRLIMKVNTSPSAGYIRFYNEFAKRPIMYLNYVYTKAEVKFTNTEKLLTTIHKGLIKALDLGMGQEILVYSPIVSMTKIQKTPLPERKALPIRWITWMSYLEDPRIQFHYDKTLPELQQVPTVTDDIIAKIKHPSEFSMVFYTDGSAIKHPNVNKSHNAGMGIAQVQFKPEFTVINTWSIPLGDHTAQLAEVAAVEFACKKALKIDGPVLIVTDSFYVAESVNKELPYWQSNGFFNNKKKPLKHVSKWKSIADCIQLKPDIIIIHEKGHQPTASTFHTEGNNLADKLATQGSYVVNAGKRTADGSEFEKRTADGSEFESPKKKAKVE

SEQ ID NO: 7225 - protein, 2094 aa, synthetic construct
MPAAKRVKLDGGDKKYSIGLDIGTNSVGWAVITDEYKVPSKKFKVLGNTDRHSIKKNLIGALLFDSGETAEATRLKRTARRRYTRRKNRICYLQEIFSNEMAKVDDSFFHRLEESFLVEEDKKHERHPIFGNIVDEVAYHEKYPTIYHLRKKLVDSTDKADLRLIYLALAHMIKFRGHFLIEGDLNPDNSDVDKLFIQLVQTYNQLFEENPINASGVDAKAILSARLSKSRRLENLIAQLPGEKKNGLFGNLIALSLGLTPNFKSNFDLAEDAKLQLSKDTYDDDLDNLLAQIGDQYADLFLAAKNLSDAILLSDILRVNTEITKAPLSASMIKRYDEHHQDLTLLKALVRQQLPEKYKEIFFDQSKNGYAGYIDGGASQEEFYKFIKPILEKMDGTEELLVKLNREDLLRKQRTFDNGSIPHQIHLGELHAILRRQEDFYPFLKDNREKIEKILTFRIPYYVGPLARGNSRFAWMTRKSEETITPWNFEEVVDKGASAQSFIERMTNFDKNLPNEKVLPKHSLLYEYFTVYNELTKVKYVTEGMRKPAFLSGEQKKAIVDLLFKTNRKVTVKQLKEDYFKKIECFDSVEISGVEDRFNASLGTYHDLLKIIKDKDFLDNEENEDILEDIVLTLTLFEDREMIEERLKTYAHLFDDKVMKQLKRRRYTGWGRLSRKLINGIRDKQSGKTILDFLKSDGFANRNFMQLIHDDSLTFKEDIQKAQVSGQGDSLHEHIANLAGSPAIKKGILQTVKVVDELVKVMGRHKPENIVIEMARENQTTQKGQKNSRERMKRIEEGIKELGSQILKEHPVENTQLQNEKLYLYYLQNGRDMYVDQELDINRLSDYDVDHIVPQSFLKDDSIDNKVLTRSDKARGKSDNVPSEEVVKKMKNYWRQLLNAKLITQRKFDNLTKAERGGLSELDKAGFIKRQLVETRQITKHVAQILDSRMNTKYDENDKLIREVKVITLKSKLVSDFRKDFQFYKVREINNYHHAHDAYLNAVVGTALIKKYPKLESEFVYGDYKVYDVRKMIAKSEQEIGKATAKYFFYSNIMNFFKTEITLANGEIRKRPLIETNGETGEIVWDKGRDFATVRKVLSMPQVNIVKKTEVQTGGFSKESILPKRNSDKLIARKKDWDPKKYGGFDSPTVAYSVLVVAKVEKGKSKKLKSVKELLGITIMERSSFEKNPIDFLEAKGYKEVKKDLIIKLPKYSLFELENGRKRMLASAGELQKGNELALPSKYVNFLYLASHYEKLKGSPEDNEQKQLFVEQHKHYLDEIIEQISEFSKRVILADANLDKVLSAYNKHRDKPIREQAENIIHLFTLTNLGAPAAFKYFDTTIDRKRYTSTKEVLDATLIHQSITGLYETRIDLSQLGGDGGEAAAKGGSPAPGGVLNLEEEYRLHEKPVPSSIDPSWLQLFPTVWAERAGMGLANQVPPVVVELRSGASPVAVRQYPMSKEAREGIRPHIQRFLDLGVLVPCQSPWNTPLLPVKKPGTNDYRPVQDLREINKRVQDIHPTVPNPYNLLSSLPPSHTWYSVLDLKDAFFCLKLHPNSQPLFAFEWRDPEKGNTGQLTWTRLPQGFKNSPTLFDEALHRDLAPFRALNPQVVLLQYVDDLLVAAPTYRDCKEGTQKLLQELSKLGYRVSAKKAQLCQKEVTYLGYLLKEGKRWLTPARKATVMKIPPPTTPRQVREFLGTAGFCRLWIPGFASLAAPLYPLTKESIPFIWTEEHQKAFDRIKEALLSAPALALPDLTKPFTLYVDERAGVARGVLTQTLGPWRRPVAYLSKKLDPVASGWPTCLKAVAAVALLLKDADKLTLGQNVTVIASHSLESIVRQPPDRWMTNARMTHYQSLLLNERVSFAPPAVLNPATLLPVESEATPVHRCSEILAEETGTRRDLKDQPLPGVPAWYTDGSSFIAEGKRRAGAAIVDGKRTVWASSLPEGTSAQKAELVALTQALRLAEGKDINIYTDSRYAFATAHIHGAIYKQRGLLTSAGKDIKNKEEILALLEAIHLPKRVAIIHCPGHQKGNDPVATGNRRADEAAKQAALSTRVLAETTKPAGKRTADGSEFEKRTADGSEFESPKKKAKVE

SEQ ID NO: 7226 - protein, 2094 aa, synthetic construct
MPAAKRVKLDGGDKKYSIGLDIGTNSVGWAVITDEYKVPSKKFKVLGNTDRHSIKKNLIGALLFDSGETAEATRLKRTARRRYTRRKNRICYLQEIFSNEMAKVDDSFFHRLEESFLVEEDKKHERHPIFGNIVDEVAYHEKYPTIYHLRKKLVDSTDKADLRLIYLALAHMIKFRGHFLIEGDLNPDNSDVDKLFIQLVQTYNQLFEENPINASGVDAKAILSARLSKSRRLENLIAQLPGEKKNGLFGNLIALSLGLTPNFKSNFDLAEDAKLQLSKDTYDDDLDNLLAQIGDQYADLFLAAKNLSDAILLSDILRVNTEITKAPLSASMIKRYDEHHQDLTLLKALVRQQLPEKYKEIFFDQSKNGYAGYIDGGASQEEFYKFIKPILEKMDGTEELLVKLNREDLLRKQRTFDNGSIPHQIHLGELHAILRRQEDFYPFLKDNREKIEKILTFRIPYYVGPLARGNSRFAWMTRKSEETITPWNFEEVVDKGASAQSFIERMTNFDKNLPNEKVLPKHSLLYEYFTVYNELTKVKYVTEGMRKPAFLSGEQKKAIVDLLFKTNRKVTVKQLKEDYFKKIECFDSVEISGVEDRFNASLGTYHDLLKIIKDKDFLDNEENEDILEDIVLTLTLFEDREMIEERLKTYAHLFDDKVMKQLKRRRYTGWGRLSRKLINGIRDKQSGKTILDFLKSDGFANRNFMQLIHDDSLTFKEDIQKAQVSGQGDSLHEHIANLAGSPAIKKGILQTVKVVDELVKVMGRHKPENIVIEMARENQTTQKGQKNSRERMKRIEEGIKELGSQILKEHPVENTQLQNEKLYLYYLQNGRDMYVDQELDINRLSDYDVDHIVPQSFLKDDSIDNKVLTRSDKARGKSDNVPSEEVVKKMKNYWRQLLNAKLITQRKFDNLTKAERGGLSELDKAGFIKRQLVETRQITKHVAQILDSRMNTKYDENDKLIREVKVITLKSKLVSDFRKDFQFYKVREINNYHHAHDAYLNAVVGTALIKKYPKLESEFVYGDYKVYDVRKMIAKSEQEIGKATAKYFFYSNIMNFFKTEITLANGEIRKRPLIETNGETGEIVWDKGRDFATVRKVLSMPQVNIVKKTEVQTGGFSKESILPKRNSDKLIARKKDWDPKKYGGFDSPTVAYSVLVVAKVEKGKSKKLKSVKELLGITIMERSSFEKNPIDFLEAKGYKEVKKDLIIKLPKYSLFELENGRKRMLASAGELQKGNELALPSKYVNFLYLASHYEKLKGSPEDNEQKQLFVEQHKHYLDEIIEQISEFSKRVILADANLDKVLSAYNKHRDKPIREQAENIIHLFTLTNLGAPAAFKYFDTTIDRKRYTSTKEVLDATLIHQSITGLYETRIDLSQLGGDGGEAAAKGGSPAPGGVLNLEEEYRLHEKPVPSSIDPSWLQLFPTVWAERAGMGLANQVPPVVVELRSGASPVAVRQYPMSKEAREGIRPHIQRFLDLGVLVPCQSPWNTPLLPVKKPGTNDYRPVQDLREINKRVQDIHPTVPNPYNLLSSLPPSHTWYSVLDLKDAFFCLKLHPNSQPLFAFEWRDPEKGNTGQLTWTRLPQGFKNSPTLFNEALHRDLAPFRALNPQVVLLQYVDDLLVAAPTYRDCKEGTQKLLQELSKLGYRVSAKKAQLCQKEVTYLGYLLKEGKRWLTPARKATVMKIPPPTTPRQVREFLGKAGFCRLFIPGFASLAAPLYPLTKPSIPFIWTEEHQKAFDRIKEALLSAPALALPDLTKPFTLYVDERAGVARGVLTQTLGPWRRPVAYLSKKLDPVASGWPTCLKAVAAVALLLKDADKLTLGQNVTVIASHSLESIVRQPPDRWMTNARMTHYQSLLLNERVSFAPPAVLNPATLLPVESEATPVHRCSEILAEETGTRRDLKDQPLPGVPAWYTDGSSFIAEGKRRAGAAIVDGKRTVWASSLPEGTSAQKAELVALTQALRLAEGKDINIYTDSRYAFATAHIHGAIYKQRGWLTSAGKDIKNKEEILALLEAIHLPKRVAIIHCPGHQKGNDPVATGNRRADEAAKQAALSTRVLAETTKPAGKRTADGSEFEKRTADGSEFESPKKKAKVE

SEQ ID NO: 7227 - protein, 2096 aa, synthetic construct
MPAAKRVKLDGGDKKYSIGLDIGTNSVGWAVITDEYKVPSKKFKVLGNTDRHSIKKNLIGALLFDSGETAEATRLKRTARRRYTRRKNRICYLQEIFSNEMAKVDDSFFHRLEESFLVEEDKKHERHPIFGNIVDEVAYHEKYPTIYHLRKKLVDSTDKADLRLIYLALAHMIKFRGHFLIEGDLNPDNSDVDKLFIQLVQTYNQLFEENPINASGVDAKAILSARLSKSRRLENLIAQLPGEKKNGLFGNLIALSLGLTPNFKSNFDLAEDAKLQLSKDTYDDDLDNLLAQIGDQYADLFLAAKNLSDAILLSDILRVNTEITKAPLSASMIKRYDEHHQDLTLLKALVRQQLPEKYKEIFFDQSKNGYAGYIDGGASQEEFYKFIKPILEKMDGTEELLVKLNREDLLRKQRTFDNGSIPHQIHLGELHAILRRQEDFYPFLKDNREKIEKILTFRIPYYVGPLARGNSRFAWMTRKSEETITPWNFEEVVDKGASAQSFIERMTNFDKNLPNEKVLPKHSLLYEYFTVYNELTKVKYVTEGMRKPAFLSGEQKKAIVDLLFKTNRKVTVKQLKEDYFKKIECFDSVEISGVEDRFNASLGTYHDLLKIIKDKDFLDNEENEDILEDIVLTLTLFEDREMIEERLKTYAHLFDDKVMKQLKRRRYTGWGRLSRKLINGIRDKQSGKTILDFLKSDGFANRNFMQLIHDDSLTFKEDIQKAQVSGQGDSLHEHIANLAGSPAIKKGILQTVKVVDELVKVMGRHKPENIVIEMARENQTTQKGQKNSRERMKRIEEGIKELGSQILKEHPVENTQLQNEKLYLYYLQNGRDMYVDQELDINRLSDYDVDHIVPQSFLKDDSIDNKVLTRSDKARGKSDNVPSEEVVKKMKNYWRQLLNAKLITQRKFDNLTKAERGGLSELDKAGFIKRQLVETRQITKHVAQILDSRMNTKYDENDKLIREVKVITLKSKLVSDFRKDFQFYKVREINNYHHAHDAYLNAVVGTALIKKYPKLESEFVYGDYKVYDVRKMIAKSEQEIGKATAKYFFYSNIMNFFKTEITLANGEIRKRPLIETNGETGEIVWDKGRDFATVRKVLSMPQVNIVKKTEVQTGGFSKESILPKRNSDKLIARKKDWDPKKYGGFDSPTVAYSVLVVAKVEKGKSKKLKSVKELLGITIMERSSFEKNPIDFLEAKGYKEVKKDLIIKLPKYSLFELENGRKRMLASAGELQKGNELALPSKYVNFLYLASHYEKLKGSPEDNEQKQLFVEQHKHYLDEIIEQISEFSKRVILADANLDKVLSAYNKHRDKPIREQAENIIHLFTLTNLGAPAAFKYFDTTIDRKRYTSTKEVLDATLIHQSITGLYETRIDLSQLGGDGGEAAAKGGSPAPGGTLNIEDEYRLHETSKEPDVPLGSTWLSDFPQAWAETGGMGLAVRQAPLIIPLKATSTPVSIKQYPMSQEARLGIKPHIQRLLDQGILVPCQSPWNTPLLPVKKPGTNDYRPVQDLREVNKRVEDIHPTVPNPYNLLSGLPPSHQWYTVLDLKDAFFCLRLHPTSQPLFAFEWRDPEMGISGQLTWTRLPQGFKNSPTLFNEALHRDLADFRIQHPDLILLQYVDDLLLAATSEQDCQRGTRALLQTLGNLGYRASAKKAQICQKQVKYLGYLLKEGQRWLTEARKETVMGQPTPKTPRQLREFLGTAGFCRLWIPGFAEMAAPLYPLTKPGTLFNWGPDQQKAYQEIKQALLTAPALGLPDLTKPFELFVDEKQGYAKGVLTQKLGPWRRPVAYLSKKLDPVAAGWPPCLRMVAAIAVLTKDAGKLTMGQPLVILAPHAVEALVKQPPDRWLSNARMTHYQAMLLDTDRVQFGPVVALNPATLLPLPEKEAPHDCLEILAETHGTRPDLTDQPIPDADYTWYTDGSSFLQEGQRRAGAAVTTETEVIWARALPAGTSAQRAELIALTQALKMAEGKKLNVYTDSRYAFATAHVHGEIYRRRGWLTSEGREIKNKNEILALLKALFLPKRLSIIHCPGHQKGNSAEARGNRMADQAAREAAMKAVLETSTLLAGKRTADGSEFEKRTADGSEFESPKKKAKVE

SEQ ID NO: 7228 - protein, 2087 aa, synthetic construct
MPAAKRVKLDGGDKKYSIGLDIGTNSVGWAVITDEYKVPSKKFKVLGNTDRHSIKKNLIGALLFDSGETAEATRLKRTARRRYTRRKNRICYLQEIFSNEMAKVDDSFFHRLEESFLVEEDKKHERHPIFGNIVDEVAYHEKYPTIYHLRKKLVDSTDKADLRLIYLALAHMIKFRGHFLIEGDLNPDNSDVDKLFIQLVQTYNQLFEENPINASGVDAKAILSARLSKSRRLENLIAQLPGEKKNGLFGNLIALSLGLTPNFKSNFDLAEDAKLQLSKDTYDDDLDNLLAQIGDQYADLFLAAKNLSDAILLSDILRVNTEITKAPLSASMIKRYDEHHQDLTLLKALVRQQLPEKYKEIFFDQSKNGYAGYIDGGASQEEFYKFIKPILEKMDGTEELLVKLNREDLLRKQRTFDNGSIPHQIHLGELHAILRRQEDFYPFLKDNREKIEKILTFRIPYYVGPLARGNSRFAWMTRKSEETITPWNFEEVVDKGASAQSFIERMTNFDKNLPNEKVLPKHSLLYEYFTVYNELTKVKYVTEGMRKPAFLSGEQKKAIVDLLFKTNRKVTVKQLKEDYFKKIECFDSVEISGVEDRFNASLGTYHDLLKIIKDKDFLDNEENEDILEDIVLTLTLFEDREMIEERLKTYAHLFDDKVMKQLKRRRYTGWGRLSRKLINGIRDKQSGKTILDFLKSDGFANRNFMQLIHDDSLTFKEDIQKAQVSGQGDSLHEHIANLAGSPAIKKGILQTVKVVDELVKVMGRHKPENIVIEMARENQTTQKGQKNSRERMKRIEEGIKELGSQILKEHPVENTQLQNEKLYLYYLQNGRDMYVDQELDINRLSDYDVDHIVPQSFLKDDSIDNKVLTRSDKARGKSDNVPSEEVVKKMKNYWRQLLNAKLITQRKFDNLTKAERGGLSELDKAGFIKRQLVETRQITKHVAQILDSRMNTKYDENDKLIREVKVITLKSKLVSDFRKDFQFYKVREINNYHHAHDAYLNAVVGTALIKKYPKLESEFVYGDYKVYDVRKMIAKSEQEIGKATAKYFFYSNIMNFFKTEITLANGEIRKRPLIETNGETGEIVWDKGRDFATVRKVLSMPQVNIVKKTEVQTGGFSKESILPKRNSDKLIARKKDWDPKKYGGFDSPTVAYSVLVVAKVEKGKSKKLKSVKELLGITIMERSSFEKNPIDFLEAKGYKEVKKDLIIKLPKYSLFELENGRKRMLASAGELQKGNELALPSKYVNFLYLASHYEKLKGSPEDNEQKQLFVEQHKHYLDEIIEQISEFSKRVILADANLDKVLSAYNKHRDKPIREQAENIIHLFTLTNLGAPAAFKYFDTTIDRKRYTSTKEVLDATLIHQSITGLYETRIDLSQLGGDGGEAAAKPAPGGSGGVPWILKKPLELTIKLDLEEQQGTLLNNSILSKKGKEELKQLFEKYSALWQSWENQVGHRRIRPHKIATGTVKPTPQKQYHINPKAKPDIQIVINDLLKQGVLIQKESTMNTPVYPVPKPNGRWRMVLDYRAVNKVTPLIAVQNQHSYGILGSLFKGRYKTTIDLSNGFWAHPIVPEDYWITAFTWQGKQYCWTVLPQGFLNSPGLFNGDVVDLLQGIPNVEVYVDDVYISHDSEKEHLEYLDILFNRLKEAGYIISLKKSNIANSIVDFLGFQITNEGRGLTDTFKEKLENITAPTTLKQLQSILGLLNFARNFIPDFTELIAPLYALIPKSPKNYVPWQIEHSTTLETLITKLNGAEYLQGRKGDKTLIMKVNASYTTGYIRYYNEGEKKPISYVSIVFSKTELKFTELEKLLTTVHKGLLKALDLSMGQNIHVYSPIVSMQNIQKTPQTAKKALASRWLSWLSYLEDPRIRFFYDPQMPALKDLPAVDTGKDNKKHPSNFQHIFYTDGSAITSPTKEGHLNAGMGIVYFINKDGNLQKQQEWSISLGNHTAQFAEIAAFEFALKKCLPLGGNILVVTDSNYVAKAYNEELDVWASNGFVNNRKKPLKHISKWKSVADLKRLRPDVVVTHEPGHQKLDSSPHAYGNNLADQLATQASFKVHAGKRTADGSEFEKRTADGSEFESPKKKAKVE

SEQ ID NO: 7229 - protein, 2176 aa, synthetic construct
MPAAKRVKLDGGDKKYSIGLDIGTNSVGWAVITDEYKVPSKKFKVLGNTDRHSIKKNLIGALLFDSGETAEATRLKRTARRRYTRRKNRICYLQEIFSNEMAKVDDSFFHRLEESFLVEEDKKHERHPIFGNIVDEVAYHEKYPTIYHLRKKLVDSTDKADLRLIYLALAHMIKFRGHFLIEGDLNPDNSDVDKLFIQLVQTYNQLFEENPINASGVDAKAILSARLSKSRRLENLIAQLPGEKKNGLFGNLIALSLGLTPNFKSNFDLAEDAKLQLSKDTYDDDLDNLLAQIGDQYADLFLAAKNLSDAILLSDILRVNTEITKAPLSASMIKRYDEHHQDLTLLKALVRQQLPEKYKEIFFDQSKNGYAGYIDGGASQEEFYKFIKPILEKMDGTEELLVKLNREDLLRKQRTFDNGSIPHQIHLGELHAILRRQEDFYPFLKDNREKIEKILTFRIPYYVGPLARGNSRFAWMTRKSEETITPWNFEEVVDKGASAQSFIERMTNFDKNLPNEKVLPKHSLLYEYFTVYNELTKVKYVTEGMRKPAFLSGEQKKAIVDLLFKTNRKVTVKQLKEDYFKKIECFDSVEISGVEDRFNASLGTYHDLLKIIKDKDFLDNEENEDILEDIVLTLTLFEDREMIEERLKTYAHLFDDKVMKQLKRRRYTGWGRLSRKLINGIRDKQSGKTILDFLKSDGFANRNFMQLIHDDSLTFKEDIQKAQVSGQGDSLHEHIANLAGSPAIKKGILQTVKVVDELVKVMGRHKPENIVIEMARENQTTQKGQKNSRERMKRIEEGIKELGSQILKEHPVENTQLQNEKLYLYYLQNGRDMYVDQELDINRLSDYDVDHIVPQSFLKDDSIDNKVLTRSDKARGKSDNVPSEEVVKKMKNYWRQLLNAKLITQRKFDNLTKAERGGLSELDKAGFIKRQLVETRQITKHVAQILDSRMNTKYDENDKLIREVKVITLKSKLVSDFRKDFQFYKVREINNYHHAHDAYLNAVVGTALIKKYPKLESEFVYGDYKVYDVRKMIAKSEQEIGKATAKYFFYSNIMNFFKTEITLANGEIRKRPLIETNGETGEIVWDKGRDFATVRKVLSMPQVNIVKKTEVQTGGFSKESILPKRNSDKLIARKKDWDPKKYGGFDSPTVAYSVLVVAKVEKGKSKKLKSVKELLGITIMERSSFEKNPIDFLEAKGYKEVKKDLIIKLPKYSLFELENGRKRMLASAGELQKGNELALPSKYVNFLYLASHYEKLKGSPEDNEQKQLFVEQHKHYLDEIIEQISEFSKRVILADANLDKVLSAYNKHRDKPIREQAENIIHLFTLTNLGAPAAFKYFDTTIDRKRYTSTKEVLDATLIHQSITGLYETRIDLSQLGGDGGEAAAKPAPGGSGGMNPLQLLQPLPAEIKGTKLLAHWNSGATITCIPESFLEDEQPIKKTLIKTIHGEKQQNVYYVTFKVKGRKVEAEVIASPYEYILLSPTDVPWLTQQPLQLTILVPLQEYQEKILSKTALPEDQKQQLKTLFVKYDNLWQHWENQVGHRKIRPHNIATGDYPPRPQKQYPINPKAKPSIQIVIDDLLKQGVLTPQNSTMNTPVYPVPKPDGRWRMVLDYREVNKTIPLTAAQNQHSAGILATIVRQKYKTTLDLANGFWAHPITPESYWLTAFTWQGKQYCWTRLPQGFLNSPALFNADVVDLLKEIPNVQVYVDDIYLSHDDPKEHVQQLEKVFQILLQAGYVVSLKKSEIGQKTVEFLGFNITKEGRGLTDTFKTKLLNITPPKDLKQLQSILGLLNFARNFIPNFAELVQPLYNLIAPAKGKYIEWSEENTKQLNMVIEALNTASNLEERLPEQRLVIKVNTSPSAGYVRYYNETGKKPIMYLNYVFSKAELKFSMLEKLLTTMHKALIKAMDLAMGQEILVYSPIVSMTKIQKTPLPERKALPIRWITWMTYLEDPRIQFHYDKTLPELKHIPDVYTSSQSPVKHPSQYEGVFYTDGSAIKSPDPTKSNNAGMGIVHATYKPEYQVLNQWSIPLGNHTAQMAEIAAVEFACKKALKIPGPVLVITDSFYVAESANKELPYWKSNGFVNNKKKPLKHISKWKSIAECLSMKPDITIQHEKGISLQIPVFILKGNALADKLATQGSYVVNAGKRTADGSEFEKRTADGSEFESPKKKAKVE

SEQ ID NO: 7230 - protein, 2094 aa, synthetic construct
MPAAKRVKLDGGDKKYSIGLDIGTNSVGWAVITDEYKVPSKKFKVLGNTDRHSIKKNLIGALLFDSGETAEATRLKRTARRRYTRRKNRICYLQEIFSNEMAKVDDSFFHRLEESFLVEEDKKHERHPIFGNIVDEVAYHEKYPTIYHLRKKLVDSTDKADLRLIYLALAHMIKFRGHFLIEGDLNPDNSDVDKLFIQLVQTYNQLFEENPINASGVDAKAILSARLSKSRRLENLIAQLPGEKKNGLFGNLIALSLGLTPNFKSNFDLAEDAKLQLSKDTYDDDLDNLLAQIGDQYADLFLAAKNLSDAILLSDILRVNTEITKAPLSASMIKRYDEHHQDLTLLKALVRQQLPEKYKEIFFDQSKNGYAGYIDGGASQEEFYKFIKPILEKMDGTEELLVKLNREDLLRKQRTFDNGSIPHQIHLGELHAILRRQEDFYPFLKDNREKIEKILTFRIPYYVGPLARGNSRFAWMTRKSEETITPWNFEEVVDKGASAQSFIERMTNFDKNLPNEKVLPKHSLLYEYFTVYNELTKVKYVTEGMRKPAFLSGEQKKAIVDLLFKTNRKVTVKQLKEDYFKKIECFDSVEISGVEDRFNASLGTYHDLLKIIKDKDFLDNEENEDILEDIVLTLTLFEDREMIEERLKTYAHLFDDKVMKQLKRRRYTGWGRLSRKLINGIRDKQSGKTILDFLKSDGFANRNFMQLIHDDSLTFKEDIQKAQVSGQGDSLHEHIANLAGSPAIKKGILQTVKVVDELVKVMGRHKPENIVIEMARENQTTQKGQKNSRERMKRIEEGIKELGSQILKEHPVENTQLQNEKLYLYYLQNGRDMYVDQELDINRLSDYDVDHIVPQSFLKDDSIDNKVLTRSDKARGKSDNVPSEEVVKKMKNYWRQLLNAKLITQRKFDNLTKAERGGLSELDKAGFIKRQLVETRQITKHVAQILDSRMNTKYDENDKLIREVKVITLKSKLVSDFRKDFQFYKVREINNYHHAHDAYLNAVVGTALIKKYPKLESEFVYGDYKVYDVRKMIAKSEQEIGKATAKYFFYSNIMNFFKTEITLANGEIRKRPLIETNGETGEIVWDKGRDFATVRKVLSMPQVNIVKKTEVQTGGFSKESILPKRNSDKLIARKKDWDPKKYGGFDSPTVAYSVLVVAKVEKGKSKKLKSVKELLGITIMERSSFEKNPIDFLEAKGYKEVKKDLIIKLPKYSLFELENGRKRMLASAGELQKGNELALPSKYVNFLYLASHYEKLKGSPEDNEQKQLFVEQHKHYLDEIIEQISEFSKRVILADANLDKVLSAYNKHRDKPIREQAENIIHLFTLTNLGAPAAFKYFDTTIDRKRYTSTKEVLDATLIHQSITGLYETRIDLSQLGGDGGEAAAKPAPGGSGGVLNLEEEYRLHEKPVPSSIDPSWLQLFPTVWAERAGMGLANQVPPVVVELRSGASPVAVRQYPMSKEAREGIRPHIQKFLDLGVLVPCRSPWNTPLLPVKKPGTNDYRPVQDLREINKRVQDIHPTVPNPYNLLSSLPPSYTWYSVLDLKDAFFCLRLHPNSQPLFAFEWKDPEKGNTGQLTWTRLPQGFKNSPTLFNEALHRDLAPFRALNPQVVLLQYVDDLLVAAPTYEDCKKGTQKLLQELSKLGYRVSAKKAQLCQREVTYLGYLLKEGKRWLTPARKATVMKIPVPTTPRQVREFLGTAGFCRLWIPGFASLAAPLYPLTKPSIPFIWTEEHQQAFDHIKKALLSAPALALPDLTKPFTLYIDERAGVARGVLTQTLGPWRRPVAYLSKKLDPVASGWPTCLKAVAAVALLLKDADKLTLGQNVTVIASHSLESIVRQPPDRWMTNARMTHYQSLLLNERVSFAPPAVLNPATLLPVESEATPVHRCSEILAEETGTRRDLEDQPLPGVPTWYTDGSSFITEGKRRAGAPIVDGKRTVWASSLPEGTSAQKAELVALTQALRLAEGKNINIYTDSRYAFATAHIHGAIYKQRGWLTSAGKDIKNKEEILALLEAIHLPRRVAIIHCPGHQRGSNPVATGNRRADEAAKQAALSTRVLAGTTKPAGKRTADGSEFEKRTADGSEFESPKKKAKVE

SEQ ID NO: 7231 - protein, 2127 aa, synthetic construct
MPAAKRVKLDGGDKKYSIGLDIGTNSVGWAVITDEYKVPSKKFKVLGNTDRHSIKKNLIGALLFDSGETAEATRLKRTARRRYTRRKNRICYLQEIFSNEMAKVDDSFFHRLEESFLVEEDKKHERHPIFGNIVDEVAYHEKYPTIYHLRKKLVDSTDKADLRLIYLALAHMIKFRGHFLIEGDLNPDNSDVDKLFIQLVQTYNQLFEENPINASGVDAKAILSARLSKSRRLENLIAQLPGEKKNGLFGNLIALSLGLTPNFKSNFDLAEDAKLQLSKDTYDDDLDNLLAQIGDQYADLFLAAKNLSDAILLSDILRVNTEITKAPLSASMIKRYDEHHQDLTLLKALVRQQLPEKYKEIFFDQSKNGYAGYIDGGASQEEFYKFIKPILEKMDGTEELLVKLNREDLLRKQRTFDNGSIPHQIHLGELHAILRRQEDFYPFLKDNREKIEKILTFRIPYYVGPLARGNSRFAWMTRKSEETITPWNFEEVVDKGASAQSFIERMTNFDKNLPNEKVLPKHSLLYEYFTVYNELTKVKYVTEGMRKPAFLSGEQKKAIVDLLFKTNRKVTVKQLKEDYFKKIECFDSVEISGVEDRFNASLGTYHDLLKIIKDKDFLDNEENEDILEDIVLTLTLFEDREMIEERLKTYAHLFDDKVMKQLKRRRYTGWGRLSRKLINGIRDKQSGKTILDFLKSDGFANRNFMQLIHDDSLTFKEDIQKAQVSGQGDSLHEHIANLAGSPAIKKGILQTVKVVDELVKVMGRHKPENIVIEMARENQTTQKGQKNSRERMKRIEEGIKELGSQILKEHPVENTQLQNEKLYLYYLQNGRDMYVDQELDINRLSDYDVDHIVPQSFLKDDSIDNKVLTRSDKARGKSDNVPSEEVVKKMKNYWRQLLNAKLITQRKFDNLTKAERGGLSELDKAGFIKRQLVETRQITKHVAQILDSRMNTKYDENDKLIREVKVITLKSKLVSDFRKDFQFYKVREINNYHHAHDAYLNAVVGTALIKKYPKLESEFVYGDYKVYDVRKMIAKSEQEIGKATAKYFFYSNIMNFFKTEITLANGEIRKRPLIETNGETGEIVWDKGRDFATVRKVLSMPQVNIVKKTEVQTGGFSKESILPKRNSDKLIARKKDWDPKKYGGFDSPTVAYSVLVVAKVEKGKSKKLKSVKELLGITIMERSSFEKNPIDFLEAKGYKEVKKDLIIKLPKYSLFELENGRKRMLASAGELQKGNELALPSKYVNFLYLASHYEKLKGSPEDNEQKQLFVEQHKHYLDEIIEQISEFSKRVILADANLDKVLSAYNKHRDKPIREQAENIIHLFTLTNLGAPAAFKYFDTTIDRKRYTSTKEVLDATLIHQSITGLYETRIDLSQLGGDGGEAAAKPAPGGSGGLLGRDLLTKLKAQIQFSTEGPQVTWEDRPAMCLVLNLEEEYRLHEKPVPPSIDPSWLQLFPMVWAEKAGMGLANQVPPVVVELKSDASPVAVRQYPMSKEAREGIRPHIQRFLDLGILVPCQSPWNTPLLPVKKPGTNDYRPVQDLREVNKRVQDIHPTVPNPYNLLSSLPPSHTWYSVLDLKDAFFCLKLHPNSQPLFAFEWRDPEKGNTGQLTWTRLPQGFKNSPTLFNEALHRDLASFRALNPQVVMLQYVDDLLVAAPTYRDCKEGTRRLLQELSKLGYRVSAKKAQLCREEVTYLGYLLKGGKRWLTPARKATVMKIPTPTTPRQVREFLGTAGFCRLWIPGFASLAAPLYPLTRPKVPFTWTEAHQEAFGRIKEALLSAPALALPDLTKPFALYVDEKEGVARGVLTQTLGPWRRPVAYLSKKLDPVASGWPTCLKAIAAVALLLKDADKLTLGQNVLVIAPHNLESIVRQPPDRWMTNARMTHYQSLLLNERVSFAPPAILNPATLLPVESDDTPIHICSEILAEETGTRPDLRDQPLPGVPAWYTDGSSFIMDGRRQAGAAIVDNKRTVWASNLPEGTSAQKAELIALTQALRLAEGKSINIYTDSRYAFATAHVHGAIYKQRGWLTSAGKDIKNKEEILALLEAIHLPKRVAIIHCPGHQRGTDPVATGNRKADEAAKQAAQSTRILTETTKNAGKRTADGSEFEKRTADGSEFESPKKKAKVE

SEQ ID NO: 7232 - protein, 2218 aa, synthetic construct
MPAAKRVKLDGGDKKYSIGLDIGTNSVGWAVITDEYKVPSKKFKVLGNTDRHSIKKNLIGALLFDSGETAEATRLKRTARRRYTRRKNRICYLQEIFSNEMAKVDDSFFHRLEESFLVEEDKKHERHPIFGNIVDEVAYHEKYPTIYHLRKKLVDSTDKADLRLIYLALAHMIKFRGHFLIEGDLNPDNSDVDKLFIQLVQTYNQLFEENPINASGVDAKAILSARLSKSRRLENLIAQLPGEKKNGLFGNLIALSLGLTPNFKSNFDLAEDAKLQLSKDTYDDDLDNLLAQIGDQYADLFLAAKNLSDAILLSDILRVNTEITKAPLSASMIKRYDEHHQDLTLLKALVRQQLPEKYKEIFFDQSKNGYAGYIDGGASQEEFYKFIKPILEKMDGTEELLVKLNREDLLRKQRTFDNGSIPHQIHLGELHAILRRQEDFYPFLKDNREKIEKILTFRIPYYVGPLARGNSRFAWMTRKSEETITPWNFEEVVDKGASAQSFIERMTNFDKNLPNEKVLPKHSLLYEYFTVYNELTKVKYVTEGMRKPAFLSGEQKKAIVDLLFKTNRKVTVKQLKEDYFKKIECFDSVEISGVEDRFNASLGTYHDLLKIIKDKDFLDNEENEDILEDIVLTLTLFEDREMIEERLKTYAHLFDDKVMKQLKRRRYTGWGRLSRKLINGIRDKQSGKTILDFLKSDGFANRNFMQLIHDDSLTFKEDIQKAQVSGQGDSLHEHIANLAGSPAIKKGILQTVKVVDELVKVMGRHKPENIVIEMARENQTTQKGQKNSRERMKRIEEGIKELGSQILKEHPVENTQLQNEKLYLYYLQNGRDMYVDQELDINRLSDYDVDHIVPQSFLKDDSIDNKVLTRSDKARGKSDNVPSEEVVKKMKNYWRQLLNAKLITQRKFDNLTKAERGGLSELDKAGFIKRQLVETRQITKHVAQILDSRMNTKYDENDKLIREVKVITLKSKLVSDFRKDFQFYKVREINNYHHAHDAYLNAVVGTALIKKYPKLESEFVYGDYKVYDVRKMIAKSEQEIGKATAKYFFYSNIMNFFKTEITLANGEIRKRPLIETNGETGEIVWDKGRDFATVRKVLSMPQVNIVKKTEVQTGGFSKESILPKRNSDKLIARKKDWDPKKYGGFDSPTVAYSVLVVAKVEKGKSKKLKSVKELLGITIMERSSFEKNPIDFLEAKGYKEVKKDLIIKLPKYSLFELENGRKRMLASAGELQKGNELALPSKYVNFLYLASHYEKLKGSPEDNEQKQLFVEQHKHYLDEIIEQISEFSKRVILADANLDKVLSAYNKHRDKPIREQAENIIHLFTLTNLGAPAAFKYFDTTIDRKRYTSTKEVLDATLIHQSITGLYETRIDLSQLGGDGGEAAAKPAPGGSGGTLGDQGSRGSDPLPEPRVTLTVEGIPTEFLVNTGAEHSVLTKPMGKMGSKRTVVAGATGSKVYPWTTKRLLKIGQKQVTHSFLVIPECPAPLLGRDLLTKLKAQIQFSTEGPQVTWEDRPAMCLVLNLEEEYRLHEKPVPPSIDPSWLQLFPMVWAEKAGMGLANQVPPVVVELKSDASPVAVRQYPMSKEAREGIRPHIQRFLDLGILVPCQSPWNTPLLPVKKPGTNDYRPVQDLREVNKRVQDIHPTVPNPYNLLSSLPPSHTWYSVLDLKDAFFCLKLHPNSQPLFAFEWRDPEKGNTGQLTWTRLPQGFKNSPTLFNEALHRDLASFRALNPQVVMLQYVDDLLVAAPTYRDCKEGTRRLLQELSKLGYRVSAKKAQLCREEVTYLGYLLKGGKRWLTPARKATVMKIPTPTTPRQVREFLGTAGFCRLWIPGFASLAAPLYPLTRPKVPFTWTEAHQEAFGRIKEALLSAPALALPDLTKPFALYVDEKEGVARGVLTQTLGPWRRPVAYLSKKLDPVASGWPTCLKAIAAVALLLKDADKLTLGQNVLVIAPHNLESIVRQPPDRWMTNARMTHYQSLLLNERVSFAPPAILNPATLLPVESDDTPIHICSEILAEETGTRPDLRDQPLPGVPAWYTDGSSFIMDGRRQAGAAIVDNKRTVWASNLPEGTSAQKAELIALTQALRLAEGKSINIYTDSRYAFATAHVHGAIYKQRGWLTSAGKDIKNKEEILALLEAIHLPKRVAIIHCPGHQRGTDPVATGNRKADEAAKQAAQSTRILTETTKNAGKRTADGSEFEKRTADGSEFESPKKKAKVE

SEQ ID NO: 7233 - protein, 2096 aa, synthetic construct
MPAAKRVKLDGGDKKYSIGLDIGTNSVGWAVITDEYKVPSKKFKVLGNTDRHSIKKNLIGALLFDSGETAEATRLKRTARRRYTRRKNRICYLQEIFSNEMAKVDDSFFHRLEESFLVEEDKKHERHPIFGNIVDEVAYHEKYPTIYHLRKKLVDSTDKADLRLIYLALAHMIKFRGHFLIEGDLNPDNSDVDKLFIQLVQTYNQLFEENPINASGVDAKAILSARLSKSRRLENLIAQLPGEKKNGLFGNLIALSLGLTPNFKSNFDLAEDAKLQLSKDTYDDDLDNLLAQIGDQYADLFLAAKNLSDAILLSDILRVNTEITKAPLSASMIKRYDEHHQDLTLLKALVRQQLPEKYKEIFFDQSKNGYAGYIDGGASQEEFYKFIKPILEKMDGTEELLVKLNREDLLRKQRTFDNGSIPHQIHLGELHAILRRQEDFYPFLKDNREKIEKILTFRIPYYVGPLARGNSRFAWMTRKSEETITPWNFEEVVDKGASAQSFIERMTNFDKNLPNEKVLPKHSLLYEYFTVYNELTKVKYVTEGMRKPAFLSGEQKKAIVDLLFKTNRKVTVKQLKEDYFKKIECFDSVEISGVEDRFNASLGTYHDLLKIIKDKDFLDNEENEDILEDIVLTLTLFEDREMIEERLKTYAHLFDDKVMKQLKRRRYTGWGRLSRKLINGIRDKQSGKTILDFLKSDGFANRNFMQLIHDDSLTFKEDIQKAQVSGQGDSLHEHIANLAGSPAIKKGILQTVKVVDELVKVMGRHKPENIVIEMARENQTTQKGQKNSRERMKRIEEGIKELGSQILKEHPVENTQLQNEKLYLYYLQNGRDMYVDQELDINRLSDYDVDHIVPQSFLKDDSIDNKVLTRSDKARGKSDNVPSEEVVKKMKNYWRQLLNAKLITQRKFDNLTKAERGGLSELDKAGFIKRQLVETRQITKHVAQILDSRMNTKYDENDKLIREVKVITLKSKLVSDFRKDFQFYKVREINNYHHAHDAYLNAVVGTALIKKYPKLESEFVYGDYKVYDVRKMIAKSEQEIGKATAKYFFYSNIMNFFKTEITLANGEIRKRPLIETNGETGEIVWDKGRDFATVRKVLSMPQVNIVKKTEVQTGGFSKESILPKRNSDKLIARKKDWDPKKYGGFDSPTVAYSVLVVAKVEKGKSKKLKSVKELLGITIMERSSFEKNPIDFLEAKGYKEVKKDLIIKLPKYSLFELENGRKRMLASAGELQKGNELALPSKYVNFLYLASHYEKLKGSPEDNEQKQLFVEQHKHYLDEIIEQISEFSKRVILADANLDKVLSAYNKHRDKPIREQAENIIHLFTLTNLGAPAAFKYFDTTIDRKRYTSTKEVLDATLIHQSITGLYETRIDLSQLGGDGGEAAAKPAPGGSGGTLGIEDEYRLHETSTEPDVSLGSTWLSDFPQAWAETGGMGLAVRQAPLIIPLKATSTPVSIQQYPMSHEARLGIKPHIQRLLDQGILVPCQSPWNTPLLPVKKPGTNDYRPVQDLREVNKRVEDIHPTVPNPYNLLSGLPPSHQWYTVLDLKDAFFCLRLHPTSQPLFAFEWRDPGMGISGQLTWTRLPQGFKNSPTLFNEALHRDLADFRIQHPDLILLQYVDDILLAATSELDCQQGTRALLQTLGDLGYRASAKKAQICQKQVKYLGYLLREGQRWLTEARKETVMGQPVPKTPRQLREFLGTAGFCRLWIPGFAEMAAPLYPLTKPGTLFSWGPDQQKAYQEIKQALLTAPALGLPDLTKPFELFVDEKQGYAKGVLTQKLGPWRRPVAYLSKKLDPVAAGWPPCLRMVAAIAVLTKDAGKLTMGQPLVILAPHAVEALVKQPPDRWLSNARMTHYQAMLLDTDRVQFGPVVALNPATLLPLPEEGAPHDCLEILAETHGTRPDLTDQPIPDADHTWYTDGSSFLQEGQRKAGAAVTTETEVIWAGALPAGTSAQRAELIALTQALKMAEGKRLNVYTDSRYAFATAHIHGEIYRRRGWLTSEGREIKNKSEILALLKALFLPKRLSIIHCLGHQKGDSAEARGNRLADQAAREAAIKTPPDTSTLLAGKRTADGSEFEKRTADGSEFESPKKKAKVE

SEQ ID NO: 7234 - protein, 2096 aa, synthetic construct
MPAAKRVKLDGGDKKYSIGLDIGTNSVGWAVITDEYKVPSKKFKVLGNTDRHSIKKNLIGALLFDSGETAEATRLKRTARRRYTRRKNRICYLQEIFSNEMAKVDDSFFHRLEESFLVEEDKKHERHPIFGNIVDEVAYHEKYPTIYHLRKKLVDSTDKADLRLIYLALAHMIKFRGHFLIEGDLNPDNSDVDKLFIQLVQTYNQLFEENPINASGVDAKAILSARLSKSRRLENLIAQLPGEKKNGLFGNLIALSLGLTPNFKSNFDLAEDAKLQLSKDTYDDDLDNLLAQIGDQYADLFLAAKNLSDAILLSDILRVNTEITKAPLSASMIKRYDEHHQDLTLLKALVRQQLPEKYKEIFFDQSKNGYAGYIDGGASQEEFYKFIKPILEKMDGTEELLVKLNREDLLRKQRTFDNGSIPHQIHLGELHAILRRQEDFYPFLKDNREKIEKILTFRIPYYVGPLARGNSRFAWMTRKSEETITPWNFEEVVDKGASAQSFIERMTNFDKNLPNEKVLPKHSLLYEYFTVYNELTKVKYVTEGMRKPAFLSGEQKKAIVDLLFKTNRKVTVKQLKEDYFKKIECFDSVEISGVEDRFNASLGTYHDLLKIIKDKDFLDNEENEDILEDIVLTLTLFEDREMIEERLKTYAHLFDDKVMKQLKRRRYTGWGRLSRKLINGIRDKQSGKTILDFLKSDGFANRNFMQLIHDDSLTFKEDIQKAQVSGQGDSLHEHIANLAGSPAIKKGILQTVKVVDELVKVMGRHKPENIVIEMARENQTTQKGQKNSRERMKRIEEGIKELGSQILKEHPVENTQLQNEKLYLYYLQNGRDMYVDQELDINRLSDYDVDHIVPQSFLKDDSIDNKVLTRSDKARGKSDNVPSEEVVKKMKNYWRQLLNAKLITQRKFDNLTKAERGGLSELDKAGFIKRQLVETRQITKHVAQILDSRMNTKYDENDKLIREVKVITLKSKLVSDFRKDFQFYKVREINNYHHAHDAYLNAVVGTALIKKYPKLESEFVYGDYKVYDVRKMIAKSEQEIGKATAKYFFYSNIMNFFKTEITLANGEIRKRPLIETNGETGEIVWDKGRDFATVRKVLSMPQVNIVKKTEVQTGGFSKESILPKRNSDKLIARKKDWDPKKYGGFDSPTVAYSVLVVAKVEKGKSKKLKSVKELLGITIMERSSFEKNPIDFLEAKGYKEVKKDLIIKLPKYSLFELENGRKRMLASAGELQKGNELALPSKYVNFLYLASHYEKLKGSPEDNEQKQLFVEQHKHYLDEIIEQISEFSKRVILADANLDKVLSAYNKHRDKPIREQAENIIHLFTLTNLGAPAAFKYFDTTIDRKRYTSTKEVLDATLIHQSITGLYETRIDLSQLGGDGGEAAAKPAPGGSGGTLGIEDEYRLHETSTEPDVSLGSTWLSDFPQAWAETGGMGLAVRQAPLIIPLKATSTPVSIQQYPMSHEARLGIKPHIQRLLDQGILVPCQSPWNTPLLPVKKPGTNDYRPVQDLREVNKRVEDIHPTVPNPYNLLSGLPPSHQWYTVLDLKDAFFCLRLHPTSQPLFAFEWRDPGMGISGQLTWTRLPQGFKNSPTLFDEALHRDLADFRIQHPDLILLQYVDDILLAATSELDCQQGTRALLQTLGDLGYRASAKKAQICQKQVKYLGYLLREGQRWLTEARKETVMGQPVPKTPRQLREFLGTAGFCRLWIPGFAEMAAPLYPLTKTGTLFSWGPDQQKAYQEIKQALLTAPALGLPDLTKPFELFVDEKQGYAKGVLTQKLGPWRRPVAYLSKKLDPVAAGWPPCLRMVAAIAVLTKDAGKLTMGQPLVILAPHAVEALVKQPPDRWLSNARMTHYQAMLLDTDRVQFGPVVALNPATLLPLPEEGAPHDCLEILAETHGTRPDLTDQPIPDADHTWYTDGSSFLQEGQRKAGAAVTTETEVIWAGALPAGTSAQRAELIALTQALKMAEGKRLNVYTDSRYAFATAHIHGEIYRRRGLLTSEGREIKNKSEILALLKALFLPKRLSIIHCLGHQKGDSAEARGNRLADQAAREAAIKTPPDTSTLLAGKRTADGSEFEKRTADGSEFESPKKKAKVE

SEQ ID NO: 7235 - protein, 2096 aa, synthetic construct; identical to SEQ ID NO: 7233

SEQ ID NO: 7236 - protein, 2096 aa, synthetic construct
MPAAKRVKLDGGDKKYSIGLDIGTNSVGWAVITDEYKVPSKKFKVLGNTDRHSIKKNLIGALLFDSGETAEATRLKRTARRRYTRRKNRICYLQEIFSNEMAKVDDSFFHRLEESFLVEEDKKHERHPIFGNIVDEVAYHEKYPTIYHLRKKLVDSTDKADLRLIYLALAHMIKFRGHFLIEGDLNPDNSDVDKLFIQLVQTYNQLFEENPINASGVDAKAILSARLSKSRRLENLIAQLPGEKKNGLFGNLIALSLGLTPNFKSNFDLAEDAKLQLSKDTYDDDLDNLLAQIGDQYADLFLAAKNLSDAILLSDILRVNTEITKAPLSASMIKRYDEHHQDLTLLKALVRQQLPEKYKEIFFDQSKNGYAGYIDGGASQEEFYKFIKPILEKMDGTEELLVKLNREDLLRKQRTFDNGSIPHQIHLGELHAILRRQEDFYPFLKDNREKIEKILTFRIPYYVGPLARGNSRFAWMTRKSEETITPWNFEEVVDKGASAQSFIERMTNFDKNLPNEKVLPKHSLLYEYFTVYNELTKVKYVTEGMRKPAFLSGEQKKAIVDLLFKTNRKVTVKQLKEDYFKKIECFDSVEISGVEDRFNASLGTYHDLLKIIKDKDFLDNEENEDILEDIVLTLTLFEDREMIEERLKTYAHLFDDKVMKQLKRRRYTGWGRLSRKLINGIRDKQSGKTILDFLKSDGFANRNFMQLIHDDSLTFKEDIQKAQVSGQGDSLHEHIANLAGSPAIKKGILQTVKVVDELVKVMGRHKPENIVIEMARENQTTQKGQKNSRERMKRIEEGIKELGSQILKEHPVENTQLQNEKLYLYYLQNGRDMYVDQELDINRLSDYDVDHIVPQSFLKDDSIDNKVLTRSDKARGKSDNVPSEEVVKKMKNYWRQLLNAKLITQRKFDNLTKAERGGLSELDKAGFIKRQLVETRQITKHVAQILDSRMNTKYDENDKLIREVKVITLKSKLVSDFRKDFQFYKVREINNYHHAHDAYLNAVVGTALIKKYPKLESEFVYGDYKVYDVRKMIAKSEQEIGKATAKYFFYSNIMNFFKTEITLANGEIRKRPLIETNGETGEIVWDKGRDFATVRKVLSMPQVNIVKKTEVQTGGFSKESILPKRNSDKLIARKKDWDPKKYGGFDSPTVAYSVLVVAKVEKGKSKKLKSVKELLGITIMERSSFEKNPIDFLEAKGYKEVKKDLIIKLPKYSLFELENGRKRMLASAGELQKGNELALPSKYVNFLYLASHYEKLKGSPEDNEQKQLFVEQHKHYLDEIIEQISEFSKRVILADANLDKVLSAYNKHRDKPIREQAENIIHLFTLTNLGAPAAFKYFDTTIDRKRYTSTKEVLDATLIHQSITGLYETRIDLSQLGGDGGEAAAKPAPGGSGGTLNIEDEYRLHEISTEPDVSPGSTWLSDFPQAWAETGGMGLAVRQAPLIIPLKATSTPVSIKQYPMSQEAKLGIKPHIQRLLDQGILVPCQSPWNTPLLPVKKPGTNDYRPVQGLREVNKRVEDIHPTVPNPYNLLSGLPTSHRWYTVLDLKDAFFCLRLHPTSQPLFASEWRDPGMGISGQLTWTRLPQGFKNSPTLFNEALHRGLADFRIQHPDLILLQYVDDLLLAATSELDCQQGTRALLKTLGNLGYRASAKKAQICQKQVKYLGYLLREGQRWLTEARKETVMGQPTPKTPRQLREFLGKAGFCRLFIPRFAEMAAPLYPLTKPGTLFNWGPDQQKAYHEIKQALLTAPALGLPDLTKPFELFVDEKQGYAKGVLTQKLGPWRRPVAYLSKKLDPVAAGWPPCLRMVAAIAVLTKDAGKLTMGQPLVILAPHAVEALVKQPPDRWLSNARMTHYQAMLLDTDRVQFGPVVALNPATLLPLPEEGAPHDCLEILAETHGTEPDLTDQPIPDADHTWYTDGSSFLQEGQRKAGAAVTTETEVIWARALPAGTSAQRAELIALTQALKMAEGKRLNVYTDSRYAFATAHIHGEIYKRRGWLTSEGREIKNKSEILALLKALFLPKRLSIIHCLGHQKGDSAEARGNRLADQAAREAAIKTPPDTSTLLAGKRTADGSEFEKRTADGSEFESPKKKAKVE

SEQ ID NO: 7237 - protein, 2116 aa, synthetic construct
MPAAKRVKLDGGDKKYSIGLDIGTNSVGWAVITDEYKVPSKKFKVLGNTDRHSIKKNLIGALLFDSGETAEATRLKRTARRRYTRRKNRICYLQEIFSNEMAKVDDSFFHRLEESFLVEEDKKHERHPIFGNIVDEVAYHEKYPTIYHLRKKLVDSTDKADLRLIYLALAHMIKFRGHFLIEGDLNPDNSDVDKLFIQLVQTYNQLFEENPINASGVDAKAILSARLSKSRRLENLIAQLPGEKKNGLFGNLIALSLGLTPNFKSNFDLAEDAKLQLSKDTYDDDLDNLLAQIGDQYADLFLAAKNLSDAILLSDILRVNTEITKAPLSASMIKRYDEHHQDLTLLKALVRQQLPEKYKEIFFDQSKNGYAGYIDGGASQEEFYKFIKPILEKMDGTEELLVKLNREDLLRKQRTFDNGSIPHQIHLGELHAILRRQEDFYPFLKDNREKIEKILTFRIPYYVGPLARGNSRFAWMTRKSEETITPWNFEEVVDKGASAQSFIERMTNFDKNLPNEKVLPKHSLLYEYFTVYNELTKVKYVTEGMRKPAFLSGEQKKAIVDLLFKTNRKVTVKQLKEDYFKKIECFDSVEISGVEDRFNASLGTYHDLLKIIKDKDFLDNEENEDILEDIVLTLTLFEDREMIEERLKTYAHLFDDKVMKQLKRRRYTGWGRLSRKLINGIRDKQSGKTILDFLKSDGFANRNFMQLIHDDSLTFKEDIQKAQVSGQGDSLHEHIANLAGSPAIKKGILQTVKVVDELVKVMGRHKPENIVIEMARENQTTQKGQKNSRERMKRIEEGIKELGSQILKEHPVENTQLQNEKLYLYYLQNGRDMYVDQELDINRLSDYDVDHIVPQSFLKDDSIDNKVLTRSDKARGKSDNVPSEEVVKKMKNYWRQLLNAKLITQRKFDNLTKAERGGLSELDKAGFIKRQLVETRQITKHVAQILDSRMNTKYDENDKLIREVKVITLKSKLVSDFRKDFQFYKVREINNYHHAHDAYLNAVVGTALIKKYPKLESEFVYGDYKVYDVRKMIAKSEQEIGKATAKYFFYSNIMNFFKTEITLANGEIRKRPLIETNGETGEIVWDKGRDFATVRKVLSMPQVNIVKKTEVQTGGFSKESILPKRNSDKLIARKKDWDPKKYGGFDSPTVAYSVLVVAKVEKGKSKKLKSVKELLGITIMERSSFEKNPIDFLEAKGYKEVKKDLIIKLPKYSLFELENGRKRMLASAGELQKGNELALPSKYVNFLYLASHYEKLKGSPEDNEQKQLFVEQHKHYLDEIIEQISEFSKRVILADANLDKVLSAYNKHRDKPIREQAENIIHLFTLTNLGAPAAFKYFDTTIDRKRYTSTKEVLDATLIHQSITGLYETRIDLSQLGGDGGEAAAKPAPGGSGGVQEISDSRPMLHIYLNGRRFLGLLDTGADKTCIAGRDWPANWPIHQTESSLQGLGMACGVARSSQPLRWQHEDKSGIIHPFVIPTLPFTLWGRDIMKDIKVRLMTDSPDDSQDLMIGAIESNLFADQISWKSDQPVWLNQWPLKQEKLQALQQLVTEQLQLGHLEESNSPWNTPVFVIKKKSGKWRLLQDLRAVNATMHDMGALQPGLPSPVAVPKGWEIIIIDLQDCFFNIKLHPEDCKRFAFSVPSPNFKRPYQRFQWKVLPQGMKNSPTLCQKFVDKAILTVRDKYQDSYIVHYMDDILLAHPSRSIVDEILTSMIQALNKHGLVVSTEKIQKYDNLKYLGTHIQGDSVSYQKLQIRTDKLRTLNDFQKLLGNINWIRPFLKLTTGELKPLFEILNGDSNPISTRKLTPEACKALQLMNERLSTARVKRLDLSQPWSLCILKTEYTPTACLWQDGVVEWIHLPHISPKVITPYDIFCTQLIIKGRHRSKELFSKDPDYIVVPYTKVQFDLLLQEKEDWPISLLGFLGEVHFHLPKDPLLTFTLQTAIIFPHMTSTTPLEKGIVIFTDGSANGRSVTYIQGREPIIKENTQNTAQQAEIVAVITAFEEVSQPFNLYTDSKYVTGLFPEIETATLSPRTKIYTELKHLQRLIHKRQEKFYIGHIRGHTGLPGPLAQGNAYADSLTRILTAAGKRTADGSEFEKRTADGSEFESPKKKAKVE

SEQ ID NO: 7238 - protein, 2087 aa, synthetic construct
MPAAKRVKLDGGDKKYSIGLDIGTNSVGWAVITDEYKVPSKKFKVLGNTDRHSIKKNLIGALLFDSGETAEATRLKRTARRRYTRRKNRICYLQEIFSNEMAKVDDSFFHRLEESFLVEEDKKHERHPIFGNIVDEVAYHEKYPTIYHLRKKLVDSTDKADLRLIYLALAHMIKFRGHFLIEGDLNPDNSDVDKLFIQLVQTYNQLFEENPINASGVDAKAILSARLSKSRRLENLIAQLPGEKKNGLFGNLIALSLGLTPNFKSNFDLAEDAKLQLSKDTYDDDLDNLLAQIGDQYADLFLAAKNLSDAILLSDILRVNTEITKAPLSASMIKRYDEHHQDLTLLKALVRQQLPEKYKEIFFDQSKNGYAGYIDGGASQEEFYKFIKPILEKMDGTEELLVKLNREDLLRKQRTFDNGSIPHQIHLGELHAILRRQEDFYPFLKDNREKIEKILTFRIPYYVGPLARGNSRFAWMTRKSEETITPWNFEEVVDKGASAQSFIERMTNFDKNLPNEKVLPKHSLLYEYFTVYNELTKVKYVTEGMRKPAFLSGEQKKAIVDLLFKTNRKVTVKQLKEDYFKKIECFDSVEISGVEDRFNASLGTYHDLLKIIKDKDFLDNEENEDILEDIVLTLTLFEDREMIEERLKTYAHLFDDKVMKQLKRRRYTGWGRLSRKLINGIRDKQSGKTILDFLKSDGFANRNFMQLIHDDSLTFKEDIQKAQVSGQGDSLHEHIANLAGSPAIKKGILQTVKVVDELVKVMGRHKPENIVIEMARENQTTQKGQKNSRERMKRIEEGIKELGSQILKEHPVENTQLQNEKLYLYYLQNGRDMYVDQELDINRLSDYDVDHIVPQSFLKDDSIDNKVLTRSDKARGKSDNVPSEEVVKKMKNYWRQLLNAKLITQRKFDNLTKAERGGLSELDKAGFIKRQLVETRQITKHVAQILDSRMNTKYDENDKLIREVKVITLKSKLVSDFRKDFQFYKVREINNYHHAHDAYLNAVVGTALIKKYPKLESEFVYGDYKVYDVRKMIAKSEQEIGKATAKYFFYSNIMNFFKTEITLANGEIRKRPLIETNGETGEIVWDKGRDFATVRKVLSMPQVNIVKKTEVQTGGFSKESILPKRNSDKLIARKKDWDPKKYGGFDSPTVAYSVLVVAKVEKGKSKKLKSVKELLGITIMERSSFEKNPIDFLEAKGYKEVKKDLIIKLPKYSLFELENGRKRMLASAGELQKGNELALPSKYVNFLYLASHYEKLKGSPEDNEQKQLFVEQHKHYLDEIIEQISEFSKRVILADANLDKVLSAYNKHRDKPIREQAENIIHLFTLTNLGAPAAFKYFDTTIDRKRYTSTKEVLDATLIHQSITGLYETRIDLSQLGGDGGEAAAKPAPGGSGGIPWLMKKPLQLTTLVPLQEYEERLLKQTMLTGSYKEKLQSLFLKYDALWQHWENQVGHRRIKPHHIATGTVNPRPQKQYPINPKAKASIQTVINDLLKQGVLIQQNSIMNTPVYPVPKPDGKWRMVLDYREVNKTIPLIAAQNQHSAGILSSIFRGKYKTTLDLSNGFWAHSITPESYWLTAFTWLGQQYCWTRLPQGFLNSPALFNADVVDLLKEVPNVQVYVDDIYISHDDPREHLEQLEKVFSLLLNAGYVVSLKKSEIAQHEVEFLGFNITKEGRGLTETFKQKLLNITPPRDLKQLQSILGKLNFARNFIPNFSELVKPLYNIIATAPGKYITWTTDNSQQLQNIISMLNSAENLEERNPEVRLIMKVNTSPSAGYIRFYNEFAKRPIMYLNYVYTKAEVKFTNTEKLLTTIHKGLIKALDLGMGQEILVYSPIVSMTKIQKTPLPERKALPIRWITWMSYLEDPRIQFHYDKTLPELQQVPTVTDDIIAKIKHPSEFSMVFYTDGSAIKHPNVNKSHNAGMGIAQVQFKPEFTVINTWSIPLGDHTAQLAEVAAVEFACKKALKIDGPVLIVTDSFYVAESVNKELPYWQSNGFFNNKKKPLKHVSKWKSIADCIQLKPDIIIIHEKGHQPTASTFHTEGNNLADKLATQGSYVVNAGKRTADGSEFEKRTADGSEFESPKKKAKVE

SEQ ID NO: 7239 - protein, 2176 aa, synthetic construct
MPAAKRVKLDGGDKKYSIGLDIGTNSVGWAVITDEYKVPSKKFKVLGNTDRHSIKKNLIGALLFDSGETAEATRLKRTARRRYTRRKNRICYLQEIFSNEMAKVDDSFFHRLEESFLVEEDKKHERHPIFGNIVDEVAYHEKYPTIYHLRKKLVDSTDKADLRLIYLALAHMIKFRGHFLIEGDLNPDNSDVDKLFIQLVQTYNQLFEENPINASGVDAKAILSARLSKSRRLENLIAQLPGEKKNGLFGNLIALSLGLTPNFKSNFDLAEDAKLQLSKDTYDDDLDNLLAQIGDQYADLFLAAKNLSDAILLSDILRVNTEITKAPLSASMIKRYDEHHQDLTLLKALVRQQLPEKYKEIFFDQSKNGYAGYIDGGASQEEFYKFIKPILEKMDGTEELLVKLNREDLLRKQRTFDNGSIPHQIHLGELHAILRRQEDFYPFLKDNREKIEKILTFRIPYYVGPLARGNSRFAWMTRKSEETITPWNFEEVVDKGASAQSFIERMTNFDKNLPNEKVLPKHSLLYEYFTVYNELTKVKYVTEGMRKPAFLSGEQKKAIVDLLFKTNRKVTVKQLKEDYFKKIECFDSVEISGVEDRFNASLGTYHDLLKIIKDKDFLDNEENEDILEDIVLTLTLFEDREMIEERLKTYAHLFDDKVMKQLKRRRYTGWGRLSRKLINGIRDKQSGKTILDFLKSDGFANRNFMQLIHDDSLTFKEDIQKAQVSGQGDSLHEHIANLAGSPAIKKGILQTVKVVDELVKVMGRHKPENIVIEMARENQTTQKGQKNSRERMKRIEEGIKELGSQILKEHPVENTQLQNEKLYLYYLQNGRDMYVDQELDINRLSDYDVDHIVPQSFLKDDSIDNKVLTRSDKARGKSDNVPSEEVVKKMKNYWRQLLNAKLITQRKFDNLTKAERGGLSELDKAGFIKRQLVETRQITKHVAQILDSRMNTKYDENDKLIREVKVITLKSKLVSDFRKDFQFYKVREINNYHHAHDAYLNAVVGTALIKKYPKLESEFVYGDYKVYDVRKMIAKSEQEIGKATAKYFFYSNIMNFFKTEITLANGEIRKRPLIETNGETGEIVWDKGRDFATVRKVLSMPQVNIVKKTEVQTGGFSKESILPKRNSDKLIARKKDWDPKKYGGFDSPTVAYSVLVVAKVEKGKSKKLKSVKELLGITIMERSSFEKNPIDFLEAKGYKEVKKDLIIKLPKYSLFELENGRKRMLASAGELQKGNELALPSKYVNFLYLASHYEKLKGSPEDNEQKQLFVEQHKHYLDEIIEQISEFSKRVILADANLDKVLSAYNKHRDKPIREQAENIIHLFTLTNLGAPAAFKYFDTTIDRKRYTSTKEVLDATLIHQSITGLYETRIDLSQLGGDGGEAAAKPAPGGSGGMDPLQLLQPLEAEIKGTKLKAHWNSGATITCVPQAFLEEEVPIKNIWIKTIHGEKEQPVYYLTFKIQGRKVEAEVISSPYDYILVSPSDIPWLMKKPLQLTTLVPLQEYEERLLKQTMLTGSYKEKLQSLFLKYDALWQHWENQVGHRRIKPHHIATGTVNPRPQKQYPINPKAKASIQTVINDLLKQGVLIQQNSIMNTPVYPVPKPDGKWRMVLDYREVNKTIPLIAAQNQHSAGILSSIFRGKYKTTLDLSNGFWAHSITPESYWLTAFTWLGQQYCWTRLPQGFLNSPALFNADVVDLLKEVPNVQVYVDDIYISHDDPREHLEQLEKVFSLLLNAGYVVSLKKSEIAQHEVEFLGFNITKEGRGLTETFKQKLLNITPPRDLKQLQSILGLLNFARNFIPNFSELVKPLYNIIATAPGKYITWTTDNSQQLQNIISMLNSAENLEERNPEVRLIMKVNTSPSAGYIRFYNEFAKRPIMYLNYVYTKAEVKFTNTEKLLTTIHKGLIKALDLGMGQEILVYSPIVSMTKIQKTPLPERKALPIRWITWMSYLEDPRIQFHYDKTLPELQQVPTVTDDIIAKIKHPSEFSMVFYTDGSAIKHPNVNKSHNAGMGIAQVQFKPEFTVINTWSIPLGDHTAQLAEVAAVEFACKKALKIDGPVLIVTDSFYVAESVNKELPYWQSNGFFNNKKKPLKHVSKWKSIADCIQLKPDIIIIHEKGHQPTASTFHTEGNNLADKLATQGSYVVNAGKRTADGSEFEKRTADGSEFESPKKKAKVE

SEQ ID NO: 7240 - protein, 2094 aa, synthetic construct
MPAAKRVKLDGGDKKYSIGLDIGTNSVGWAVITDEYKVPSKKFKVLGNTDRHSIKKNLIGALLFDSGETAEATRLKRTARRRYTRRKNRICYLQEIFSNEMAKVDDSFFHRLEESFLVEEDKKHERHPIFGNIVDEVAYHEKYPTIYHLRKKLVDSTDKADLRLIYLALAHMIKFRGHFLIEGDLNPDNSDVDKLFIQLVQTYNQLFEENPINASGVDAKAILSARLSKSRRLENLIAQLPGEKKNGLFGNLIALSLGLTPNFKSNFDLAEDAKLQLSKDTYDDDLDNLLAQIGDQYADLFLAAKNLSDAILLSDILRVNTEITKAPLSASMIKRYDEHHQDLTLLKALVRQQLPEKYKEIFFDQSKNGYAGYIDGGASQEEFYKFIKPILEKMDGTEELLVKLNREDLLRKQRTFDNGSIPHQIHLGELHAILRRQEDFYPFLKDNREKIEKILTFRIPYYVGPLARGNSRFAWMTRKSEETITPWNFEEVVDKGASAQSFIERMTNFDKNLPNEKVLPKHSLLYEYFTVYNELTKVKYVTEGMRKPAFLSGEQKKAIVDLLFKTNRKVTVKQLKEDYFKKIECFDSVEISGVEDRFNASLGTYHDLLKIIKDKDFLDNEENEDILEDIVLTLTLFEDREMIEERLKTYAHLFDDKVMKQLKRRRYTGWGRLSRKLINGIRDKQSGKTILDFLKSDGFANRNFMQLIHDDSLTFKEDIQKAQVSGQGDSLHEHIANLAGSPAIKKGILQTVKVVDELVKVMGRHKPENIVIEMARENQTTQKGQKNSRERMKRIEEGIKELGSQILKEHPVENTQLQNEKLYLYYLQNGRDMYVDQELDINRLSDYDVDHIVPQSFLKDDSIDNKVLTRSDKARGKSDNVPSEEVVKKMKNYWRQLLNAKLITQRKFDNLTKAERGGLSELDKAGFIKRQLVETRQITKHVAQILDSRMNTKYDENDKLIREVKVITLKSKLVSDFRKDFQFYKVREINNYHHAHDAYLNAVVGTALIKKYPKLESEFVYGDYKVYDVRKMIAKSEQEIGKATAKYFFYSNIMNFFKTEITLANGEIRKRPLIETNGETGEIVWDKGRDFATVRKVLSMPQVNIVKKTEVQTGGFSKESILPKRNSDKLIARKKDWDPKKYGGFDSPTVAYSVLVVAKVEKGKSKKLKSVKELLGITIMERSSFEKNPIDFLEAKGYKEVKKDLIIKLPKYSLFELENGRKRMLASAGELQKGNELALPSKYVNFLYLASHYEKLKGSPEDNEQKQLFVEQHKHYLDEIIEQISEFSKRVILADANLDKVLSAYNKHRDKPIREQAENIIHLFTLTNLGAPAAFKYFDTTIDRKRYTSTKEVLDATLIHQSITGLYETRIDLSQLGGDGGEAAAKPAPGGSGGVLNLEEEYRLHEKPVPSSIDPSWLQLFPTVWAERAGMGLANQVPPVVVELRSGASPVAVRQYPMSKEAREGIRPHIQRFLDLGVLVPCQSPWNTPLLPVKKPGTNDYRPVQDLREINKRVQDIHPTVPNPYNLLSSLPPSHTWYSVLDLKDAFFCLKLHPNSQPLFAFEWRDPEKGNTGQLTWTRLPQGFKNSPTLFNEALHRDLAPFRALNPQVVLLQYVDDLLVAAPTYRDCKEGTQKLLQELSKLGYRVSAKKAQLCQKEVTYLGYLLKEGKRWLTPARKATVMKIPPPTTPRQVREFLGTAGFCRLWIPGFASLAAPLYPLTKPSIPFIWTEEHQKAFDRIKEALLSAPALALPDLTKPFTLYVDERAGVARGVLTQTLGPWRRPVAYLSKKLDPVASGWPTCLKAVAAVALLLKDADKLTLGQNVTVIASHSLESIVRQPPDRWMTNARMTHYQSLLLNERVSFAPPAVLNPATLLPVESEATPVHRCSEILAEETGTRRDLKDQPLPGVPAWYTDGSSFIAEGKRRAGAAIVDGKRTVWASSLPEGTSAQKAELVALTQALRLAEGKDINIYTDSRYAFATAHIHGAIYKQRGWLTSAGKDIKNKEEILALLEAIHLPKRVAIIHCPGHQKGNDPVATGNRRADEAAKQAALSTRVLAETTKPAGKRTADGSEFEKRTADGSEFESPKKKAKVE

SEQ ID NO: 7241 - protein, 2096 aa, synthetic construct
MPAAKRVKLDGGDKKYSIGLDIGTNSVGWAVITDEYKVPSKKFKVLGNTDRHSIKKNLIGALLFDSGETAEATRLKRTARRRYTRRKNRICYLQEIFSNEMAKVDDSFFHRLEESFLVEEDKKHERHPIFGNIVDEVAYHEKYPTIYHLRKKLVDSTDKADLRLIYLALAHMIKFRGHFLIEGDLNPDNSDVDKLFIQLVQTYNQLFEENPINASGVDAKAILSARLSKSRRLENLIAQLPGEKKNGLFGNLIALSLGLTPNFKSNFDLAEDAKLQLSKDTYDDDLDNLLAQIGDQYADLFLAAKNLSDAILLSDILRVNTEITKAPLSASMIKRYDEHHQDLTLLKALVRQQLPEKYKEIFFDQSKNGYAGYIDGGASQEEFYKFIKPILEKMDGTEELLVKLNREDLLRKQRTFDNGSIPHQIHLGELHAILRRQEDFYPFLKDNREKIEKILTFRIPYYVGPLARGNSRFAWMTRKSEETITPWNFEEVVDKGASAQSFIERMTNFDKNLPNEKVLPKHSLLYEYFTVYNELTKVKYVTEGMRKPAFLSGEQKKAIVDLLFKTNRKVTVKQLKEDYFKKIECFDSVEISGVEDRFNASLGTYHDLLKIIKDKDFLDNEENEDILEDIVLTLTLFEDREMIEERLKTYAHLFDDKVMKQLKRRRYTGWGRLSRKLINGIRDKQSGKTILDFLKSDGFANRNFMQLIHDDSLTFKEDIQKAQVSGQGDSLHEHIANLAGSPAIKKGILQTVKVVDELVKVMGRHKPENIVIEMARENQTTQKGQKNSRERMKRIEEGIKELGSQILKEHPVENTQLQNEKLYLYYLQNGRDMYVDQELDINRLSDYDVDHIVPQSFLKDDSIDNKVLTRSDKARGKSDNVPSEEVVKKMKNYWRQLLNAKLITQRKFDNLTKAERGGLSELDKAGFIKRQLVETRQITKHVAQILDSRMNTKYDENDKLIREVKVITLKSKLVSDFRKDFQFYKVREINNYHHAHDAYLNAVVGTALIKKYPKLESEFVYGDYKVYDVRKMIAKSEQEIGKATAKYFFYSNIMNFFKTEITLANGEIRKRPLIETNGETGEIVWDKGRDFATVRKVLSMPQVNIVKKTEVQTGGFSKESILPKRNSDKLIARKKDWDPKKYGGFDSPTVAYSVLVVAKVEKGKSKKLKSVKELLGITIMERSSFEKNPIDFLEAKGYKEVKKDLIIKLPKYSLFELENGRKRMLASAGELQKGNELALPSKYVNFLYLASHYEKLKGSPEDNEQKQLFVEQHKHYLDEIIEQISEFSKRVILADANLDKVLSAYNKHRDKPIREQAENIIHLFTLTNLGAPAAFKYFDTTIDRKRYTSTKEVLDATLIHQSITGLYETRIDLSQLGGDGGEAAAKPAPGGSGGTLNIEDEYRLHETSKEPDVPLGSTWLSDFPQAWAETGGMGLAVRQAPLIIPLKATSTPVSIKQYPMSQEARLGIKPHIQRLLDQGILVPCQSPWNTPLLPVKKPGTNDYRPVQDLREVNKRVEDIHPTVPNPYNLLSGLPPSHQWYTVLDLKDAFFCLRLHPTSQPLFAFEWRDPEMGISGQLTWTRLPQGFKNSPTLFDEALHRDLADFRIQHPDLILLQYVDDLLLAATSEQDCQRGTRALLQTLGNLGYRASAKKAQICQKQVKYLGYLLKEGQRWLTEARKETVMGQPTPKTPRQLREFLGTAGFCRLWIPGFAEMAAPLYPLTKTGTLFNWGPDQQKAYQEIKQALLTAPALGLPDLTKPFELFVDEKQGYAKGVLTQKLGPWRRPVAYLSKKLDPVAAGWPPCLRMVAAIAVLTKDAGKLTMGQPLVILAPHAVEALVKQPPDRWLSNARMTHYQAMLLDTDRVQFGPVVALNPATLLPLPEKEAPHDCLEILAETHGTRPDLTDQPIPDADYTWYTDGSSFLQEGQRRAGAAVTTETEVIWARALPAGTSAQRAELIALTQALKMAEGKKLNVYTDSRYAFATAHVHGEIYRRRGLLTSEGREIKNKNEILALLKALFLPKRLSIIHCPGHQKGNSAEARGNRMADQAAREAAMKAVLETSTLLAGKRTADGSEFEKRTADGSEFESPKKKAKVE

SEQ ID NO: 7242 - protein, 2096 aa, synthetic construct; identical to SEQ ID NO: 4527

SEQ ID NO: 7243 - protein, 2098 aa, synthetic construct
MPAAKRVKLDGGDKKYSIGLDIGTNSVGWAVITDEYKVPSKKFKVLGNTDRHSIKKNLIGALLFDSGETAEATRLKRTARRRYTRRKNRICYLQEIFSNEMAKVDDSFFHRLEESFLVEEDKKHERHPIFGNIVDEVAYHEKYPTIYHLRKKLVDSTDKADLRLIYLALAHMIKFRGHFLIEGDLNPDNSDVDKLFIQLVQTYNQLFEENPINASGVDAKAILSARLSKSRRLENLIAQLPGEKKNGLFGNLIALSLGLTPNFKSNFDLAEDAKLQLSKDTYDDDLDNLLAQIGDQYADLFLAAKNLSDAILLSDILRVNTEITKAPLSASMIKRYDEHHQDLTLLKALVRQQLPEKYKEIFFDQSKNGYAGYIDGGASQEEFYKFIKPILEKMDGTEELLVKLNREDLLRKQRTFDNGSIPHQIHLGELHAILRRQEDFYPFLKDNREKIEKILTFRIPYYVGPLARGNSRFAWMTRKSEETITPWNFEEVVDKGASAQSFIERMTNFDKNLPNEKVLPKHSLLYEYFTVYNELTKVKYVTEGMRKPAFLSGEQKKAIVDLLFKTNRKVTVKQLKEDYFKKIECFDSVEISGVEDRFNASLGTYHDLLKIIKDKDFLDNEENEDILEDIVLTLTLFEDREMIEERLKTYAHLFDDKVMKQLKRRRYTGWGRLSRKLINGIRDKQSGKTILDFLKSDGFANRNFMQLIHDDSLTFKEDIQKAQVSGQGDSLHEHIANLAGSPAIKKGILQTVKVVDELVKVMGRHKPENIVIEMARENQTTQKGQKNSRERMKRIEEGIKELGSQILKEHPVENTQLQNEKLYLYYLQNGRDMYVDQELDINRLSDYDVDHIVPQSFLKDDSIDNKVLTRSDKARGKSDNVPSEEVVKKMKNYWRQLLNAKLITQRKFDNLTKAERGGLSELDKAGFIKRQLVETRQITKHVAQILDSRMNTKYDENDKLIREVKVITLKSKLVSDFRKDFQFYKVREINNYHHAHDAYLNAVVGTALIKKYPKLESEFVYGDYKVYDVRKMIAKSEQEIGKATAKYFFYSNIMNFFKTEITLANGEIRKRPLIETNGETGEIVWDKGRDFATVRKVLSMPQVNIVKKTEVQTGGFSKESILPKRNSDKLIARKKDWDPKKYGGFDSPTVAYSVLVVAKVEKGKSKKLKSVKELLGITIMERSSFEKNPIDFLEAKGYKEVKKDLIIKLPKYSLFELENGRKRMLASAGELQKGNELALPSKYVNFLYLASHYEKLKGSPEDNEQKQLFVEQHKHYLDEIIEQISEFSKRVILADANLDKVLSAYNKHRDKPIREQAENIIHLFTLTNLGAPAAFKYFDTTIDRKRYTSTKEVLDATLIHQSITGLYETRIDLSQLGGDGGPAPGGSEAAAKGGTAPLEEEYRLFLEAPIQNVTLLEQWKREIPKVWAEINPPGLASTQAPIHVQLLSTALPVRVRQYPITLEAKRSLRETIRKFRAAGILRPVHSPWNTPLLPVRKSGTSEYRMVQDLREVNKRVETIHPTVPNPYTLLSLLPPDRIWYSVLDLKDAFFCIPLAPESQLIFAFEWADAEEGESGQLTWTRLPQGFKNSPTLFDEALNRDLQGFRLDHPSVSLLQYVDDLLIAADTQAACLSATRDLLMTLAELGYRVSGKKAQLCQEEVTYLGFKIHKGSRSLSNSRTQAILQIPVPKTKRQVREFLGTIGYCRLWIPGFAELAQPLYAATRGGNDPLVWGEKEEEAFQSLKLALTQPPALALPSLDKPFQLFVEETSGAAKGVLTQALGPWKRPVAYLSKRLDPVAAGWPRCLRAIAAAALLTREASKLTFGQDIEITSSHNLESLLRSPPDKWLTNARITQYQVLLLDPPRVRFKQTAALNPATLLPETDDTLPIHHCLDTLDSLTSTRPDLTDQPLAQAEATLFTDGSSYIRDGKRYAGAAVVTLDSVIWAEPLPIGTSAQKAELIALTKALEWSKDKSVNIYTDSRYAFATLHVHGMIYRERGLLTAGGKAIKNAPEILALLTAVWLPKRVAVMHCKGHQKDDAPTSTGNRRADEVAREVAIRPLSTQATISAGKRTADGSEFEKRTADGSEFESPKKKAKVE

SEQ ID NO: 7244 - protein, 2098 aa, synthetic construct
MPAAKRVKLDGGDKKYSIGLDIGTNSVGWAVITDEYKVPSKKFKVLGNTDRHSIKKNLIGALLFDSGETAEATRLKRTARRRYTRRKNRICYLQEIFSNEMAKVDDSFFHRLEESFLVEEDKKHERHPIFGNIVDEVAYHEKYPTIYHLRKKLVDSTDKADLRLIYLALAHMIKFRGHFLIEGDLNPDNSDVDKLFIQLVQTYNQLFEENPINASGVDAKAILSARLSKSRRLENLIAQLPGEKKNGLFGNLIALSLGLTPNFKSNFDLAEDAKLQLSKDTYDDDLDNLLAQIGDQYADLFLAAKNLSDAILLSDILRVNTEITKAPLSASMIKRYDEHHQDLTLLKALVRQQLPEKYKEIFFDQSKNGYAGYIDGGASQEEFYKFIKPILEKMDGTEELLVKLNREDLLRKQRTFDNGSIPHQIHLGELHAILRRQEDFYPFLKDNREKIEKILTFRIPYYVGPLARGNSRFAWMTRKSEETITPWNFEEVVDKGASAQSFIERMTNFDKNLPNEKVLPKHSLLYEYFTVYNELTKVKYVTEGMRKPAFLSGEQKKAIVDLLFKTNRKVTVKQLKEDYFKKIECFDSVEISGVEDRFNASLGTYHDLLKIIKDKDFLDNEENEDILEDIVLTLTLFEDREMIEERLKTYAHLFDDKVMKQLKRRRYTGWGRLSRKLINGIRDKQSGKTILDFLKSDGFANRNFMQLIHDDSLTFKEDIQKAQVSGQGDSLHEHIANLAGSPAIKKGILQTVKVVDELVKVMGRHKPENIVIEMARENQTTQKGQKNSRERMKRIEEGIKELGSQILKEHPVENTQLQNEKLYLYYLQNGRDMYVDQELDINRLSDYDVDHIVPQSFLKDDSIDNKVLTRSDKARGKSDNVPSEEVVKKMKNYWRQLLNAKLITQRKFDNLTKAERGGLSELDKAGFIKRQLVETRQITKHVAQILDSRMNTKYDENDKLIREVKVITLKSKLVSDFRKDFQFYKVREINNYHHAHDAYLNAVVGTALIKKYPKLESEFVYGDYKVYDVRKMIAKSEQEIGKATAKYFFYSNIMNFFKTEITLANGEIRKRPLIETNGETGEIVWDKGRDFATVRKVLSMPQVNIVKKTEVQTGGFSKESILPKRNSDKLIARKKDWDPKKYGGFDSPTVAYSVLVVAKVEKGKSKKLKSVKELLGITIMERSSFEKNPIDFLEAKGYKEVKKDLIIKLPKYSLFELENGRKRMLASAGELQKGNELALPSKYVNFLYLASHYEKLKGSPEDNEQKQLFVEQHKHYLDEIIEQISEFSKRVILADANLDKVLSAYNKHRDKPIREQAENIIHLFTLTNLGAPAAFKYFDTTIDRKRYTSTKEVLDATLIHQSITGLYETRIDLSQLGGDGGPAPGGSEAAAKGGTAPLEEEYRLFLEAPIQNVTLLEQWKREIPKVWAEINPPGLASTQAPIHVQLLSTALPVRVRQYPITLEAKRSLRETIRKFRAAGILRPVHSPWNTPLLPVRKSGTSEYRMVQDLREVNKRVETIHPTVPNPYTLLSLLPPDRIWYSVLDLKDAFFCIPLAPESQLIFAFEWADAEEGESGQLTWTRLPQGFKNSPTLFNEALNRDLQGFRLDHPSVSLLQYVDDLLIAADTQAACLSATRDLLMTLAELGYRVSGKKAQLCQEEVTYLGFKIHKGSRSLSNSRTQAILQIPVPKTKRQVREFLGTIGYCRLWIPGFAELAQPLYAATRPGNDPLVWGEKEEEAFQSLKLALTQPPALALPSLDKPFQLFVEETSGAAKGVLTQALGPWKRPVAYLSKRLDPVAAGWPRCLRAIAAAALLTREASKLTFGQDIEITSSHNLESLLRSPPDKWLTNARITQYQVLLLDPPRVRFKQTAALNPATLLPETDDTLPIHHCLDTLDSLTSTRPDLTDQPLAQAEATLFTDGSSYIRDGKRYAGAAVVTLDSVIWAEPLPIGTSAQKAELIALTKALEWSKDKSVNIYTDSRYAFATLHVHGMIYRERGWLTAGGKAIKNAPEILALLTAVWLPKRVAVMHCKGHQKDDAPTSTGNRRADEVAREVAIRPLSTQATISAGKRTADGSEFEKRTADGSEFESPKKKAKVE

SEQ ID NO: 7245 - protein, 2095 aa, synthetic construct
MPAAKRVKLDGGDKKYSIGLDIGTNSVGWAVITDEYKVPSKKFKVLGNTDRHSIKKNLIGALLFDSGETAEATRLKRTARRRYTRRKNRICYLQEIFSNEMAKVDDSFFHRLEESFLVEEDKKHERHPIFGNIVDEVAYHEKYPTIYHLRKKLVDSTDKADLRLIYLALAHMIKFRGHFLIEGDLNPDNSDVDKLFIQLVQTYNQLFEENPINASGVDAKAILSARLSKSRRLENLIAQLPGEKKNGLFGNLIALSLGLTPNFKSNFDLAEDAKLQLSKDTYDDDLDNLLAQIGDQYADLFLAAKNLSDAILLSDILRVNTEITKAPLSASMIKRYDEHHQDLTLLKALVRQQLPEKYKEIFFDQSKNGYAGYIDGGASQEEFYKFIKPILEKMDGTEELLVKLNREDLLRKQRTFDNGSIPHQIHLGELHAILRRQEDFYPFLKDNREKIEKILTFRIPYYVGPLARGNSRFAWMTRKSEETITPWNFEEVVDKGASAQSFIERMTNFDKNLPNEKVLPKHSLLYEYFTVYNELTKVKYVTEGMRKPAFLSGEQKKAIVDLLFKTNRKVTVKQLKEDYFKKIECFDSVEISGVEDRFNASLGTYHDLLKIIKDKDFLDNEENEDILEDIVLTLTLFEDREMIEERLKTYAHLFDDKVMKQLKRRRYTGWGRLSRKLINGIRDKQSGKTILDFLKSDGFANRNFMQLIHDDSLTFKEDIQKAQVSGQGDSLHEHIANLAGSPAIKKGILQTVKVVDELVKVMGRHKPENIVIEMARENQTTQKGQKNSRERMKRIEEGIKELGSQILKEHPVENTQLQNEKLYLYYLQNGRDMYVDQELDINRLSDYDVDHIVPQSFLKDDSIDNKVLTRSDKARGKSDNVPSEEVVKKMKNYWRQLLNAKLITQRKFDNLTKAERGGLSELDKAGFIKRQLVETRQITKHVAQILDSRMNTKYDENDKLIREVKVITLKSKLVSDFRKDFQFYKVREINNYHHAHDAYLNAVVGTALIKKYPKLESEFVYGDYKVYDVRKMIAKSEQEIGKATAKYFFYSNIMNFFKTEITLANGEIRKRPLIETNGETGEIVWDKGRDFATVRKVLSMPQVNIVKKTEVQTGGFSKESILPKRNSDKLIARKKDWDPKKYGGFDSPTVAYSVLVVAKVEKGKSKKLKSVKELLGITIMERSSFEKNPIDFLEAKGYKEVKKDLIIKLPKYSLFELENGRKRMLASAGELQKGNELALPSKYVNFLYLASHYEKLKGSPEDNEQKQLFVEQHKHYLDEIIEQISEFSKRVILADANLDKVLSAYNKHRDKPIREQAENIIHLFTLTNLGAPAAFKYFDTTIDRKRYTSTKEVLDATLIHQSITGLYETRIDLSQLGGDGGPAPGGSEAAAKGGTLQLEEEYRLFEPESTQKQEMDIWLKNFPQAWAETGGMGTAHCQAPVLIQLKATATPISIRQYPMPHEAYQGIKPHIRRMLDQGILKPCQSPWNTPLLPVKKPGTEDYRPVQDLREVNKRVEDIHPTVPNPYNLLSTLPPSHPWYTVLDLKDAFFCLRLHSESQLLFAFEWRDPEIGLSGQLTWTRLPQGFKNSPTLFNEALHSDLADFRVRYPALVLLQYVDDLLLAAATRTECLEGTKALLETLGNKGYRASAKKAQICLQEVTYLGYSLKDGQRWLTKARKEAILSIPVPKNSRQVREFLGTAGYCRLWIPGFAELAAPLYPLTRPGTLFQWGTEQQLAFEDIKKALLSSPALGLPDITKPFELFIDENSGFAKGVLVQKLGPWKRPVAYLSKKLDTVASGWPPCLRMVAAIAILVKDAGKLTLGQPLTILTSHPVEALVRQPPNKWLSNARMTHYQAMLLDAERVHFGPTVSLNPATLLPLPSGGNHHDCLQILAETHGTRPDLTDQPLPDADLTWYTDGSSFIRNGEREAGAAVTTESEVIWAAPLPPGTSAQRAELIALTQALKMAEGKKLTVYTDSRYAFATTHVHGEIYRRRGWLTSEGKEIKNKNEILALLEALFLPKRLSIIHCPGHQKGDSPQAKGNRLADDTAKKAATETHSSLTVLPAGKRTADGSEFEKRTADGSEFESPKKKAKVE

SEQ ID NO: 7246 - protein, 2096 aa, synthetic construct
MPAAKRVKLDGGDKKYSIGLDIGTNSVGWAVITDEYKVPSKKFKVLGNTDRHSIKKNLIGALLFDSGETAEATRLKRTARRRYTRRKNRICYLQEIFSNEMAKVDDSFFHRLEESFLVEEDKKHERHPIFGNIVDEVAYHEKYPTIYHLRKKLVDSTDKADLRLIYLALAHMIKFRGHFLIEGDLNPDNSDVDKLFIQLVQTYNQLFEENPINASGVDAKAILSARLSKSRRLENLIAQLPGEKKNGLFGNLIALSLGLTPNFKSNFDLAEDAKLQLSKDTYDDDLDNLLAQIGDQYADLFLAAKNLSDAILLSDILRVNTEITKAPLSASMIKRYDEHHQDLTLLKALVRQQLPEKYKEIFFDQSKNGYAGYIDGGASQEEFYKFIKPILEKMDGTEELLVKLNREDLLRKQRTFDNGSIPHQIHLGELHAILRRQEDFYPFLKDNREKIEKILTFRIPYYVGPLARGNSRFAWMTRKSEETITPWNFEEVVDKGASAQSFIERMTNFDKNLPNEKVLPKHSLLYEYFTVYNELTKVKYVTEGMRKPAFLSGEQKKAIVDLLFKTNRKVTVKQLKEDYFKKIECFDSVEISGVEDRFNASLGTYHDLLKIIKDKDFLDNEENEDILEDIVLTLTLFEDREMIEERLKTYAHLFDDKVMKQLKRRRYTGWGRLSRKLINGIRDKQSGKTILDFLKSDGFANRNFMQLIHDDSLTFKEDIQKAQVSGQGDSLHEHIANLAGSPAIKKGILQTVKVVDELVKVMGRHKPENIVIEMARENQTTQKGQKNSRERMKRIEEGIKELGSQILKEHPVENTQLQNEKLYLYYLQNGRDMYVDQELDINRLSDYDVDHIVPQSFLKDDSIDNKVLTRSDKARGKSDNVPSEEVVKKMKNYWRQLLNAKLITQRKFDNLTKAERGGLSELDKAGFIKRQLVETRQITKHVAQILDSRMNTKYDENDKLIREVKVITLKSKLVSDFRKDFQFYKVREINNYHHAHDAYLNAVVGTALIKKYPKLESEFVYGDYKVYDVRKMIAKSEQEIGKATAKYFFYSNIMNFFKTEITLANGEIRKRPLIETNGETGEIVWDKGRDFATVRKVLSMPQVNIVKKTEVQTGGFSKESILPKRNSDKLIARKKDWDPKKYGGFDSPTVAYSVLVVAKVEKGKSKKLKSVKELLGITIMERSSFEKNPIDFLEAKGYKEVKKDLIIKLPKYSLFELENGRKRMLASAGELQKGNELALPSKYVNFLYLASHYEKLKGSPEDNEQKQLFVEQHKHYLDEIIEQISEFSKRVILADANLDKVLSAYNKHRDKPIREQAENIIHLFTLTNLGAPAAFKYFDTTIDRKRYTSTKEVLDATLIHQSITGLYETRIDLSQLGGDGGPAPGGSEAAAKGGTLGIEDEYRLHETSTEPDVSLGSTWLSDFPQAWAETGGMGLAVRQAPLIIPLKATSTPVSIQQYPMSHEARLGIKPHIQRLLDQGILVPCQSPWNTPLLPVKKPGTNDYRPVQDLREVNKRVEDIHPTVPNPYNLLSGLPPSHQWYTVLDLKDAFFCLRLHPTSQPLFAFEWRDPGMGISGQLTWTRLPQGFKNSPTLFNEALHRDLADFRIQHPDLILLQYVDDILLAATSELDCQQGTRALLQTLGDLGYRASAKKAQICQKQVKYLGYLLREGQRWLTEARKETVMGQPVPKTPRQLREFLGTAGFCRLWIPGFAEMAAPLYPLTKPGTLFSWGPDQQKAYQEIKQALLTAPALGLPDLTKPFELFVDEKQGYAKGVLTQKLGPWRRPVAYLSKKLDPVAAGWPPCLRMVAAIAVLTKDAGKLTMGQPLVILAPHAVEALVKQPPDRWLSNARMTHYQAMLLDTDRVQFGPVVALNPATLLPLPEEGAPHDCLEILAETHGTRPDLTDQPIPDADHTWYTDGSSFLQEGQRKAGAAVTTETEVIWAGALPAGTSAQRAELIALTQALKMAEGKRLNVYTDSRYAFATAHIHGEIYRRRGWLTSEGREIKNKSEILALLKALFLPKRLSIIHCLGHQKGDSAEARGNRLADQAAREAAIKTPPDTSTLLAGKRTADGSEFEKRTADGSEFESPKKKAKVE

SEQ ID NO: 7247 - protein, 2096 aa, synthetic construct
MPAAKRVKLDGGDKKYSIGLDIGTNSVGWAVITDEYKVPSKKFKVLGNTDRHSIKKNLIGALLFDSGETAEATRLKRTARRRYTRRKNRICYLQEIFSNEMAKVDDSFFHRLEESFLVEEDKKHERHPIFGNIVDEVAYHEKYPTIYHLRKKLVDSTDKADLRLIYLALAHMIKFRGHFLIEGDLNPDNSDVDKLFIQLVQTYNQLFEENPINASGVDAKAILSARLSKSRRLENLIAQLPGEKKNGLFGNLIALSLGLTPNFKSNFDLAEDAKLQLSKDTYDDDLDNLLAQIGDQYADLFLAAKNLSDAILLSDILRVNTEITKAPLSASMIKRYDEHHQDLTLLKALVRQQLPEKYKEIFFDQSKNGYAGYIDGGASQEEFYKFIKPILEKMDGTEELLVKLNREDLLRKQRTFDNGSIPHQIHLGELHAILRRQEDFYPFLKDNREKIEKILTFRIPYYVGPLARGNSRFAWMTRKSEETITPWNFEEVVDKGASAQSFIERMTNFDKNLPNEKVLPKHSLLYEYFTVYNELTKVKYVTEGMRKPAFLSGEQKKAIVDLLFKTNRKVTVKQLKEDYFKKIECFDSVEISGVEDRFNASLGTYHDLLKIIKDKDFLDNEENEDILEDIVLTLTLFEDREMIEERLKTYAHLFDDKVMKQLKRRRYTGWGRLSRKLINGIRDKQSGKTILDFLKSDGFANRNFMQLIHDDSLTFKEDIQKAQVSGQGDSLHEHIANLAGSPAIKKGILQTVKVVDELVKVMGRHKPENIVIEMARENQTTQKGQKNSRERMKRIEEGIKELGSQILKEHPVENTQLQNEKLYLYYLQNGRDMYVDQELDINRLSDYDVDHIVPQSFLKDDSIDNKVLTRSDKARGKSDNVPSEEVVKKMKNYWRQLLNAKLITQRKFDNLTKAERGGLSELDKAGFIKRQLVETRQITKHVAQILDSRMNTKYDENDKLIREVKVITLKSKLVSDFRKDFQFYKVREINNYHHAHDAYLNAVVGTALIKKYPKLESEFVYGDYKVYDVRKMIAKSEQEIGKATAKYFFYSNIMNFFKTEITLANGEIRKRPLIETNGETGEIVWDKGRDFATVRKVLSMPQVNIVKKTEVQTGGFSKESILPKRNSDKLIARKKDWDPKKYGGFDSPTVAYSVLVVAKVEKGKSKKLKSVKELLGITIMERSSFEKNPIDFLEAKGYKEVKKDLIIKLPKYSLFELENGRKRMLASAGELQKGNELALPSKYVNFLYLASHYEKLKGSPEDNEQKQLFVEQHKHYLDEIIEQISEFSKRVILADANLDKVLSAYNKHRDKPIREQAENIIHLFTLTNLGAPAAFKYFDTTIDRKRYTSTKEVLDATLIHQSITGLYETRIDLSQLGGDGGPAPGGSEAAAKGGTLNIEDEYRLHETSKGPDVPLGSTWLSDFPQAWAETGGMGLAVRQAPLIIPLKATSTPVSIKQYPMSQEARLGIKPHIQRLLDQGILVPCQSPWNTPLLPVKKPGTNDYRPVQDLREVNKRVEDIHPTVPNPYNLLSGLPPSHQWYTVLDLKDAFFCLRLHPTSQSLFAFEWRDPEMGISGQLTWTRLPQGFKNSPTLFDEALHRDLADFRIQHPDLILLQYVDDLLLAATSELDCQQGTRALLQTLGDLGYRASAKKAQICQKQVKYLGYLLKEGQRWLTEARKETVMGQPTPKTPRQLREFLGTAGFCRLWIPGFAEMAAPLYPLTKTGTLFEWGPDQQKAYQEIKQALLTAPALGLPDLTKPFELFVDEKQGYAKGVLTQKLGPWRRPVAYLSKKLDPVAAGWPPCLRMVAAIAVLTKDAGKLTMGQPLVILAPHAVEALVKQPPDRWLSNARMTHYQALLLDTDRVQFGPIVALNPATLLPLPEEGLQHDCLDILAEAHGTRPDLTDQPLPDADHTWYTDGSSFLQEGQRKAGAAVTTETEVVWAKALPAGTSAQRAELIALTQALKMAEGKKLNVYTDSRYAFATAHIHGEIYRRRGLLTSEGKEIKNKDEILALLKALFLPKRLSIIHCPGHQKGNRAEARGNRMADQAAREVATRETPETSTLLAGKRTADGSEFEKRTADGSEFESPKKKAKVE

SEQ ID NO: 7248 - protein, 2090 aa, synthetic construct
MPAAKRVKLDGGDKKYSIGLDIGTNSVGWAVITDEYKVPSKKFKVLGNTDRHSIKKNLIGALLFDSGETAEATRLKRTARRRYTRRKNRICYLQEIFSNEMAKVDDSFFHRLEESFLVEEDKKHERHPIFGNIVDEVAYHEKYPTIYHLRKKLVDSTDKADLRLIYLALAHMIKFRGHFLIEGDLNPDNSDVDKLFIQLVQTYNQLFEENPINASGVDAKAILSARLSKSRRLENLIAQLPGEKKNGLFGNLIALSLGLTPNFKSNFDLAEDAKLQLSKDTYDDDLDNLLAQIGDQYADLFLAAKNLSDAILLSDILRVNTEITKAPLSASMIKRYDEHHQDLTLLKALVRQQLPEKYKEIFFDQSKNGYAGYIDGGASQEEFYKFIKPILEKMDGTEELLVKLNREDLLRKQRTFDNGSIPHQIHLGELHAILRRQEDFYPFLKDNREKIEKILTFRIPYYVGPLARGNSRFAWMTRKSEETITPWNFEEVVDKGASAQSFIERMTNFDKNLPNEKVLPKHSLLYEYFTVYNELTKVKYVTEGMRKPAFLSGEQKKAIVDLLFKTNRKVTVKQLKEDYFKKIECFDSVEISGVEDRFNASLGTYHDLLKIIKDKDFLDNEENEDILEDIVLTLTLFEDREMIEERLKTYAHLFDDKVMKQLKRRRYTGWGRLSRKLINGIRDKQSGKTILDFLKSDGFANRNFMQLIHDDSLTFKEDIQKAQVSGQGDSLHEHIANLAGSPAIKKGILQTVKVVDELVKVMGRHKPENIVIEMARENQTTQKGQKNSRERMKRIEEGIKELGSQILKEHPVENTQLQNEKLYLYYLQNGRDMYVDQELDINRLSDYDVDHIVPQSFLKDDSIDNKVLTRSDKARGKSDNVPSEEVVKKMKNYWRQLLNAKLITQRKFDNLTKAERGGLSELDKAGFIKRQLVETRQITKHVAQILDSRMNTKYDENDKLIREVKVITLKSKLVSDFRKDFQFYKVREINNYHHAHDAYLNAVVGTALIKKYPKLESEFVYGDYKVYDVRKMIAKSEQEIGKATAKYFFYSNIMNFFKTEITLANGEIRKRPLIETNGETGEIVWDKGRDFATVRKVLSMPQVNIVKKTEVQTGGFSKESILPKRNSDKLIARKKDWDPKKYGGFDSPTVAYSVLVVAKVEKGKSKKLKSVKELLGITIMERSSFEKNPIDFLEAKGYKEVKKDLIIKLPKYSLFELENGRKRMLASAGELQKGNELALPSKYVNFLYLASHYEKLKGSPEDNEQKQLFVEQHKHYLDEIIEQISEFSKRVILADANLDKVLSAYNKHRDKPIREQAENIIHLFTLTNLGAPAAFKYFDTTIDRKRYTSTKEVLDATLIHQSITGLYETRIDLSQLGGDGGPAPGGSEAAAKGGTLQLDDEYRLYSPLVKPDQNIQFWLEQFPQAWAETAGMGLAKQVPPQVIQLKASATPVSVRQYPLSKEAQEGIRPHVQRLIQQGILVPVQSPWNTPLLPVRKPGTNDYRPVQDLREVNKRVQDIHPTVPNPYNLLCALPPQRSWYTVLDLKDAFFCLRLHPTSQPLFAFEWRDPGTGRTGQLTWTRLPQGFKNSPTIFDEALHRDLANFRIQHPQVTLLQYVDDLLLAGATKQDCLEGTKALLLELSDLGYRASAKKAQICRREVTYLGYSLRDGQRWLTEARKKTVVQIPAPTTAKQVREFLGTAGFCRLWIPGFATLAAPLYPLTKEKGEFSWAPEHQKAFDAIKKALLSAPALALPDVTKPFTLYVDERKGVARGVLTQTLGPWRRPVAYLSKKLDPVASGWPVCLKAIAAVAILVKDADKLTLGQNITVIAPHALENIVRQPPDRWMTNARMTHYQSLLLTERVTFAPPAALNPATLLPEETDEPVTHDCHQLLIEETGVRKDLTDIPLTGEVLTWFTDGSSYVVEGKRMAGAAVVDGTRTIWASSLPEGTSAQKAELMALTQALRLAEGKSINIYTDSRYAFATAHVHGAIYKQRGLLTSAGREIKNKEEILSLLEALHLPKRLAIIHCPGHQKAKDPISRGNQMADRVAKQAAQGVNLLAGKRTADGSEFEKRTADGSEFESPKKKAKVE

SEQ ID NO: 7249 - protein, 2176 aa, synthetic construct
MPAAKRVKLDGGDKKYSIGLDIGTNSVGWAVITDEYKVPSKKFKVLGNTDRHSIKKNLIGALLFDSGETAEATRLKRTARRRYTRRKNRICYLQEIFSNEMAKVDDSFFHRLEESFLVEEDKKHERHPIFGNIVDEVAYHEKYPTIYHLRKKLVDSTDKADLRLIYLALAHMIKFRGHFLIEGDLNPDNSDVDKLFIQLVQTYNQLFEENPINASGVDAKAILSARLSKSRRLENLIAQLPGEKKNGLFGNLIALSLGLTPNFKSNFDLAEDAKLQLSKDTYDDDLDNLLAQIGDQYADLFLAAKNLSDAILLSDILRVNTEITKAPLSASMIKRYDEHHQDLTLLKALVRQQLPEKYKEIFFDQSKNGYAGYIDGGASQEEFYKFIKPILEKMDGTEELLVKLNREDLLRKQRTFDNGSIPHQIHLGELHAILRRQEDFYPFLKDNREKIEKILTFRIPYYVGPLARGNSRFAWMTRKSEETITPWNFEEVVDKGASAQSFIERMTNFDKNLPNEKVLPKHSLLYEYFTVYNELTKVKYVTEGMRKPAFLSGEQKKAIVDLLFKTNRKVTVKQLKEDYFKKIECFDSVEISGVEDRFNASLGTYHDLLKIIKDKDFLDNEENEDILEDIVLTLTLFEDREMIEERLKTYAHLFDDKVMKQLKRRRYTGWGRLSRKLINGIRDKQSGKTILDFLKSDGFANRNFMQLIHDDSLTFKEDIQKAQVSGQGDSLHEHIANLAGSPAIKKGILQTVKVVDELVKVMGRHKPENIVIEMARENQTTQKGQKNSRERMKRIEEGIKELGSQILKEHPVENTQLQNEKLYLYYLQNGRDMYVDQELDINRLSDYDVDHIVPQSFLKDDSIDNKVLTRSDKARGKSDNVPSEEVVKKMKNYWRQLLNAKLITQRKFDNLTKAERGGLSELDKAGFIKRQLVETRQITKHVAQILDSRMNTKYDENDKLIREVKVITLKSKLVSDFRKDFQFYKVREINNYHHAHDAYLNAVVGTALIKKYPKLESEFVYGDYKVYDVRKMIAKSEQEIGKATAKYFFYSNIMNFFKTEITLANGEIRKRPLIETNGETGEIVWDKGRDFATVRKVLSMPQVNIVKKTEVQTGGFSKESILPKRNSDKLIARKKDWDPKKYGGFDSPTVAYSVLVVAKVEKGKSKKLKSVKELLGITIMERSSFEKNPIDFLEAKGYKEVKKDLIIKLPKYSLFELENGRKRMLASAGELQKGNELALPSKYVNFLYLASHYEKLKGSPEDNEQKQLFVEQHKHYLDEIIEQISEFSKRVILADANLDKVLSAYNKHRDKPIREQAENIIHLFTLTNLGAPAAFKYFDTTIDRKRYTSTKEVLDATLIHQSITGLYETRIDLSQLGGDGGPAPGGSEAAAKGGMDPLQLLQPLEAEIKGTKLKAHWNSGATITCVPEAFLEDERPIQTMLIKTIHGEKQQDVYYLTFKVQGRKVEAEVLASPYDYILLNPSDVPWLMKKPLQLTVLVPLHEYQERLLQQTALPKEQKELLQKLFLKYDALWQHWENQVGHRRIKPHNIATGTLAPRPQKQYPINPKAKPSIQIVIDDLLKQGVLIQQNSTMNTPVYPVPKPDGKWRMVLDYREVNKTIPLIAAQNQHSAGILSSIYRGKYKTTLDLTNGFWAHPITPESYWLTAFTWQGKQYCWTRLPQGFLNSPALFTADVVDLLKEIPNVQAYVDDIYISHDDPQEHLEQLEKIFSILLNAGYVVSLKKSEIAQREVEFLGFNITKEGRGLTDTFKQKLLNITPPKDLKQLQSILGLLNFARNFIPNYSELVKPLYTIVANANGKFISWTEDNSNQLQHIISVLNQADNLEERNPETRLIIKVNSSPSAGYIRYYNEGSKRPIMYVNYIFSKAEAKFTQTEKLLTTMHKGLIKAMDLAMGQEILVYSPIVSMTKIQRTPLPERKALPVRWITWMTYLEDPRIQFHYDKSLPELQQIPNVTEDVIAKTKHPSEFAMVFYTDGSAIKHPDVNKSHSAGMGIAQVQFIPEYKIVHQWSIPLGDHTAQLAEIAAVEFACKKALKISGPVLIVTDSFYVAESANKELPYWKSNGFLNNKKKPLRHVSKWKSIAECLQLKPDIIIMHEKGHQQPMTTLHTEGNNLADKLATQGSYVVHAGKRTADGSEFEKRTADGSEFESPKKKAKVE

SEQ ID NO: 7250 - protein, 2094 aa, synthetic construct
MPAAKRVKLDGGDKKYSIGLDIGTNSVGWAVITDEYKVPSKKFKVLGNTDRHSIKKNLIGALLFDSGETAEATRLKRTARRRYTRRKNRICYLQEIFSNEMAKVDDSFFHRLEESFLVEEDKKHERHPIFGNIVDEVAYHEKYPTIYHLRKKLVDSTDKADLRLIYLALAHMIKFRGHFLIEGDLNPDNSDVDKLFIQLVQTYNQLFEENPINASGVDAKAILSARLSKSRRLENLIAQLPGEKKNGLFGNLIALSLGLTPNFKSNFDLAEDAKLQLSKDTYDDDLDNLLAQIGDQYADLFLAAKNLSDAILLSDILRVNTEITKAPLSASMIKRYDEHHQDLTLLKALVRQQLPEKYKEIFFDQSKNGYAGYIDGGASQEEFYKFIKPILEKMDGTEELLVKLNREDLLRKQRTFDNGSIPHQIHLGELHAILRRQEDFYPFLKDNREKIEKILTFRIPYYVGPLARGNSRFAWMTRKSEETITPWNFEEVVDKGASAQSFIERMTNFDKNLPNEKVLPKHSLLYEYFTVYNELTKVKYVTEGMRKPAFLSGEQKKAIVDLLFKTNRKVTVKQLKEDYFKKIECFDSVEISGVEDRFNASLGTYHDLLKIIKDKDFLDNEENEDILEDIVLTLTLFEDREMIEERLKTYAHLFDDKVMKQLKRRRYTGWGRLSRKLINGIRDKQSGKTILDFLKSDGFANRNFMQLIHDDSLTFKEDIQKAQVSGQGDSLHEHIANLAGSPAIKKGILQTVKVVDELVKVMGRHKPENIVIEMARENQTTQKGQKNSRERMKRIEEGIKELGSQILKEHPVENTQLQNEKLYLYYLQNGRDMYVDQELDINRLSDYDVDHIVPQSFLKDDSIDNKVLTRSDKARGKSDNVPSEEVVKKMKNYWRQLLNAKLITQRKFDNLTKAERGGLSELDKAGFIKRQLVETRQITKHVAQILDSRMNTKYDENDKLIREVKVITLKSKLVSDFRKDFQFYKVREINNYHHAHDAYLNAVVGTALIKKYPKLESEFVYGDYKVYDVRKMIAKSEQEIGKATAKYFFYSNIMNFFKTEITLANGEIRKRPLIETNGETGEIVWDKGRDFATVRKVLSMPQVNIVKKTEVQTGGFSKESILPKRNSDKLIARKKDWDPKKYGGFDSPTVAYSVLVVAKVEKGKSKKLKSVKELLGITIMERSSFEKNPIDFLEAKGYKEVKKDLIIKLPKYSLFELENGRKRMLASAGELQKGNELALPSKYVNFLYLASHYEKLKGSPEDNEQKQLFVEQHKHYLDEIIEQISEFSKRVILADANLDKVLSAYNKHRDKPIREQAENIIHLFTLTNLGAPAAFKYFDTTIDRKRYTSTKEVLDATLIHQSITGLYETRIDLSQLGGDGGPAPGGSEAAAKGGVLNLEEEYRLHEKPVPSSIDPSWLQLFPTVWAERAGMGLANQVPPVVVELRSGASPVAVRQYPMSKEAREGIRPHIQRFLDLGVLVPCQSPWNTPLLPVKKPGTNDYRPVQDLREINKRVQDIHPTVPNPYNLLSSLPPSHTWYSVLDLKDAFFCLKLHPNSQPLFAFEWRDPEKGNTGQLTWTRLPQGFKNSPTLFNEALHRDLAPFRALNPQVVLLQYVDDLLVAAPTYRDCKEGTQKLLQELSKLGYRVSAKKAQLCQKEVTYLGYLLKEGKRWLTPARKATVMKIPPPTTPRQVREFLGKAGFCRLFIPGFASLAAPLYPLTKPSIPFIWTEEHQKAFDRIKEALLSAPALALPDLTKPFTLYVDERAGVARGVLTQTLGPWRRPVAYLSKKLDPVASGWPTCLKAVAAVALLLKDADKLTLGQNVTVIASHSLESIVRQPPDRWMTNARMTHYQSLLLNERVSFAPPAVLNPATLLPVESEATPVHRCSEILAEETGTRRDLKDQPLPGVPAWYTDGSSFIAEGKRRAGAAIVDGKRTVWASSLPEGTSAQKAELVALTQALRLAEGKDINIYTDSRYAFATAHIHGAIYKQRGWLTSAGKDIKNKEEILALLEAIHLPKRVAIIHCPGHQKGNDPVATGNRRADEAAKQAALSTRVLAETTKPAGKRTADGSEFEKRTADGSEFESPKKKAKVE

SEQ ID NO: 7251 - protein, 2096 aa, synthetic construct
MPAAKRVKLDGGDKKYSIGLDIGTNSVGWAVITDEYKVPSKKFKVLGNTDRHSIKKNLIGALLFDSGETAEATRLKRTARRRYTRRKNRICYLQEIFSNEMAKVDDSFFHRLEESFLVEEDKKHERHPIFGNIVDEVAYHEKYPTIYHLRKKLVDSTDKADLRLIYLALAHMIKFRGHFLIEGDLNPDNSDVDKLFIQLVQTYNQLFEENPINASGVDAKAILSARLSKSRRLENLIAQLPGEKKNGLFGNLIALSLGLTPNFKSNFDLAEDAKLQLSKDTYDDDLDNLLAQIGDQYADLFLAAKNLSDAILLSDILRVNTEITKAPLSASMIKRYDEHHQDLTLLKALVRQQLPEKYKEIFFDQSKNGYAGYIDGGASQEEFYKFIKPILEKMDGTEELLVKLNREDLLRKQRTFDNGSIPHQIHLGELHAILRRQEDFYPFLKDNREKIEKILTFRIPYYVGPLARGNSRFAWMTRKSEETITPWNFEEVVDKGASAQSFIERMTNFDKNLPNEKVLPKHSLLYEYFTVYNELTKVKYVTEGMRKPAFLSGEQKKAIVDLLFKTNRKVTVKQLKEDYFKKIECFDSVEISGVEDRFNASLGTYHDLLKIIKDKDFLDNEENEDILEDIVLTLTLFEDREMIEERLKTYAHLFDDKVMKQLKRRRYTGWGRLSRKLINGIRDKQSGKTILDFLKSDGFANRNFMQLIHDDSLTFKEDIQKAQVSGQGDSLHEHIANLAGSPAIKKGILQTVKVVDELVKVMGRHKPENIVIEMARENQTTQKGQKNSRERMKRIEEGIKELGSQILKEHPVENTQLQNEKLYLYYLQNGRDMYVDQELDINRLSDYDVDHIVPQSFLKDDSIDNKVLTRSDKARGKSDNVPSEEVVKKMKNYWRQLLNAKLITQRKFDNLTKAERGGLSELDKAGFIKRQLVETRQITKHVAQILDSRMNTKYDENDKLIREVKVITLKSKLVSDFRKDFQFYKVREINNYHHAHDAYLNAVVGTALIKKYPKLESEFVYGDYKVYDVRKMIAKSEQEIGKATAKYFFYSNIMNFFKTEITLANGEIRKRPLIETNGETGEIVWDKGRDFATVRKVLSMPQVNIVKKTEVQTGGFSKESILPKRNSDKLIARKKDWDPKKYGGFDSPTVAYSVLVVAKVEKGKSKKLKSVKELLGITIMERSSFEKNPIDFLEAKGYKEVKKDLIIKLPKYSLFELENGRKRMLASAGELQKGNELALPSKYVNFLYLASHYEKLKGSPEDNEQKQLFVEQHKHYLDEIIEQISEFSKRVILADANLDKVLSAYNKHRDKPIREQAENIIHLFTLTNLGAPAAFKYFDTTIDRKRYTSTKEVLDATLIHQSITGLYETRIDLSQLGGDGGPAPGGSEAAAKGGTLNIEDEYRLHETSKEPDVPLGSTWLSDFPQAWAETGGMGLAVRQAPLIIPLKATSTPVSIKQYPMSQEARLGIKPHIQRLLDQGILVPCQSPWNTPLLPVKKPGTNDYRPVQDLREVNKRVEDIHPTVPNPYNLLSGLPPSHQWYTVLDLKDAFFCLRLHPTSQPLFAFEWRDPEMGISGQLTWTRLPQGFKNSPTLFDEALHRDLADFRIQHPDLILLQYVDDLLLAATSEQDCQRGTRALLQTLGNLGYRASAKKAQICQKQVKYLGYLLKEGQRWLTEARKETVMGQPTPKTPRQLREFLGTAGFCRLWIPGFAEMAAPLYPLTKTGTLFNWGPDQQKAYQEIKQALLTAPALGLPDLTKPFELFVDEKQGYAKGVLTQKLGPWRRPVAYLSKKLDPVAAGWPPCLRMVAAIAVLTKDAGKLTMGQPLVILAPHAVEALVKQPPDRWLSNARMTHYQAMLLDTDRVQFGPVVALNPATLLPLPEKEAPHDCLEILAETHGTRPDLTDQPIPDADYTWYTDGSSFLQEGQRRAGAAVTTETEVIWARALPAGTSAQRAELIALTQALKMAEGKKLNVYTDSRYAFATAHVHGEIYRRRGLLTSEGREIKNKNEILALLKALFLPKRLSIIHCPGHQKGNSAEARGNRMADQAAREAAMKAVLETSTLLAGKRTADGSEFEKRTADGSEFESPKKKAKVE

SEQ ID NO: 7252 - protein, 2096 aa, synthetic construct
MPAAKRVKLDGGDKKYSIGLDIGTNSVGWAVITDEYKVPSKKFKVLGNTDRHSIKKNLIGALLFDSGETAEATRLKRTARRRYTRRKNRICYLQEIFSNEMAKVDDSFFHRLEESFLVEEDKKHERHPIFGNIVDEVAYHEKYPTIYHLRKKLVDSTDKADLRLIYLALAHMIKFRGHFLIEGDLNPDNSDVDKLFIQLVQTYNQLFEENPINASGVDAKAILSARLSKSRRLENLIAQLPGEKKNGLFGNLIALSLGLTPNFKSNFDLAEDAKLQLSKDTYDDDLDNLLAQIGDQYADLFLAAKNLSDAILLSDILRVNTEITKAPLSASMIKRYDEHHQDLTLLKALVRQQLPEKYKEIFFDQSKNGYAGYIDGGASQEEFYKFIKPILEKMDGTEELLVKLNREDLLRKQRTFDNGSIPHQIHLGELHAILRRQEDFYPFLKDNREKIEKILTFRIPYYVGPLARGNSRFAWMTRKSEETITPWNFEEVVDKGASAQSFIERMTNFDKNLPNEKVLPKHSLLYEYFTVYNELTKVKYVTEGMRKPAFLSGEQKKAIVDLLFKTNRKVTVKQLKEDYFKKIECFDSVEISGVEDRFNASLGTYHDLLKIIKDKDFLDNEENEDILEDIVLTLTLFEDREMIEERLKTYAHLFDDKVMKQLKRRRYTGWGRLSRKLINGIRDKQSGKTILDFLKSDGFANRNFMQLIHDDSLTFKEDIQKAQVSGQGDSLHEHIANLAGSPAIKKGILQTVKVVDELVKVMGRHKPENIVIEMARENQTTQKGQKNSRERMKRIEEGIKELGSQILKEHPVENTQLQNEKLYLYYLQNGRDMYVDQELDINRLSDYDVDHIVPQSFLKDDSIDNKVLTRSDKARGKSDNVPSEEVVKKMKNYWRQLLNAKLITQRKFDNLTKAERGGLSELDKAGFIKRQLVETRQITKHVAQILDSRMNTKYDENDKLIREVKVITLKSKLVSDFRKDFQFYKVREINNYHHAHDAYLNAVVGTALIKKYPKLESEFVYGDYKVYDVRKMIAKSEQEIGKATAKYFFYSNIMNFFKTEITLANGEIRKRPLIETNGETGEIVWDKGRDFATVRKVLSMPQVNIVKKTEVQTGGFSKESILPKRNSDKLIARKKDWDPKKYGGFDSPTVAYSVLVVAKVEKGKSKKLKSVKELLGITIMERSSFEKNPIDFLEAKGYKEVKKDLIIKLPKYSLFELENGRKRMLASAGELQKGNELALPSKYVNFLYLASHYEKLKGSPEDNEQKQLFVEQHKHYLDEIIEQISEFSKRVILADANLDKVLSAYNKHRDKPIREQAENIIHLFTLTNLGAPAAFKYFDTTIDRKRYTSTKEVLDATLIHQSITGLYETRIDLSQLGGDGGPAPGGSEAAAKGGTLNIEDEYRLHETSKEPDVPLGSTWLSDFPQAWAETGGMGLAVRQAPLIIPLKATSTPVSIKQYPMSQEARLGIKPHIQRLLDQGILVPCQSPWNTPLLPVKKPGTNDYRPVQDLREVNKRVEDIHPTVPNPYNLLSGLPPSHQWYTVLDLKDAFFCLRLHPTSQPLFAFEWRDPEMGISGQLTWTRLPQGFKNSPTLFNEALHRDLADFRIQHPDLILLQYVDDLLLAATSEQDCQRGTRALLQTLGNLGYRASAKKAQICQKQVKYLGYLLKEGQRWLTEARKETVMGQPTPKTPRQLREFLGTAGFCRLWIPGFAEMAAPLYPLTKPGTLFNWGPDQQKAYQEIKQALLTAPALGLPDLTKPFELFVDEKQGYAKGVLTQKLGPWRRPVAYLSKKLDPVAAGWPPCLRMVAAIAVLTKDAGKLTMGQPLVILAPHAVEALVKQPPDRWLSNARMTHYQAMLLDTDRVQFGPVVALNPATLLPLPEKEAPHDCLEILAETHGTRPDLTDQPIPDADYTWYTDGSSFLQEGQRRAGAAVTTETEVIWARALPAGTSAQRAELIALTQALKMAEGKKLNVYTDSRYAFATAHVHGEIYRRRGWLTSEGREIKNKNEILALLKALFLPKRLSIIHCPGHQKGNSAEARGNRMADQAAREAAMKAVLETSTLLAGKRTADGSEFEKRTADGSEFESPKKKAKVE

SEQ ID NO: 7253 - protein, 2098 aa, synthetic construct
MPAAKRVKLDGGDKKYSIGLDIGTNSVGWAVITDEYKVPSKKFKVLGNTDRHSIKKNLIGALLFDSGETAEATRLKRTARRRYTRRKNRICYLQEIFSNEMAKVDDSFFHRLEESFLVEEDKKHERHPIFGNIVDEVAYHEKYPTIYHLRKKLVDSTDKADLRLIYLALAHMIKFRGHFLIEGDLNPDNSDVDKLFIQLVQTYNQLFEENPINASGVDAKAILSARLSKSRRLENLIAQLPGEKKNGLFGNLIALSLGLTPNFKSNFDLAEDAKLQLSKDTYDDDLDNLLAQIGDQYADLFLAAKNLSDAILLSDILRVNTEITKAPLSASMIKRYDEHHQDLTLLKALVRQQLPEKYKEIFFDQSKNGYAGYIDGGASQEEFYKFIKPILEKMDGTEELLVKLNREDLLRKQRTFDNGSIPHQIHLGELHAILRRQEDFYPFLKDNREKIEKILTFRIPYYVGPLARGNSRFAWMTRKSEETITPWNFEEVVDKGASAQSFIERMTNFDKNLPNEKVLPKHSLLYEYFTVYNELTKVKYVTEGMRKPAFLSGEQKKAIVDLLFKTNRKVTVKQLKEDYFKKIECFDSVEISGVEDRFNASLGTYHDLLKIIKDKDFLDNEENEDILEDIVLTLTLFEDREMIEERLKTYAHLFDDKVMKQLKRRRYTGWGRLSRKLINGIRDKQSGKTILDFLKSDGFANRNFMQLIHDDSLTFKEDIQKAQVSGQGDSLHEHIANLAGSPAIKKGILQTVKVVDELVKVMGRHKPENIVIEMARENQTTQKGQKNSRERMKRIEEGIKELGSQILKEHPVENTQLQNEKLYLYYLQNGRDMYVDQELDINRLSDYDVDHIVPQSFLKDDSIDNKVLTRSDKARGKSDNVPSEEVVKKMKNYWRQLLNAKLITQRKFDNLTKAERGGLSELDKAGFIKRQLVETRQITKHVAQILDSRMNTKYDENDKLIREVKVITLKSKLVSDFRKDFQFYKVREINNYHHAHDAYLNAVVGTALIKKYPKLESEFVYGDYKVYDVRKMIAKSEQEIGKATAKYFFYSNIMNFFKTEITLANGEIRKRPLIETNGETGEIVWDKGRDFATVRKVLSMPQVNIVKKTEVQTGGFSKESILPKRNSDKLIARKKDWDPKKYGGFDSPTVAYSVLVVAKVEKGKSKKLKSVKELLGITIMERSSFEKNPIDFLEAKGYKEVKKDLIIKLPKYSLFELENGRKRMLASAGELQKGNELALPSKYVNFLYLASHYEKLKGSPEDNEQKQLFVEQHKHYLDEIIEQISEFSKRVILADANLDKVLSAYNKHRDKPIREQAENIIHLFTLTNLGAPAAFKYFDTTIDRKRYTSTKEVLDATLIHQSITGLYETRIDLSQLGGDGGPAPEAAAKGGSGGTAPLEEEYRLFLEAPIQNVTLLEQWKREIPKVWAEINPPGLASTQAPIHVQLLSTALPVRVRQYPITLEAKRSLRETIRKFRAAGILRPVHSPWNTPLLPVRKSGTSEYRMVQDLREVNKRVETIHPTVPNPYTLLSLLPPDRIWYSVLDLKDAFFCIPLAPESQLIFAFEWADAEEGESGQLTWTRLPQGFKNSPTLFDEALNRDLQGFRLDHPSVSLLQYVDDLLIAADTQAACLSATRDLLMTLAELGYRVSGKKAQLCQEEVTYLGFKIHKGSRSLSNSRTQAILQIPVPKTKRQVREFLGTIGYCRLWIPGFAELAQPLYAATRGGNDPLVWGEKEEEAFQSLKLALTQPPALALPSLDKPFQLFVEETSGAAKGVLTQALGPWKRPVAYLSKRLDPVAAGWPRCLRAIAAAALLTREASKLTFGQDIEITSSHNLESLLRSPPDKWLTNARITQYQVLLLDPPRVRFKQTAALNPATLLPETDDTLPIHHCLDTLDSLTSTRPDLTDQPLAQAEATLFTDGSSYIRDGKRYAGAAVVTLDSVIWAEPLPIGTSAQKAELIALTKALEWSKDKSVNIYTDSRYAFATLHVHGMIYRERGLLTAGGKAIKNAPEILALLTAVWLPKRVAVMHCKGHQKDDAPTSTGNRRADEVAREVAIRPLSTQATISAGKRTADGSEFEKRTADGSEFESPKKKAKVE

SEQ ID NO: 7254 - protein, 2173 aa, synthetic construct
MPAAKRVKLDGGDKKYSIGLDIGTNSVGWAVITDEYKVPSKKFKVLGNTDRHSIKKNLIGALLFDSGETAEATRLKRTARRRYTRRKNRICYLQEIFSNEMAKVDDSFFHRLEESFLVEEDKKHERHPIFGNIVDEVAYHEKYPTIYHLRKKLVDSTDKADLRLIYLALAHMIKFRGHFLIEGDLNPDNSDVDKLFIQLVQTYNQLFEENPINASGVDAKAILSARLSKSRRLENLIAQLPGEKKNGLFGNLIALSLGLTPNFKSNFDLAEDAKLQLSKDTYDDDLDNLLAQIGDQYADLFLAAKNLSDAILLSDILRVNTEITKAPLSASMIKRYDEHHQDLTLLKALVRQQLPEKYKEIFFDQSKNGYAGYIDGGASQEEFYKFIKPILEKMDGTEELLVKLNREDLLRKQRTFDNGSIPHQIHLGELHAILRRQEDFYPFLKDNREKIEKILTFRIPYYVGPLARGNSRFAWMTRKSEETITPWNFEEVVDKGASAQSFIERMTNFDKNLPNEKVLPKHSLLYEYFTVYNELTKVKYVTEGMRKPAFLSGEQKKAIVDLLFKTNRKVTVKQLKEDYFKKIECFDSVEISGVEDRFNASLGTYHDLLKIIKDKDFLDNEENEDILEDIVLTLTLFEDREMIEERLKTYAHLFDDKVMKQLKRRRYTGWGRLSRKLINGIRDKQSGKTILDFLKSDGFANRNFMQLIHDDSLTFKEDIQKAQVSGQGDSLHEHIANLAGSPAIKKGILQTVKVVDELVKVMGRHKPENIVIEMARENQTTQKGQKNSRERMKRIEEGIKELGSQILKEHPVENTQLQNEKLYLYYLQNGRDMYVDQELDINRLSDYDVDHIVPQSFLKDDSIDNKVLTRSDKARGKSDNVPSEEVVKKMKNYWRQLLNAKLITQRKFDNLTKAERGGLSELDKAGFIKRQLVETRQITKHVAQILDSRMNTKYDENDKLIREVKVITLKSKLVSDFRKDFQFYKVREINNYHHAHDAYLNAVVGTALIKKYPKLESEFVYGDYKVYDVRKMIAKSEQEIGKATAKYFFYSNIMNFFKTEITLANGEIRKRPLIETNGETGEIVWDKGRDFATVRKVLSMPQVNIVKKTEVQTGGFSKESILPKRNSDKLIARKKDWDPKKYGGFDSPTVAYSVLVVAKVEKGKSKKLKSVKELLGITIMERSSFEKNPIDFLEAKGYKEVKKDLIIKLPKYSLFELENGRKRMLASAGELQKGNELALPSKYVNFLYLASHYEKLKGSPEDNEQKQLFVEQHKHYLDEIIEQISEFSKRVILADANLDKVLSAYNKHRDKPIREQAENIIHLFTLTNLGAPAAFKYFDTTIDRKRYTSTKEVLDATLIHQSITGLYETRIDLSQLGGDGGPAPEAAAKGGSGGMDLLKPLTVERKGVKIKGYWNSQADITCVPKDLLQGEEPVRQQNVTTIHGTQEGDVYYVNLKIDGRRINTEVIGTTLDYAIITPGDVPWILKKPLELTIKLDLEEQQGTLLNNSILSKKGKEELKQLFEKYSALWQSWENQVGHRRIRPHKIATGTVKPTPQKQYHINPKAKPDIQIVINDLLKQGVLIQKESTMNTPVYPVPKPNGRWRMVLDYRAVNKVTPLIAVQNQHSYGILGSLFKGRYKTTIDLSNGFWAHPIVPEDYWITAFTWQGKQYCWTVLPQGFLNSPGLFTGDVVDLLQGIPNVEVYVDDVYISHDSEKEHLEYLDILFNRLKEAGYIISLKKSNIANSIVDFLGFQITNEGRGLTDTFKEKLENITAPTTLKQLQSILGLLNFARNFIPDFTELIAPLYALIPKSTKNYVPWQIEHSTTLETLITKLNGAEYLQGRKGDKTLIMKVNASYTTGYIRYYNEGEKKPISYVSIVFSKTELKFTELEKLLTTVHKGLLKALDLSMGQNIHVYSPIVSMQNIQKTPQTAKKALASRWLSWLSYLEDPRIRFFYDPQMPALKDLPAVDTGKDNKKHPSNFQHIFYTDGSAITSPTKEGHLNAGMGIVYFINKDGNLQKQQEWSISLGNHTAQFAEIAAFEFALKKCLPLGGNILVVTDSNYVAKAYNEELDVWASNGFVNNRKKPLKHISKWKSVADLKRLRPDVVVTHEPGHQKLDSSPHAYGNNLADQLATQASFKVHAGKRTADGSEFEKRTADGSEFESPKKKAKVE

SEQ ID NO: 7255 - protein, 2087 aa, synthetic construct
MPAAKRVKLDGGDKKYSIGLDIGTNSVGWAVITDEYKVPSKKFKVLGNTDRHSIKKNLIGALLFDSGETAEATRLKRTARRRYTRRKNRICYLQEIFSNEMAKVDDSFFHRLEESFLVEEDKKHERHPIFGNIVDEVAYHEKYPTIYHLRKKLVDSTDKADLRLIYLALAHMIKFRGHFLIEGDLNPDNSDVDKLFIQLVQTYNQLFEENPINASGVDAKAILSARLSKSRRLENLIAQLPGEKKNGLFGNLIALSLGLTPNFKSNFDLAEDAKLQLSKDTYDDDLDNLLAQIGDQYADLFLAAKNLSDAILLSDILRVNTEITKAPLSASMIKRYDEHHQDLTLLKALVRQQLPEKYKEIFFDQSKNGYAGYIDGGASQEEFYKFIKPILEKMDGTEELLVKLNREDLLRKQRTFDNGSIPHQIHLGELHAILRRQEDFYPFLKDNREKIEKILTFRIPYYVGPLARGNSRFAWMTRKSEETITPWNFEEVVDKGASAQSFIERMTNFDKNLPNEKVLPKHSLLYEYFTVYNELTKVKYVTEGMRKPAFLSGEQKKAIVDLLFKTNRKVTVKQLKEDYFKKIECFDSVEISGVEDRFNASLGTYHDLLKIIKDKDFLDNEENEDILEDIVLTLTLFEDREMIEERLKTYAHLFDDKVMKQLKRRRYTGWGRLSRKLINGIRDKQSGKTILDFLKSDGFANRNFMQLIHDDSLTFKEDIQKAQVSGQGDSLHEHIANLAGSPAIKKGILQTVKVVDELVKVMGRHKPENIVIEMARENQTTQKGQKNSRERMKRIEEGIKELGSQILKEHPVENTQLQNEKLYLYYLQNGRDMYVDQELDINRLSDYDVDHIVPQSFLKDDSIDNKVLTRSDKARGKSDNVPSEEVVKKMKNYWRQLLNAKLITQRKFDNLTKAERGGLSELDKAGFIKRQLVETRQITKHVAQILDSRMNTKYDENDKLIREVKVITLKSKLVSDFRKDFQFYKVREINNYHHAHDAYLNAVVGTALIKKYPKLESEFVYGDYKVYDVRKMIAKSEQEIGKATAKYFFYSNIMNFFKTEITLANGEIRKRPLIETNGETGEIVWDKGRDFATVRKVLSMPQVNIVKKTEVQTGGFSKESILPKRNSDKLIARKKDWDPKKYGGFDSPTVAYSVLVVAKVEKGKSKKLKSVKELLGITIMERSSFEKNPIDFLEAKGYKEVKKDLIIKLPKYSLFELENGRKRMLASAGELQKGNELALPSKYVNFLYLASHYEKLKGSPEDNEQKQLFVEQHKHYLDEIIEQISEFSKRVILADANLDKVLSAYNKHRDKPIREQAENIIHLFTLTNLGAPAAFKYFDTTIDRKRYTSTKEVLDATLIHQSITGLYETRIDLSQLGGDGGPAPEAAAKGGSGGVPWILKKPLELTIKLDLEEQQGTLLNNSILSKKGKEELKQLFEKYSALWQSWENQVGHRRIRPHKIATGTVKPTPQKQYHINPKAKPDIQIVINDLLKQGVLIQKESTMNTPVYPVPKPNGRWRMVLDYRAVNKVTPLIAVQNQHSYGILGSLFKGRYKTTIDLSNGFWAHPIVPEDYWITAFTWQGKQYCWTVLPQGFLNSPGLFTGDVVDLLQGIPNVEVYVDDVYISHDSEKEHLEYLDILFNRLKEAGYIISLKKSNIANSIVDFLGFQITNEGRGLTDTFKEKLENITAPTTLKQLQSILGLLNFARNFIPDFTELIAPLYALIPKSTKNYVPWQIEHSTTLETLITKLNGAEYLQGRKGDKTLIMKVNASYTTGYIRYYNEGEKKPISYVSIVFSKTELKFTELEKLLTTVHKGLLKALDLSMGQNIHVYSPIVSMQNIQKTPQTAKKALASRWLSWLSYLEDPRIRFFYDPQMPALKDLPAVDTGKDNKKHPSNFQHIFYTDGSAITSPTKEGHLNAGMGIVYFINKDGNLQKQQEWSISLGNHTAQFAEIAAFEFALKKCLPLGGNILVVTDSNYVAKAYNEELDVWASNGFVNNRKKPLKHISKWKSVADLKRLRPDVVVTHEPGHQKLDSSPHAYGNNLADQLATQASFKVHAGKRTADGSEFEKRTADGSEFESPKKKAKVE

SEQ ID NO: 7256 - protein, 2095 aa, synthetic construct
MPAAKRVKLDGGDKKYSIGLDIGTNSVGWAVITDEYKVPSKKFKVLGNTDRHSIKKNLIGALLFDSGETAEATRLKRTARRRYTRRKNRICYLQEIFSNEMAKVDDSFFHRLEESFLVEEDKKHERHPIFGNIVDEVAYHEKYPTIYHLRKKLVDSTDKADLRLIYLALAHMIKFRGHFLIEGDLNPDNSDVDKLFIQLVQTYNQLFEENPINASGVDAKAILSARLSKSRRLENLIAQLPGEKKNGLFGNLIALSLGLTPNFKSNFDLAEDAKLQLSKDTYDDDLDNLLAQIGDQYADLFLAAKNLSDAILLSDILRVNTEITKAPLSASMIKRYDEHHQDLTLLKALVRQQLPEKYKEIFFDQSKNGYAGYIDGGASQEEFYKFIKPILEKMDGTEELLVKLNREDLLRKQRTFDNGSIPHQIHLGELHAILRRQEDFYPFLKDNREKIEKILTFRIPYYVGPLARGNSRFAWMTRKSEETITPWNFEEVVDKGASAQSFIERMTNFDKNLPNEKVLPKHSLLYEYFTVYNELTKVKYVTEGMRKPAFLSGEQKKAIVDLLFKTNRKVTVKQLKEDYFKKIECFDSVEISGVEDRFNASLGTYHDLLKIIKDKDFLDNEENEDILEDIVLTLTLFEDREMIEERLKTYAHLFDDKVMKQLKRRRYTGWGRLSRKLINGIRDKQSGKTILDFLKSDGFANRNFMQLIHDDSLTFKEDIQKAQVSGQGDSLHEHIANLAGSPAIKKGILQTVKVVDELVKVMGRHKPENIVIEMARENQTTQKGQKNSRERMKRIEEGIKELGSQILKEHPVENTQLQNEKLYLYYLQNGRDMYVDQELDINRLSDYDVDHIVPQSFLKDDSIDNKVLTRSDKARGKSDNVPSEEVVKKMKNYWRQLLNAKLITQRKFDNLTKAERGGLSELDKAGFIKRQLVETRQITKHVAQILDSRMNTKYDENDKLIREVKVITLKSKLVSDFRKDFQFYKVREINNYHHAHDAYLNAVVGTALIKKYPKLESEFVYGDYKVYDVRKMIAKSEQEIGKATAKYFFYSNIMNFFKTEITLANGEIRKRPLIETNGETGEIVWDKGRDFATVRKVLSMPQVNIVKKTEVQTGGFSKESILPKRNSDKLIARKKDWDPKKYGGFDSPTVAYSVLVVAKVEKGKSKKLKSVKELLGITIMERSSFEKNPIDFLEAKGYKEVKKDLIIKLPKYSLFELENGRKRMLASAGELQKGNELALPSKYVNFLYLASHYEKLKGSPEDNEQKQLFVEQHKHYLDEIIEQISEFSKRVILADANLDKVLSAYNKHRDKPIREQAENIIHLFTLTNLGAPAAFKYFDTTIDRKRYTSTKEVLDATLIHQSITGLYETRIDLSQLGGDGGPAPEAAAKGGSGGTLQLEEEYRLFEPESTQKQEMDIWLKNFPQAWAETGGMGTAHCQAPVLIQLKATATPISIRQYPMPHEAYQGIKPHIRRMLDQGILKPCQSPWNTPLLPVKKPGTEDYRPVQDLREVNKRVEDIHPTVPNPYNLLSTLPPSHPWYTVLDLKDAFFCLRLHSESQLLFAFEWRDPEIGLSGQLTWTRLPQGFKNSPTLFNEALHSDLADFRVRYPALVLLQYVDDLLLAAATRTECLEGTKALLETLGNKGYRASAKKAQICLQEVTYLGYSLKDGQRWLTKARKEAILSIPVPKNSRQVREFLGTAGYCRLWIPGFAELAAPLYPLTRPGTLFQWGTEQQLAFEDIKKALLSSPALGLPDITKPFELFIDENSGFAKGVLVQKLGPWKRPVAYLSKKLDTVASGWPPCLRMVAAIAILVKDAGKLTLGQPLTILTSHPVEALVRQPPNKWLSNARMTHYQAMLLDAERVHFGPTVSLNPATLLPLPSGGNHHDCLQILAETHGTRPDLTDQPLPDADLTWYTDGSSFIRNGEREAGAAVTTESEVIWAAPLPPGTSAQRAELIALTQALKMAEGKKLTVYTDSRYAFATTHVHGEIYRRRGWLTSEGKEIKNKNEILALLEALFLPKRLSIIHCPGHQKGDSPQAKGNRLADDTAKKAATETHSSLTVLPAGKRTADGSEFEKRTADGSEFESPKKKAKVE

SEQ ID NO: 7257 - protein, 2094 aa, synthetic construct
MPAAKRVKLDGGDKKYSIGLDIGTNSVGWAVITDEYKVPSKKFKVLGNTDRHSIKKNLIGALLFDSGETAEATRLKRTARRRYTRRKNRICYLQEIFSNEMAKVDDSFFHRLEESFLVEEDKKHERHPIFGNIVDEVAYHEKYPTIYHLRKKLVDSTDKADLRLIYLALAHMIKFRGHFLIEGDLNPDNSDVDKLFIQLVQTYNQLFEENPINASGVDAKAILSARLSKSRRLENLIAQLPGEKKNGLFGNLIALSLGLTPNFKSNFDLAEDAKLQLSKDTYDDDLDNLLAQIGDQYADLFLAAKNLSDAILLSDILRVNTEITKAPLSASMIKRYDEHHQDLTLLKALVRQQLPEKYKEIFFDQSKNGYAGYIDGGASQEEFYKFIKPILEKMDGTEELLVKLNREDLLRKQRTFDNGSIPHQIHLGELHAILRRQEDFYPFLKDNREKIEKILTFRIPYYVGPLARGNSRFAWMTRKSEETITPWNFEEVVDKGASAQSFIERMTNFDKNLPNEKVLPKHSLLYEYFTVYNELTKVKYVTEGMRKPAFLSGEQKKAIVDLLFKTNRKVTVKQLKEDYFKKIECFDSVEISGVEDRFNASLGTYHDLLKIIKDKDFLDNEENEDILEDIVLTLTLFEDREMIEERLKTYAHLFDDKVMKQLKRRRYTGWGRLSRKLINGIRDKQSGKTILDFLKSDGFANRNFMQLIHDDSLTFKEDIQKAQVSGQGDSLHEHIANLAGSPAIKKGILQTVKVVDELVKVMGRHKPENIVIEMARENQTTQKGQKNSRERMKRIEEGIKELGSQILKEHPVENTQLQNEKLYLYYLQNGRDMYVDQELDINRLSDYDVDHIVPQSFLKDDSIDNKVLTRSDKARGKSDNVPSEEVVKKMKNYWRQLLNAKLITQRKFDNLTKAERGGLSELDKAGFIKRQLVETRQITKHVAQILDSRMNTKYDENDKLIREVKVITLKSKLVSDFRKDFQFYKVREINNYHHAHDAYLNAVVGTALIKKYPKLESEFVYGDYKVYDVRKMIAKSEQEIGKATAKYFFYSNIMNFFKTEITLANGEIRKRPLIETNGETGEIVWDKGRDFATVRKVLSMPQVNIVKKTEVQTGGFSKESILPKRNSDKLIARKKDWDPKKYGGFDSPTVAYSVLVVAKVEKGKSKKLKSVKELLGITIMERSSFEKNPIDFLEAKGYKEVKKDLIIKLPKYSLFELENGRKRMLASAGELQKGNELALPSKYVNFLYLASHYEKLKGSPEDNEQKQLFVEQHKHYLDEIIEQISEFSKRVILADANLDKVLSAYNKHRDKPIREQAENIIHLFTLTNLGAPAAFKYFDTTIDRKRYTSTKEVLDATLIHQSITGLYETRIDLSQLGGDGGPAPEAAAKGGSGGVLNLEEEYRLHEKPVPSSIDPSWLQLFPTVWAERAGMGLANQVPPVVVELRSGASPVAVRQYPMSKEAREGIRPHIQKFLDLGVLVPCRSPWNTPLLPVKKPGTNDYRPVQDLREINKRVQDIHPTVPNPYNLLSSLPPSYTWYSVLDLKDAFFCLRLHPNSQPLFAFEWKDPEKGNTGQLTWTRLPQGFKNSPTLFNEALHRDLAPFRALNPQVVLLQYVDDLLVAAPTYEDCKKGTQKLLQELSKLGYRVSAKKAQLCQREVTYLGYLLKEGKRWLTPARKATVMKIPVPTTPRQVREFLGKAGFCRLFIPGFASLAAPLYPLTKPSIPFIWTEEHQQAFDHIKKALLSAPALALPDLTKPFTLYIDERAGVARGVLTQTLGPWRRPVAYLSKKLDPVASGWPTCLKAVAAVALLLKDADKLTLGQNVTVIASHSLESIVRQPPDRWMTNARMTHYQSLLLNERVSFAPPAVLNPATLLPVESEATPVHRCSEILAEETGTRRDLEDQPLPGVPTWYTDGSSFITEGKRRAGAPIVDGKRTVWASSLPEGTSAQKAELVALTQALRLAEGKNINIYTDSRYAFATAHIHGAIYKQRGWLTSAGKDIKNKEEILALLEAIHLPRRVAIIHCPGHQRGSNPVATGNRRADEAAKQAALSTRVLAGTTKPAGKRTADGSEFEKRTADGSEFESPKKKAKVE

SEQ ID NO: 7258 - protein, 2127 aa, synthetic construct
MPAAKRVKLDGGDKKYSIGLDIGTNSVGWAVITDEYKVPSKKFKVLGNTDRHSIKKNLIGALLFDSGETAEATRLKRTARRRYTRRKNRICYLQEIFSNEMAKVDDSFFHRLEESFLVEEDKKHERHPIFGNIVDEVAYHEKYPTIYHLRKKLVDSTDKADLRLIYLALAHMIKFRGHFLIEGDLNPDNSDVDKLFIQLVQTYNQLFEENPINASGVDAKAILSARLSKSRRLENLIAQLPGEKKNGLFGNLIALSLGLTPNFKSNFDLAEDAKLQLSKDTYDDDLDNLLAQIGDQYADLFLAAKNLSDAILLSDILRVNTEITKAPLSASMIKRYDEHHQDLTLLKALVRQQLPEKYKEIFFDQSKNGYAGYIDGGASQEEFYKFIKPILEKMDGTEELLVKLNREDLLRKQRTFDNGSIPHQIHLGELHAILRRQEDFYPFLKDNREKIEKILTFRIPYYVGPLARGNSRFAWMTRKSEETITPWNFEEVVDKGASAQSFIERMTNFDKNLPNEKVLPKHSLLYEYFTVYNELTKVKYVTEGMRKPAFLSGEQKKAIVDLLFKTNRKVTVKQLKEDYFKKIECFDSVEISGVEDRFNASLGTYHDLLKIIKDKDFLDNEENEDILEDIVLTLTLFEDREMIEERLKTYAHLFDDKVMKQLKRRRYTGWGRLSRKLINGIRDKQSGKTILDFLKSDGFANRNFMQLIHDDSLTFKEDIQKAQVSGQGDSLHEHIANLAGSPAIKKGILQTVKVVDELVKVMGRHKPENIVIEMARENQTTQKGQKNSRERMKRIEEGIKELGSQILKEHPVENTQLQNEKLYLYYLQNGRDMYVDQELDINRLSDYDVDHIVPQSFLKDDSIDNKVLTRSDKARGKSDNVPSEEVVKKMKNYWRQLLNAKLITQRKFDNLTKAERGGLSELDKAGFIKRQLVETRQITKHVAQILDSRMNTKYDENDKLIREVKVITLKSKLVSDFRKDFQFYKVREINNYHHAHDAYLNAVVGTALIKKYPKLESEFVYGDYKVYDVRKMIAKSEQEIGKATAKYFFYSNIMNFFKTEITLANGEIRKRPLIETNGETGEIVWDKGRDFATVRKVLSMPQVNIVKKTEVQTGGFSKESILPKRNSDKLIARKKDWDPKKYGGFDSPTVAYSVLVVAKVEKGKSKKLKSVKELLGITIMERSSFEKNPIDFLEAKGYKEVKKDLIIKLPKYSLFELENGRKRMLASAGELQKGNELALPSKYVNFLYLASHYEKLKGSPEDNEQKQLFVEQHKHYLDEIIEQISEFSKRVILADANLDKVLSAYNKHRDKPIREQAENIIHLFTLTNLGAPAAFKYFDTTIDRKRYTSTKEVLDATLIHQSITGLYETRIDLSQLGGDGGPAPEAAAKGGSGGLLGRDLLTKLKAQIQFSTEGPQVTWEDRPAMCLVLNLEEEYRLHEKPVPPSIDPSWLQLFPMVWAEKAGMGLANQVPPVVVELKSDASPVAVRQYPMSKEAREGIRPHIQRFLDLGILVPCQSPWNTPLLPVKKPGTNDYRPVQDLREVNKRVQDIHPTVPNPYNLLSSLPPSHTWYSVLDLKDAFFCLKLHPNSQPLFAFEWRDPEKGNTGQLTWTRLPQGFKNSPTLFNEALHRDLASFRALNPQVVMLQYVDDLLVAAPTYRDCKEGTRRLLQELSKLGYRVSAKKAQLCREEVTYLGYLLKGGKRWLTPARKATVMKIPTPTTPRQVREFLGKAGFCRLFIPGFASLAAPLYPLTRPKVPFTWTEAHQEAFGRIKEALLSAPALALPDLTKPFALYVDEKEGVARGVLTQTLGPWRRPVAYLSKKLDPVASGWPTCLKAIAAVALLLKDADKLTLGQNVLVIAPHNLESIVRQPPDRWMTNARMTHYQSLLLNERVSFAPPAILNPATLLPVESDDTPIHICSEILAEETGTRPDLRDQPLPGVPAWYTDGSSFIMDGRRQAGAAIVDNKRTVWASNLPEGTSAQKAELIALTQALRLAEGKSINIYTDSRYAFATAHVHGAIYKQRGWLTSAGKDIKNKEEILALLEAIHLPKRVAIIHCPGHQRGTDPVATGNRKADEAAKQAAQSTRILTETTKNAGKRTADGSEFEKRTADGSEFESPKKKAKVE

SEQ ID NO: 7259 - protein, 2218 aa, synthetic construct
MPAAKRVKLDGGDKKYSIGLDIGTNSVGWAVITDEYKVPSKKFKVLGNTDRHSIKKNLIGALLFDSGETAEATRLKRTARRRYTRRKNRICYLQEIFSNEMAKVDDSFFHRLEESFLVEEDKKHERHPIFGNIVDEVAYHEKYPTIYHLRKKLVDSTDKADLRLIYLALAHMIKFRGHFLIEGDLNPDNSDVDKLFIQLVQTYNQLFEENPINASGVDAKAILSARLSKSRRLENLIAQLPGEKKNGLFGNLIALSLGLTPNFKSNFDLAEDAKLQLSKDTYDDDLDNLLAQIGDQYADLFLAAKNLSDAILLSDILRVNTEITKAPLSASMIKRYDEHHQDLTLLKALVRQQLPEKYKEIFFDQSKNGYAGYIDGGASQEEFYKFIKPILEKMDGTEELLVKLNREDLLRKQRTFDNGSIPHQIHLGELHAILRRQEDFYPFLKDNREKIEKILTFRIPYYVGPLARGNSRFAWMTRKSEETITPWNFEEVVDKGASAQSFIERMTNFDKNLPNEKVLPKHSLLYEYFTVYNELTKVKYVTEGMRKPAFLSGEQKKAIVDLLFKTNRKVTVKQLKEDYFKKIECFDSVEISGVEDRFNASLGTYHDLLKIIKDKDFLDNEENEDILEDIVLTLTLFEDREMIEERLKTYAHLFDDKVMKQLKRRRYTGWGRLSRKLINGIRDKQSGKTILDFLKSDGFANRNFMQLIHDDSLTFKEDIQKAQVSGQGDSLHEHIANLAGSPAIKKGILQTVKVVDELVKVMGRHKPENIVIEMARENQTTQKGQKNSRERMKRIEEGIKELGSQILKEHPVENTQLQNEKLYLYYLQNGRDMYVDQELDINRLSDYDVDHIVPQSFLKDDSIDNKVLTRSDKARGKSDNVPSEEVVKKMKNYWRQLLNAKLITQRKFDNLTKAERGGLSELDKAGFIKRQLVETRQITKHVAQILDSRMNTKYDENDKLIREVKVITLKSKLVSDFRKDFQFYKVREINNYHHAHDAYLNAVVGTALIKKYPKLESEFVYGDYKVYDVRKMIAKSEQEIGKATAKYFFYSNIMNFFKTEITLANGEIRKRPLIETNGETGEIVWDKGRDFATVRKVLSMPQVNIVKKTEVQTGGFSKESILPKRNSDKLIARKKDWDPKKYGGFDSPTVAYSVLVVAKVEKGKSKKLKSVKELLGITIMERSSFEKNPIDFLEAKGYKEVKKDLIIKLPKYSLFELENGRKRMLASAGELQKGNELALPSKYVNFLYLASHYEKLKGSPEDNEQKQLFVEQHKHYLDEIIEQISEFSKRVILADANLDKVLSAYNKHRDKPIREQAENIIHLFTLTNLGAPAAFKYFDTTIDRKRYTSTKEVLDATLIHQSITGLYETRIDLSQLGGDGGPAPEAAAKGGSGGTLGDQGSRGSDPLPEPRVTLTVEGIPTEFLVNTGAEHSVLTKPMGKMGSKRTVVAGATGSKVYPWTTKRLLKIGQKQVTHSFLVIPECPAPLLGRDLLTKLKAQIQFSTEGPQVTWEDRPAMCLVLNLEEEYRLHEKPVPPSIDPSWLQLFPMVWAEKAGMGLANQVPPVVVELKSDASPVAVRQYPMSKEAREGIRPHIQRFLDLGILVPCQSPWNTPLLPVKKPGTNDYRPVQDLREVNKRVQDIHPTVPNPYNLLSSLPPSHTWYSVLDLKDAFFCLKLHPNSQPLFAFEWRDPEKGNTGQLTWTRLPQGFKNSPTLFNEALHRDLASFRALNPQVVMLQYVDDLLVAAPTYRDCKEGTRRLLQELSKLGYRVSAKKAQLCREEVTYLGYLLKGGKRWLTPARKATVMKIPTPTTPRQVREFLGTAGFCRLWIPGFASLAAPLYPLTRPKVPFTWTEAHQEAFGRIKEALLSAPALALPDLTKPFALYVDEKEGVARGVLTQTLGPWRRPVAYLSKKLDPVASGWPTCLKAIAAVALLLKDADKLTLGQNVLVIAPHNLESIVRQPPDRWMTNARMTHYQSLLLNERVSFAPPAILNPATLLPVESDDTPIHICSEILAEETGTRPDLRDQPLPGVPAWYTDGSSFIMDGRRQAGAAIVDNKRTVWASNLPEGTSAQKAELIALTQALRLAEGKSINIYTDSRYAFATAHVHGAIYKQRGWLTSAGKDIKNKEEILALLEAIHLPKRVAIIHCPGHQRGTDPVATGNRKADEAAKQAAQSTRILTETTKNAGKRTADGSEFEKRTADGSEFESPKKKAKVE

SEQ ID NO: 7260 - protein, 2218 aa, synthetic construct
MPAAKRVKLDGGDKKYSIGLDIGTNSVGWAVITDEYKVPSKKFKVLGNTDRHSIKKNLIGALLFDSGETAEATRLKRTARRRYTRRKNRICYLQEIFSNEMAKVDDSFFHRLEESFLVEEDKKHERHPIFGNIVDEVAYHEKYPTIYHLRKKLVDSTDKADLRLIYLALAHMIKFRGHFLIEGDLNPDNSDVDKLFIQLVQTYNQLFEENPINASGVDAKAILSARLSKSRRLENLIAQLPGEKKNGLFGNLIALSLGLTPNFKSNFDLAEDAKLQLSKDTYDDDLDNLLAQIGDQYADLFLAAKNLSDAILLSDILRVNTEITKAPLSASMIKRYDEHHQDLTLLKALVRQQLPEKYKEIFFDQSKNGYAGYIDGGASQEEFYKFIKPILEKMDGTEELLVKLNREDLLRKQRTFDNGSIPHQIHLGELHAILRRQEDFYPFLKDNREKIEKILTFRIPYYVGPLARGNSRFAWMTRKSEETITPWNFEEVVDKGASAQSFIERMTNFDKNLPNEKVLPKHSLLYEYFTVYNELTKVKYVTEGMRKPAFLSGEQKKAIVDLLFKTNRKVTVKQLKEDYFKKIECFDSVEISGVEDRFNASLGTYHDLLKIIKDKDFLDNEENEDILEDIVLTLTLFEDREMIEERLKTYAHLFDDKVMKQLKRRRYTGWGRLSRKLINGIRDKQSGKTILDFLKSDGFANRNFMQLIHDDSLTFKEDIQKAQVSGQGDSLHEHIANLAGSPAIKKGILQTVKVVDELVKVMGRHKPENIVIEMARENQTTQKGQKNSRERMKRIEEGIKELGSQILKEHPVENTQLQNEKLYLYYLQNGRDMYVDQELDINRLSDYDVDHIVPQSFLKDDSIDNKVLTRSDKARGKSDNVPSEEVVKKMKNYWRQLLNAKLITQRKFDNLTKAERGGLSELDKAGFIKRQLVETRQITKHVAQILDSRMNTKYDENDKLIREVKVITLKSKLVSDFRKDFQFYKVREINNYHHAHDAYLNAVVGTALIKKYPKLESEFVYGDYKVYDVRKMIAKSEQEIGKATAKYFFYSNIMNFFKTEITLANGEIRKRPLIETNGETGEIVWDKGRDFATVRKVLSMPQVNIVKKTEVQTGGFSKESILPKRNSDKLIARKKDWDPKKYGGFDSPTVAYSVLVVAKVEKGKSKKLKSVKELLGITIMERSSFEKNPIDFLEAKGYKEVKKDLIIKLPKYSLFELENGRKRMLASAGELQKGNELALPSKYVNFLYLASHYEKLKGSPEDNEQKQLFVEQHKHYLDEIIEQISEFSKRVILADANLDKVLSAYNKHRDKPIREQAENIIHLFTLTNLGAPAAFKYFDTTIDRKRYTSTKEVLDATLIHQSITGLYETRIDLSQLGGDGGPAPEAAAKGGSGGTLGDQGSRGSDPLPEPRVTLTVEGIPTEFLVNTGAEHSVLTKPMGKMGSKRTVVAGATGSKVYPWTTKRLLKIGQKQVTHSFLVIPECPAPLLGRDLLTKLKAQIQFSTEGPQVTWEDRPAMCLVLNLEEEYRLHEKPVPPSIDPSWLQLFPMVWAEKAGMGLANQVPPVVVELKSDASPVAVRQYPMSKEAREGIRPHIQRFLDLGILVPCQSPWNTPLLPVKKPGTNDYRPVQDLREVNKRVQDIHPTVPNPYNLLSSLPPSHTWYSVLDLKDAFFCLKLHPNSQPLFAFEWRDPEKGNTGQLTWTRLPQGFKNSPTLFNEALHRDLASFRALNPQVVMLQYVDDLLVAAPTYRDCKEGTRRLLQELSKLGYRVSAKKAQLCREEVTYLGYLLKGGKRWLTPARKATVMKIPTPTTPRQVREFLGKAGFCRLFIPGFASLAAPLYPLTRPKVPFTWTEAHQEAFGRIKEALLSAPALALPDLTKPFALYVDEKEGVARGVLTQTLGPWRRPVAYLSKKLDPVASGWPTCLKAIAAVALLLKDADKLTLGQNVLVIAPHNLESIVRQPPDRWMTNARMTHYQSLLLNERVSFAPPAILNPATLLPVESDDTPIHICSEILAEETGTRPDLRDQPLPGVPAWYTDGSSFIMDGRRQAGAAIVDNKRTVWASNLPEGTSAQKAELIALTQALRLAEGKSINIYTDSRYAFATAHVHGAIYKQRGWLTSAGKDIKNKEEILALLEAIHLPKRVAIIHCPGHQRGTDPVATGNRKADEAAKQAAQSTRILTETTKNAGKRTADGSEFEKRTADGSEFESPKKKAKVE

SEQ ID NO: 7261 - protein, 2096 aa, synthetic construct
MPAAKRVKLDGGDKKYSIGLDIGTNSVGWAVITDEYKVPSKKFKVLGNTDRHSIKKNLIGALLFDSGETAEATRLKRTARRRYTRRKNRICYLQEIFSNEMAKVDDSFFHRLEESFLVEEDKKHERHPIFGNIVDEVAYHEKYPTIYHLRKKLVDSTDKADLRLIYLALAHMIKFRGHFLIEGDLNPDNSDVDKLFIQLVQTYNQLFEENPINASGVDAKAILSARLSKSRRLENLIAQLPGEKKNGLFGNLIALSLGLTPNFKSNFDLAEDAKLQLSKDTYDDDLDNLLAQIGDQYADLFLAAKNLSDAILLSDILRVNTEITKAPLSASMIKRYDEHHQDLTLLKALVRQQLPEKYKEIFFDQSKNGYAGYIDGGASQEEFYKFIKPILEKMDGTEELLVKLNREDLLRKQRTFDNGSIPHQIHLGELHAILRRQEDFYPFLKDNREKIEKILTFRIPYYVGPLARGNSRFAWMTRKSEETITPWNFEEVVDKGASAQSFIERMTNFDKNLPNEKVLPKHSLLYEYFTVYNELTKVKYVTEGMRKPAFLSGEQKKAIVDLLFKTNRKVTVKQLKEDYFKKIECFDSVEISGVEDRFNASLGTYHDLLKIIKDKDFLDNEENEDILEDIVLTLTLFEDREMIEERLKTYAHLFDDKVMKQLKRRRYTGWGRLSRKLINGIRDKQSGKTILDFLKSDGFANRNFMQLIHDDSLTFKEDIQKAQVSGQGDSLHEHIANLAGSPAIKKGILQTVKVVDELVKVMGRHKPENIVIEMARENQTTQKGQKNSRERMKRIEEGIKELGSQILKEHPVENTQLQNEKLYLYYLQNGRDMYVDQELDINRLSDYDVDHIVPQSFLKDDSIDNKVLTRSDKARGKSDNVPSEEVVKKMKNYWRQLLNAKLITQRKFDNLTKAERGGLSELDKAGFIKRQLVETRQITKHVAQILDSRMNTKYDENDKLIREVKVITLKSKLVSDFRKDFQFYKVREINNYHHAHDAYLNAVVGTALIKKYPKLESEFVYGDYKVYDVRKMIAKSEQEIGKATAKYFFYSNIMNFFKTEITLANGEIRKRPLIETNGETGEIVWDKGRDFATVRKVLSMPQVNIVKKTEVQTGGFSKESILPKRNSDKLIARKKDWDPKKYGGFDSPTVAYSVLVVAKVEKGKSKKLKSVKELLGITIMERSSFEKNPIDFLEAKGYKEVKKDLIIKLPKYSLFELENGRKRMLASAGELQKGNELALPSKYVNFLYLASHYEKLKGSPEDNEQKQLFVEQHKHYLDEIIEQISEFSKRVILADANLDKVLSAYNKHRDKPIREQAENIIHLFTLTNLGAPAAFKYFDTTIDRKRYTSTKEVLDATLIHQSITGLYETRIDLSQLGGDGGPAPEAAAKGGSGGTLNLEDEYRLYETSAEPEVSPGSTWLSDFPQAWAETGGMGLAVRQAPLIIPLKATSTPVSIKQYPMSQEAKLGIKPHIQRLLDQGILVPCQSPWNTPLLPVKKPGTNDYRPVQDLREVNKRVEDIHPTVPNPYNLLSGLPPSHRWYTVLDLKDAFFCLRLHPTSQPLFAFEWRDPGMGISGQLTWTRLPQGFKNSPTLFNEALHRDLADFRIQHPDLILLQYVDDILLAATSELDCQQGTRALLLTLGNLGYRASAKKAQLCQKQVKYLGYLLKEGQRWLTEARKETVMGQPTPKTPRQLREFLGTAGFCRLWIPGFAEMAAPLYPLTKPGTLFNWGPDQQKAYQEIKQALLTAPALGLPDLTKPFELFVDEKQGYAKGVLTQKLGPWRRPVAYLSKKLDPVAAGWPPCLRMVAAIAVLRKDAGKLTMGQPLVILAPHAVEALVKQPPDRWLSNARMTHYQAMLLDTDRVQFGPVVALNPATLLPLPEEGAPHDCLEILAETHGTRPDLTDQPIPDADHTWYTDGSSFLQEGQRKAGAAVTTETEVIWARALPAGTSAQRAELIALTQALKMAEGKRLNVYTDSRYAFATAHIHGEIYRRRGWLTSEGREIKNKSEILALLKALFLPKRLSIIHCLGHQKGDSAEARGNRLADQAAREAAIKTPPDTSTLLAGKRTADGSEFEKRTADGSEFESPKKKAKVE

SEQ ID NO: 7262 - protein, 2096 aa, synthetic construct; identical to SEQ ID NO: 4528

SEQ ID NO: 7263 - protein, 2096 aa, synthetic construct
MPAAKRVKLDGGDKKYSIGLDIGTNSVGWAVITDEYKVPSKKFKVLGNTDRHSIKKNLIGALLFDSGETAEATRLKRTARRRYTRRKNRICYLQEIFSNEMAKVDDSFFHRLEESFLVEEDKKHERHPIFGNIVDEVAYHEKYPTIYHLRKKLVDSTDKADLRLIYLALAHMIKFRGHFLIEGDLNPDNSDVDKLFIQLVQTYNQLFEENPINASGVDAKAILSARLSKSRRLENLIAQLPGEKKNGLFGNLIALSLGLTPNFKSNFDLAEDAKLQLSKDTYDDDLDNLLAQIGDQYADLFLAAKNLSDAILLSDILRVNTEITKAPLSASMIKRYDEHHQDLTLLKALVRQQLPEKYKEIFFDQSKNGYAGYIDGGASQEEFYKFIKPILEKMDGTEELLVKLNREDLLRKQRTFDNGSIPHQIHLGELHAILRRQEDFYPFLKDNREKIEKILTFRIPYYVGPLARGNSRFAWMTRKSEETITPWNFEEVVDKGASAQSFIERMTNFDKNLPNEKVLPKHSLLYEYFTVYNELTKVKYVTEGMRKPAFLSGEQKKAIVDLLFKTNRKVTVKQLKEDYFKKIECFDSVEISGVEDRFNASLGTYHDLLKIIKDKDFLDNEENEDILEDIVLTLTLFEDREMIEERLKTYAHLFDDKVMKQLKRRRYTGWGRLSRKLINGIRDKQSGKTILDFLKSDGFANRNFMQLIHDDSLTFKEDIQKAQVSGQGDSLHEHIANLAGSPAIKKGILQTVKVVDELVKVMGRHKPENIVIEMARENQTTQKGQKNSRERMKRIEEGIKELGSQILKEHPVENTQLQNEKLYLYYLQNGRDMYVDQELDINRLSDYDVDHIVPQSFLKDDSIDNKVLTRSDKARGKSDNVPSEEVVKKMKNYWRQLLNAKLITQRKFDNLTKAERGGLSELDKAGFIKRQLVETRQITKHVAQILDSRMNTKYDENDKLIREVKVITLKSKLVSDFRKDFQFYKVREINNYHHAHDAYLNAVVGTALIKKYPKLESEFVYGDYKVYDVRKMIAKSEQEIGKATAKYFFYSNIMNFFKTEITLANGEIRKRPLIETNGETGEIVWDKGRDFATVRKVLSMPQVNIVKKTEVQTGGFSKESILPKRNSDKLIARKKDWDPKKYGGFDSPTVAYSVLVVAKVEKGKSKKLKSVKELLGITIMERSSFEKNPIDFLEAKGYKEVKKDLIIKLPKYSLFELENGRKRMLASAGELQKGNELALPSKYVNFLYLASHYEKLKGSPEDNEQKQLFVEQHKHYLDEIIEQISEFSKRVILADANLDKVLSAYNKHRDKPIREQAENIIHLFTLTNLGAPAAFKYFDTTIDRKRYTSTKEVLDATLIHQSITGLYETRIDLSQLGGDGGPAPEAAAKGGSGGTLGIEDEYRLHETSTEPDVSLGSTWLSDFPQAWAETGGMGLAVRQAPLIIPLKATSTPVSIQQYPMSHEARLGIKPHIQRLLDQGILVPCQSPWNTPLLPVKKPGTNDYRPVQDLREVNKRVEDIHPTVPNPYNLLSGLPPSHQWYTVLDLKDAFFCLRLHPTSQPLFAFEWRDPGMGISGQLTWTRLPQGFKNSPTLFNEALHRDLADFRIQHPDLILLQYVDDILLAATSELDCQQGTRALLQTLGDLGYRASAKKAQICQKQVKYLGYLLREGQRWLTEARKETVMGQPVPKTPRQLREFLGTAGFCRLWIPGFAEMAAPLYPLTKPGTLFSWGPDQQKAYQEIKQALLTAPALGLPDLTKPFELFVDEKQGYAKGVLTQKLGPWRRPVAYLSKKLDPVAAGWPPCLRMVAAIAVLTKDAGKLTMGQPLVILAPHAVEALVKQPPDRWLSNARMTHYQAMLLDTDRVQFGPVVALNPATLLPLPEEGAPHDCLEILAETHGTRPDLTDQPIPDADHTWYTDGSSFLQEGQRKAGAAVTTETEVIWAGALPAGTSAQRAELIALTQALKMAEGKRLNVYTDSRYAFATAHIHGEIYRRRGWLTSEGREIKNKSEILALLKALFLPKRLSIIHCLGHQKGDSAEARGNRLADQAAREAAIKTPPDTSTLLAGKRTADGSEFEKRTADGSEFESPKKKAKVE

SEQ ID NO: 7264 - protein, 2096 aa, synthetic construct
MPAAKRVKLDGGDKKYSIGLDIGTNSVGWAVITDEYKVPSKKFKVLGNTDRHSIKKNLIGALLFDSGETAEATRLKRTARRRYTRRKNRICYLQEIFSNEMAKVDDSFFHRLEESFLVEEDKKHERHPIFGNIVDEVAYHEKYPTIYHLRKKLVDSTDKADLRLIYLALAHMIKFRGHFLIEGDLNPDNSDVDKLFIQLVQTYNQLFEENPINASGVDAKAILSARLSKSRRLENLIAQLPGEKKNGLFGNLIALSLGLTPNFKSNFDLAEDAKLQLSKDTYDDDLDNLLAQIGDQYADLFLAAKNLSDAILLSDILRVNTEITKAPLSASMIKRYDEHHQDLTLLKALVRQQLPEKYKEIFFDQSKNGYAGYIDGGASQEEFYKFIKPILEKMDGTEELLVKLNREDLLRKQRTFDNGSIPHQIHLGELHAILRRQEDFYPFLKDNREKIEKILTFRIPYYVGPLARGNSRFAWMTRKSEETITPWNFEEVVDKGASAQSFIERMTNFDKNLPNEKVLPKHSLLYEYFTVYNELTKVKYVTEGMRKPAFLSGEQKKAIVDLLFKTNRKVTVKQLKEDYFKKIECFDSVEISGVEDRFNASLGTYHDLLKIIKDKDFLDNEENEDILEDIVLTLTLFEDREMIEERLKTYAHLFDDKVMKQLKRRRYTGWGRLSRKLINGIRDKQSGKTILDFLKSDGFANRNFMQLIHDDSLTFKEDIQKAQVSGQGDSLHEHIANLAGSPAIKKGILQTVKVVDELVKVMGRHKPENIVIEMARENQTTQKGQKNSRERMKRIEEGIKELGSQILKEHPVENTQLQNEKLYLYYLQNGRDMYVDQELDINRLSDYDVDHIVPQSFLKDDSIDNKVLTRSDKARGKSDNVPSEEVVKKMKNYWRQLLNAKLITQRKFDNLTKAERGGLSELDKAGFIKRQLVETRQITKHVAQILDSRMNTKYDENDKLIREVKVITLKSKLVSDFRKDFQFYKVREINNYHHAHDAYLNAVVGTALIKKYPKLESEFVYGDYKVYDVRKMIAKSEQEIGKATAKYFFYSNIMNFFKTEITLANGEIRKRPLIETNGETGEIVWDKGRDFATVRKVLSMPQVNIVKKTEVQTGGFSKESILPKRNSDKLIARKKDWDPKKYGGFDSPTVAYSVLVVAKVEKGKSKKLKSVKELLGITIMERSSFEKNPIDFLEAKGYKEVKKDLIIKLPKYSLFELENGRKRMLASAGELQKGNELALPSKYVNFLYLASHYEKLKGSPEDNEQKQLFVEQHKHYLDEIIEQISEFSKRVILADANLDKVLSAYNKHRDKPIREQAENIIHLFTLTNLGAPAAFKYFDTTIDRKRYTSTKEVLDATLIHQSITGLYETRIDLSQLGGDGGPAPEAAAKGGSGGTLNIEDEYRLHETSKGPDVPLGSTWLSDFPQAWAETGGMGLAVRQAPLIIPLKATSTPVSIKQYPMSQEARLGIKPHIQRLLDQGILVPCQSPWNTPLLPVKKPGTNDYRPVQDLREVNKRVEDIHPTVPNPYNLLSGLPPSHQWYTVLDLKDAFFCLRLHPTSQSLFAFEWRDPEMGISGQLTWTRLPQGFKNSPTLFNEALHRDLADFRIQHPDLILLQYVDDLLLAATSELDCQQGTRALLQTLGDLGYRASAKKAQICQKQVKYLGYLLKEGQRWLTEARKETVMGQPTPKTPRQLREFLGTAGFCRLWIPGFAEMAAPLYPLTKPGTLFEWGPDQQKAYQEIKQALLTAPALGLPDLTKPFELFVDEKQGYAKGVLTQKLGPWRRPVAYLSKKLDPVAAGWPPCLRMVAAIAVLTKDAGKLTMGQPLVILAPHAVEALVKQPPDRWLSNARMTHYQALLLDTDRVQFGPIVALNPATLLPLPEEGLQHDCLDILAEAHGTRPDLTDQPLPDADHTWYTDGSSFLQEGQRKAGAAVTTETEVVWAKALPAGTSAQRAELIALTQALKMAEGKKLNVYTDSRYAFATAHIHGEIYRRRGWLTSEGKEIKNKDEILALLKALFLPKRLSIIHCPGHQKGNRAEARGNRMADQAAREVATRETPETSTLLAGKRTADGSEFEKRTADGSEFESPKKKAKVE

SEQ ID NO: 7265 - protein, 2088 aa, synthetic construct; identical to SEQ ID NO: 4529

SEQ ID NO: 7266 - protein, 2090 aa, synthetic construct
MPAAKRVKLDGGDKKYSIGLDIGTNSVGWAVITDEYKVPSKKFKVLGNTDRHSIKKNLIGALLFDSGETAEATRLKRTARRRYTRRKNRICYLQEIFSNEMAKVDDSFFHRLEESFLVEEDKKHERHPIFGNIVDEVAYHEKYPTIYHLRKKLVDSTDKADLRLIYLALAHMIKFRGHFLIEGDLNPDNSDVDKLFIQLVQTYNQLFEENPINASGVDAKAILSARLSKSRRLENLIAQLPGEKKNGLFGNLIALSLGLTPNFKSNFDLAEDAKLQLSKDTYDDDLDNLLAQIGDQYADLFLAAKNLSDAILLSDILRVNTEITKAPLSASMIKRYDEHHQDLTLLKALVRQQLPEKYKEIFFDQSKNGYAGYIDGGASQEEFYKFIKPILEKMDGTEELLVKLNREDLLRKQRTFDNGSIPHQIHLGELHAILRRQEDFYPFLKDNREKIEKILTFRIPYYVGPLARGNSRFAWMTRKSEETITPWNFEEVVDKGASAQSFIERMTNFDKNLPNEKVLPKHSLLYEYFTVYNELTKVKYVTEGMRKPAFLSGEQKKAIVDLLFKTNRKVTVKQLKEDYFKKIECFDSVEISGVEDRFNASLGTYHDLLKIIKDKDFLDNEENEDILEDIVLTLTLFEDREMIEERLKTYAHLFDDKVMKQLKRRRYTGWGRLSRKLINGIRDKQSGKTILDFLKSDGFANRNFMQLIHDDSLTFKEDIQKAQVSGQGDSLHEHIANLAGSPAIKKGILQTVKVVDELVKVMGRHKPENIVIEMARENQTTQKGQKNSRERMKRIEEGIKELGSQILKEHPVENTQLQNEKLYLYYLQNGRDMYVDQELDINRLSDYDVDHIVPQSFLKDDSIDNKVLTRSDKARGKSDNVPSEEVVKKMKNYWRQLLNAKLITQRKFDNLTKAERGGLSELDKAGFIKRQLVETRQITKHVAQILDSRMNTKYDENDKLIREVKVITLKSKLVSDFRKDFQFYKVREINNYHHAHDAYLNAVVGTALIKKYPKLESEFVYGDYKVYDVRKMIAKSEQEIGKATAKYFFYSNIMNFFKTEITLANGEIRKRPLIETNGETGEIVWDKGRDFATVRKVLSMPQVNIVKKTEVQTGGFSKESILPKRNSDKLIARKKDWDPKKYGGFDSPTVAYSVLVVAKVEKGKSKKLKSVKELLGITIMERSSFEKNPIDFLEAKGYKEVKKDLIIKLPKYSLFELENGRKRMLASAGELQKGNELALPSKYVNFLYLASHYEKLKGSPEDNEQKQLFVEQHKHYLDEIIEQISEFSKRVILADANLDKVLSAYNKHRDKPIREQAENIIHLFTLTNLGAPAAFKYFDTTIDRKRYTSTKEVLDATLIHQSITGLYETRIDLSQLGGDGGPAPEAAAKGGSGGTLQLDDEYRLYSPLVKPDQNIQFWLEQFPQAWAETAGMGLAKQVPPQVIQLKASATPVSVRQYPLSKEAQEGIRPHVQRLIQQGILVPVQSPWNTPLLPVRKPGTNDYRPVQDLREVNKRVQDIHPTVPNPYNLLCALPPQRSWYTVLDLKDAFFCLRLHPTSQPLFAFEWRDPGTGRTGQLTWTRLPQGFKNSPTIFDEALHRDLANFRIQHPQVTLLQYVDDLLLAGATKQDCLEGTKALLLELSDLGYRASAKKAQICRREVTYLGYSLRDGQRWLTEARKKTVVQIPAPTTAKQVREFLGTAGFCRLWIPGFATLAAPLYPLTKEKGEFSWAPEHQKAFDAIKKALLSAPALALPDVTKPFTLYVDERKGVARGVLTQTLGPWRRPVAYLSKKLDPVASGWPVCLKAIAAVAILVKDADKLTLGQNITVIAPHALENIVRQPPDRWMTNARMTHYQSLLLTERVTFAPPAALNPATLLPEETDEPVTHDCHQLLIEETGVRKDLTDIPLTGEVLTWFTDGSSYVVEGKRMAGAAVVDGTRTIWASSLPEGTSAQKAELMALTQALRLAEGKSINIYTDSRYAFATAHVHGAIYKQRGLLTSAGREIKNKEEILSLLEALHLPKRLAIIHCPGHQKAKDPISRGNQMADRVAKQAAQGVNLLAGKRTADGSEFEKRTADGSEFESPKKKAKVE

SEQ ID NO: 7267 - protein, 2088 aa, synthetic construct; identical to SEQ ID NO: 4529

SEQ ID NO: 7268 - protein, 2176 aa, synthetic construct
MPAAKRVKLDGGDKKYSIGLDIGTNSVGWAVITDEYKVPSKKFKVLGNTDRHSIKKNLIGALLFDSGETAEATRLKRTARRRYTRRKNRICYLQEIFSNEMAKVDDSFFHRLEESFLVEEDKKHERHPIFGNIVDEVAYHEKYPTIYHLRKKLVDSTDKADLRLIYLALAHMIKFRGHFLIEGDLNPDNSDVDKLFIQLVQTYNQLFEENPINASGVDAKAILSARLSKSRRLENLIAQLPGEKKNGLFGNLIALSLGLTPNFKSNFDLAEDAKLQLSKDTYDDDLDNLLAQIGDQYADLFLAAKNLSDAILLSDILRVNTEITKAPLSASMIKRYDEHHQDLTLLKALVRQQLPEKYKEIFFDQSKNGYAGYIDGGASQEEFYKFIKPILEKMDGTEELLVKLNREDLLRKQRTFDNGSIPHQIHLGELHAILRRQEDFYPFLKDNREKIEKILTFRIPYYVGPLARGNSRFAWMTRKSEETITPWNFEEVVDKGASAQSFIERMTNFDKNLPNEKVLPKHSLLYEYFTVYNELTKVKYVTEGMRKPAFLSGEQKKAIVDLLFKTNRKVTVKQLKEDYFKKIECFDSVEISGVEDRFNASLGTYHDLLKIIKDKDFLDNEENEDILEDIVLTLTLFEDREMIEERLKTYAHLFDDKVMKQLKRRRYTGWGRLSRKLINGIRDKQSGKTILDFLKSDGFANRNFMQLIHDDSLTFKEDIQKAQVSGQGDSLHEHIANLAGSPAIKKGILQTVKVVDELVKVMGRHKPENIVIEMARENQTTQKGQKNSRERMKRIEEGIKELGSQILKEHPVENTQLQNEKLYLYYLQNGRDMYVDQELDINRLSDYDVDHIVPQSFLKDDSIDNKVLTRSDKARGKSDNVPSEEVVKKMKNYWRQLLNAKLITQRKFDNLTKAERGGLSELDKAGFIKRQLVETRQITKHVAQILDSRMNTKYDENDKLIREVKVITLKSKLVSDFRKDFQFYKVREINNYHHAHDAYLNAVVGTALIKKYPKLESEFVYGDYKVYDVRKMIAKSEQEIGKATAKYFFYSNIMNFFKTEITLANGEIRKRPLIETNGETGEIVWDKGRDFATVRKVLSMPQVNIVKKTEVQTGGFSKESILPKRNSDKLIARKKDWDPKKYGGFDSPTVAYSVLVVAKVEKGKSKKLKSVKELLGITIMERSSFEKNPIDFLEAKGYKEVKKDLIIKLPKYSLFELENGRKRMLASAGELQKGNELALPSKYVNFLYLASHYEKLKGSPEDNEQKQLFVEQHKHYLDEIIEQISEFSKRVILADANLDKVLSAYNKHRDKPIREQAENIIHLFTLTNLGAPAAFKYFDTTIDRKRYTSTKEVLDATLIHQSITGLYETRIDLSQLGGDGGPAPEAAAKGGSGGMDPLQLLQPLEAEIKGTKLKAHWNSGATITCVPEAFLEDERPIQTMLIKTIHGEKQQDVYYLTFKVQGRKVEAEVLASPYDYILLNPSDVPWLMKKPLQLTVLVPLHEYQERLLQQTALPKEQKELLQKLFLKYDALWQHWENQVGHRRIKPHNIATGTLAPRPQKQYPINPKAKPSIQIVIDDLLKQGVLIQQNSTMNTPVYPVPKPDGKWRMVLDYREVNKTIPLIAAQNQHSAGILSSIYRGKYKTTLDLTNGFWAHPITPESYWLTAFTWQGKQYCWTRLPQGFLNSPALFTADVVDLLKEIPNVQAYVDDIYISHDDPQEHLEQLEKIFSILLNAGYVVSLKKSEIAQREVEFLGFNITKEGRGLTDTFKQKLLNITPPKDLKQLQSILGLLNFARNFIPNYSELVKPLYTIVANANGKFISWTEDNSNQLQHIISVLNQADNLEERNPETRLIIKVNSSPSAGYIRYYNEGSKRPIMYVNYIFSKAEAKFTQTEKLLTTMHKGLIKAMDLAMGQEILVYSPIVSMTKIQRTPLPERKALPVRWITWMTYLEDPRIQFHYDKSLPELQQIPNVTEDVIAKTKHPSEFAMVFYTDGSAIKHPDVNKSHSAGMGIAQVQFIPEYKIVHQWSIPLGDHTAQLAEIAAVEFACKKALKISGPVLIVTDSFYVAESANKELPYWKSNGFLNNKKKPLRHVSKWKSIAECLQLKPDIIIMHEKGHQQPMTTLHTEGNNLADKLATQGSYVVHAGKRTADGSEFEKRTADGSEFESPKKKAKVE

SEQ ID NO: 7269 - protein, 2087 aa, synthetic construct
MPAAKRVKLDGGDKKYSIGLDIGTNSVGWAVITDEYKVPSKKFKVLGNTDRHSIKKNLIGALLFDSGETAEATRLKRTARRRYTRRKNRICYLQEIFSNEMAKVDDSFFHRLEESFLVEEDKKHERHPIFGNIVDEVAYHEKYPTIYHLRKKLVDSTDKADLRLIYLALAHMIKFRGHFLIEGDLNPDNSDVDKLFIQLVQTYNQLFEENPINASGVDAKAILSARLSKSRRLENLIAQLPGEKKNGLFGNLIALSLGLTPNFKSNFDLAEDAKLQLSKDTYDDDLDNLLAQIGDQYADLFLAAKNLSDAILLSDILRVNTEITKAPLSASMIKRYDEHHQDLTLLKALVRQQLPEKYKEIFFDQSKNGYAGYIDGGASQEEFYKFIKPILEKMDGTEELLVKLNREDLLRKQRTFDNGSIPHQIHLGELHAILRRQEDFYPFLKDNREKIEKILTFRIPYYVGPLARGNSRFAWMTRKSEETITPWNFEEVVDKGASAQSFIERMTNFDKNLPNEKVLPKHSLLYEYFTVYNELTKVKYVTEGMRKPAFLSGEQKKAIVDLLFKTNRKVTVKQLKEDYFKKIECFDSVEISGVEDRFNASLGTYHDLLKIIKDKDFLDNEENEDILEDIVLTLTLFEDREMIEERLKTYAHLFDDKVMKQLKRRRYTGWGRLSRKLINGIRDKQSGKTILDFLKSDGFANRNFMQLIHDDSLTFKEDIQKAQVSGQGDSLHEHIANLAGSPAIKKGILQTVKVVDELVKVMGRHKPENIVIEMARENQTTQKGQKNSRERMKRIEEGIKELGSQILKEHPVENTQLQNEKLYLYYLQNGRDMYVDQELDINRLSDYDVDHIVPQSFLKDDSIDNKVLTRSDKARGKSDNVPSEEVVKKMKNYWRQLLNAKLITQRKFDNLTKAERGGLSELDKAGFIKRQLVETRQITKHVAQILDSRMNTKYDENDKLIREVKVITLKSKLVSDFRKDFQFYKVREINNYHHAHDAYLNAVVGTALIKKYPKLESEFVYGDYKVYDVRKMIAKSEQEIGKATAKYFFYSNIMNFFKTEITLANGEIRKRPLIETNGETGEIVWDKGRDFATVRKVLSMPQVNIVKKTEVQTGGFSKESILPKRNSDKLIARKKDWDPKKYGGFDSPTVAYSVLVVAKVEKGKSKKLKSVKELLGITIMERSSFEKNPIDFLEAKGYKEVKKDLIIKLPKYSLFELENGRKRMLASAGELQKGNELALPSKYVNFLYLASHYEKLKGSPEDNEQKQLFVEQHKHYLDEIIEQISEFSKRVILADANLDKVLSAYNKHRDKPIREQAENIIHLFTLTNLGAPAAFKYFDTTIDRKRYTSTKEVLDATLIHQSITGLYETRIDLSQLGGDGGPAPEAAAKGGSGGIPWLMKKPLQLTTLVPLQEYEERLLKQTMLTGSYKEKLQSLFLKYDALWQHWENQVGHRRIKPHHIATGTVNPRPQKQYPINPKAKASIQTVINDLLKQGVLIQQNSIMNTPVYPVPKPDGKWRMVLDYREVNKTIPLIAAQNQHSAGILSSIFRGKYKTTLDLSNGFWAHSITPESYWLTAFTWLGQQYCWTRLPQGFLNSPALFNADVVDLLKEVPNVQVYVDDIYISHDDPREHLEQLEKVFSLLLNAGYVVSLKKSEIAQHEVEFLGFNITKEGRGLTETFKQKLLNITPPRDLKQLQSILGKLNFARNFIPNFSELVKPLYNIIATAPGKYITWTTDNSQQLQNIISMLNSAENLEERNPEVRLIMKVNTSPSAGYIRFYNEFAKRPIMYLNYVYTKAEVKFTNTEKLLTTIHKGLIKALDLGMGQEILVYSPIVSMTKIQKTPLPERKALPIRWITWMSYLEDPRIQFHYDKTLPELQQVPTVTDDIIAKIKHPSEFSMVFYTDGSAIKHPNVNKSHNAGMGIAQVQFKPEFTVINTWSIPLGDHTAQLAEVAAVEFACKKALKIDGPVLIVTDSFYVAESVNKELPYWQSNGFFNNKKKPLKHVSKWKSIADCIQLKPDIIIIHEKGHQPTASTFHTEGNNLADKLATQGSYVVNAGKRTADGSEFEKRTADGSEFESPKKKAKVE

SEQ ID NO: 7270 - protein, 2176 aa, synthetic construct
MPAAKRVKLDGGDKKYSIGLDIGTNSVGWAVITDEYKVPSKKFKVLGNTDRHSIKKNLIGALLFDSGETAEATRLKRTARRRYTRRKNRICYLQEIFSNEMAKVDDSFFHRLEESFLVEEDKKHERHPIFGNIVDEVAYHEKYPTIYHLRKKLVDSTDKADLRLIYLALAHMIKFRGHFLIEGDLNPDNSDVDKLFIQLVQTYNQLFEENPINASGVDAKAILSARLSKSRRLENLIAQLPGEKKNGLFGNLIALSLGLTPNFKSNFDLAEDAKLQLSKDTYDDDLDNLLAQIGDQYADLFLAAKNLSDAILLSDILRVNTEITKAPLSASMIKRYDEHHQDLTLLKALVRQQLPEKYKEIFFDQSKNGYAGYIDGGASQEEFYKFIKPILEKMDGTEELLVKLNREDLLRKQRTFDNGSIPHQIHLGELHAILRRQEDFYPFLKDNREKIEKILTFRIPYYVGPLARGNSRFAWMTRKSEETITPWNFEEVVDKGASAQSFIERMTNFDKNLPNEKVLPKHSLLYEYFTVYNELTKVKYVTEGMRKPAFLSGEQKKAIVDLLFKTNRKVTVKQLKEDYFKKIECFDSVEISGVEDRFNASLGTYHDLLKIIKDKDFLDNEENEDILEDIVLTLTLFEDREMIEERLKTYAHLFDDKVMKQLKRRRYTGWGRLSRKLINGIRDKQSGKTILDFLKSDGFANRNFMQLIHDDSLTFKEDIQKAQVSGQGDSLHEHIANLAGSPAIKKGILQTVKVVDELVKVMGRHKPENIVIEMARENQTTQKGQKNSRERMKRIEEGIKELGSQILKEHPVENTQLQNEKLYLYYLQNGRDMYVDQELDINRLSDYDVDHIVPQSFLKDDSIDNKVLTRSDKARGKSDNVPSEEVVKKMKNYWRQLLNAKLITQRKFDNLTKAERGGLSELDKAGFIKRQLVETRQITKHVAQILDSRMNTKYDENDKLIREVKVITLKSKLVSDFRKDFQFYKVREINNYHHAHDAYLNAVVGTALIKKYPKLESEFVYGDYKVYDVRKMIAKSEQEIGKATAKYFFYSNIMNFFKTEITLANGEIRKRPLIETNGETGEIVWDKGRDFATVRKVLSMPQVNIVKKTEVQTGGFSKESILPKRNSDKLIARKKDWDPKKYGGFDSPTVAYSVLVVAKVEKGKSKKLKSVKELLGITIMERSSFEKNPIDFLEAKGYKEVKKDLIIKLPKYSLFELENGRKRMLASAGELQKGNELALPSKYVNFLYLASHYEKLKGSPEDNEQKQLFVEQHKHYLDEIIEQISEFSKRVILADANLDKVLSAYNKHRDKPIREQAENIIHLFTLTNLGAPAAFKYFDTTIDRKRYTSTKEVLDATLIHQSITGLYETRIDLSQLGGDGGPAPEAAAKGGSGGMDPLQLLQPLEAEIKGTKLKAHWNSGATITCVPQAFLEEEVPIKNIWIKTIHGEKEQPVYYLTFKIQGRKVEAEVISSPYDYILVSPSDIPWLMKKPLQLTTLVPLQEYEERLLKQTMLTGSYKEKLQSLFLKYDALWQHWENQVGHRRIKPHHIATGTVNPRPQKQYPINPKAKASIQTVINDLLKQGVLIQQNSIMNTPVYPVPKPDGKWRMVLDYREVNKTIPLIAAQNQHSAGILSSIFRGKYKTTLDLSNGFWAHSITPESYWLTAFTWLGQQYCWTRLPQGFLNSPALFNADVVDLLKEVPNVQVYVDDIYISHDDPREHLEQLEKVFSLLLNAGYVVSLKKSEIAQHEVEFLGFNITKEGRGLTETFKQKLLNITPPRDLKQLQSILGKLNFARNFIPNFSELVKPLYNIIATAPGKYITWTTDNSQQLQNIISMLNSAENLEERNPEVRLIMKVNTSPSAGYIRFYNEFAKRPIMYLNYVYTKAEVKFTNTEKLLTTIHKGLIKALDLGMGQEILVYSPIVSMTKIQKTPLPERKALPIRWITWMSYLEDPRIQFHYDKTLPELQQVPTVTDDIIAKIKHPSEFSMVFYTDGSAIKHPNVNKSHNAGMGIAQVQFKPEFTVINTWSIPLGDHTAQLAEVAAVEFACKKALKIDGPVLIVTDSFYVAESVNKELPYWQSNGFFNNKKKPLKHVSKWKSIADCIQLKPDIIIIHEKGHQPTASTFHTEGNNLADKLATQGSYVVNAGKRTADGSEFEKRTADGSEFESPKKKAKVE

SEQ ID NO: 7271 - protein, 2094 aa, synthetic construct
MPAAKRVKLDGGDKKYSIGLDIGTNSVGWAVITDEYKVPSKKFKVLGNTDRHSIKKNLIGALLFDSGETAEATRLKRTARRRYTRRKNRICYLQEIFSNEMAKVDDSFFHRLEESFLVEEDKKHERHPIFGNIVDEVAYHEKYPTIYHLRKKLVDSTDKADLRLIYLALAHMIKFRGHFLIEGDLNPDNSDVDKLFIQLVQTYNQLFEENPINASGVDAKAILSARLSKSRRLENLIAQLPGEKKNGLFGNLIALSLGLTPNFKSNFDLAEDAKLQLSKDTYDDDLDNLLAQIGDQYADLFLAAKNLSDAILLSDILRVNTEITKAPLSASMIKRYDEHHQDLTLLKALVRQQLPEKYKEIFFDQSKNGYAGYIDGGASQEEFYKFIKPILEKMDGTEELLVKLNREDLLRKQRTFDNGSIPHQIHLGELHAILRRQEDFYPFLKDNREKIEKILTFRIPYYVGPLARGNSRFAWMTRKSEETITPWNFEEVVDKGASAQSFIERMTNFDKNLPNEKVLPKHSLLYEYFTVYNELTKVKYVTEGMRKPAFLSGEQKKAIVDLLFKTNRKVTVKQLKEDYFKKIECFDSVEISGVEDRFNASLGTYHDLLKIIKDKDFLDNEENEDILEDIVLTLTLFEDREMIEERLKTYAHLFDDKVMKQLKRRRYTGWGRLSRKLINGIRDKQSGKTILDFLKSDGFANRNFMQLIHDDSLTFKEDIQKAQVSGQGDSLHEHIANLAGSPAIKKGILQTVKVVDELVKVMGRHKPENIVIEMARENQTTQKGQKNSRERMKRIEEGIKELGSQILKEHPVENTQLQNEKLYLYYLQNGRDMYVDQELDINRLSDYDVDHIVPQSFLKDDSIDNKVLTRSDKARGKSDNVPSEEVVKKMKNYWRQLLNAKLITQRKFDNLTKAERGGLSELDKAGFIKRQLVETRQITKHVAQILDSRMNTKYDENDKLIREVKVITLKSKLVSDFRKDFQFYKVREINNYHHAHDAYLNAVVGTALIKKYPKLESEFVYGDYKVYDVRKMIAKSEQEIGKATAKYFFYSNIMNFFKTEITLANGEIRKRPLIETNGETGEIVWDKGRDFATVRKVLSMPQVNIVKKTEVQTGGFSKESILPKRNSDKLIARKKDWDPKKYGGFDSPTVAYSVLVVAKVEKGKSKKLKSVKELLGITIMERSSFEKNPIDFLEAKGYKEVKKDLIIKLPKYSLFELENGRKRMLASAGELQKGNELALPSKYVNFLYLASHYEKLKGSPEDNEQKQLFVEQHKHYLDEIIEQISEFSKRVILADANLDKVLSAYNKHRDKPIREQAENIIHLFTLTNLGAPAAFKYFDTTIDRKRYTSTKEVLDATLIHQSITGLYETRIDLSQLGGDGGPAPEAAAKGGSGGVLNLEEEYRLHEKPVPSSIDPSWLQLFPTVWAERAGMGLANQVPPVVVELRSGASPVAVRQYPMSKEAREGIRPHIQRFLDLGVLVPCQSPWNTPLLPVKKPGTNDYRPVQDLREINKRVQDIHPTVPNPYNLLSSLPPSHTWYSVLDLKDAFFCLKLHPNSQPLFAFEWRDPEKGNTGQLTWTRLPQGFKNSPTLFDEALHRDLAPFRALNPQVVLLQYVDDLLVAAPTYRDCKEGTQKLLQELSKLGYRVSAKKAQLCQKEVTYLGYLLKEGKRWLTPARKATVMKIPPPTTPRQVREFLGTAGFCRLWIPGFASLAAPLYPLTKESIPFIWTEEHQKAFDRIKEALLSAPALALPDLTKPFTLYVDERAGVARGVLTQTLGPWRRPVAYLSKKLDPVASGWPTCLKAVAAVALLLKDADKLTLGQNVTVIASHSLESIVRQPPDRWMTNARMTHYQSLLLNERVSFAPPAVLNPATLLPVESEATPVHRCSEILAEETGTRRDLKDQPLPGVPAWYTDGSSFIAEGKRRAGAAIVDGKRTVWASSLPEGTSAQKAELVALTQALRLAEGKDINIYTDSRYAFATAHIHGAIYKQRGLLTSAGKDIKNKEEILALLEAIHLPKRVAIIHCPGHQKGNDPVATGNRRADEAAKQAALSTRVLAETTKPAGKRTADGSEFEKRTADGSEFESPKKKAKVE

SEQ ID NO: 7272 - protein, 2096 aa, synthetic construct
MPAAKRVKLDGGDKKYSIGLDIGTNSVGWAVITDEYKVPSKKFKVLGNTDRHSIKKNLIGALLFDSGETAEATRLKRTARRRYTRRKNRICYLQEIFSNEMAKVDDSFFHRLEESFLVEEDKKHERHPIFGNIVDEVAYHEKYPTIYHLRKKLVDSTDKADLRLIYLALAHMIKFRGHFLIEGDLNPDNSDVDKLFIQLVQTYNQLFEENPINASGVDAKAILSARLSKSRRLENLIAQLPGEKKNGLFGNLIALSLGLTPNFKSNFDLAEDAKLQLSKDTYDDDLDNLLAQIGDQYADLFLAAKNLSDAILLSDILRVNTEITKAPLSASMIKRYDEHHQDLTLLKALVRQQLPEKYKEIFFDQSKNGYAGYIDGGASQEEFYKFIKPILEKMDGTEELLVKLNREDLLRKQRTFDNGSIPHQIHLGELHAILRRQEDFYPFLKDNREKIEKILTFRIPYYVGPLARGNSRFAWMTRKSEETITPWNFEEVVDKGASAQSFIERMTNFDKNLPNEKVLPKHSLLYEYFTVYNELTKVKYVTEGMRKPAFLSGEQKKAIVDLLFKTNRKVTVKQLKEDYFKKIECFDSVEISGVEDRFNASLGTYHDLLKIIKDKDFLDNEENEDILEDIVLTLTLFEDREMIEERLKTYAHLFDDKVMKQLKRRRYTGWGRLSRKLINGIRDKQSGKTILDFLKSDGFANRNFMQLIHDDSLTFKEDIQKAQVSGQGDSLHEHIANLAGSPAIKKGILQTVKVVDELVKVMGRHKPENIVIEMARENQTTQKGQKNSRERMKRIEEGIKELGSQILKEHPVENTQLQNEKLYLYYLQNGRDMYVDQELDINRLSDYDVDHIVPQSFLKDDSIDNKVLTRSDKARGKSDNVPSEEVVKKMKNYWRQLLNAKLITQRKFDNLTKAERGGLSELDKAGFIKRQLVETRQITKHVAQILDSRMNTKYDENDKLIREVKVITLKSKLVSDFRKDFQFYKVREINNYHHAHDAYLNAVVGTALIKKYPKLESEFVYGDYKVYDVRKMIAKSEQEIGKATAKYFFYSNIMNFFKTEITLANGEIRKRPLIETNGETGEIVWDKGRDFATVRKVLSMPQVNIVKKTEVQTGGFSKESILPKRNSDKLIARKKDWDPKKYGGFDSPTVAYSVLVVAKVEKGKSKKLKSVKELLGITIMERSSFEKNPIDFLEAKGYKEVKKDLIIKLPKYSLFELENGRKRMLASAGELQKGNELALPSKYVNFLYLASHYEKLKGSPEDNEQKQLFVEQHKHYLDEIIEQISEFSKRVILADANLDKVLSAYNKHRDKPIREQAENIIHLFTLTNLGAPAAFKYFDTTIDRKRYTSTKEVLDATLIHQSITGLYETRIDLSQLGGDGGPAPEAAAKGGSGGTLNIEDEYRLHETSKEPDVPLGSTWLSDFPQAWAETGGMGLAVRQAPLIIPLKATSTPVSIKQYPMSQEARLGIKPHIQRLLDQGILVPCQSPWNTPLLPVKKPGTNDYRPVQDLREVNKRVEDIHPTVPNPYNLLSGLPPSHQWYTVLDLKDAFFCLRLHPTSQPLFAFEWRDPEMGISGQLTWTRLPQGFKNSPTLFNEALHRDLADFRIQHPDLILLQYVDDLLLAATSEQDCQRGTRALLQTLGNLGYRASAKKAQICQKQVKYLGYLLKEGQRWLTEARKETVMGQPTPKTPRQLREFLGTAGFCRLWIPGFAEMAAPLYPLTKPGTLFNWGPDQQKAYQEIKQALLTAPALGLPDLTKPFELFVDEKQGYAKGVLTQKLGPWRRPVAYLSKKLDPVAAGWPPCLRMVAAIAVLTKDAGKLTMGQPLVILAPHAVEALVKQPPDRWLSNARMTHYQAMLLDTDRVQFGPVVALNPATLLPLPEKEAPHDCLEILAETHGTRPDLTDQPIPDADYTWYTDGSSFLQEGQRRAGAAVTTETEVIWARALPAGTSAQRAELIALTQALKMAEGKKLNVYTDSRYAFATAHVHGEIYRRRGWLTSEGREIKNKNEILALLKALFLPKRLSIIHCPGHQKGNSAEARGNRMADQAAREAAMKAVLETSTLLAGKRTADGSEFEKRTADGSEFESPKKKAKVE

SEQ ID NO: 7273 - protein, 2098 aa, synthetic construct
MPAAKRVKLDGGDKKYSIGLDIGTNSVGWAVITDEYKVPSKKFKVLGNTDRHSIKKNLIGALLFDSGETAEATRLKRTARRRYTRRKNRICYLQEIFSNEMAKVDDSFFHRLEESFLVEEDKKHERHPIFGNIVDEVAYHEKYPTIYHLRKKLVDSTDKADLRLIYLALAHMIKFRGHFLIEGDLNPDNSDVDKLFIQLVQTYNQLFEENPINASGVDAKAILSARLSKSRRLENLIAQLPGEKKNGLFGNLIALSLGLTPNFKSNFDLAEDAKLQLSKDTYDDDLDNLLAQIGDQYADLFLAAKNLSDAILLSDILRVNTEITKAPLSASMIKRYDEHHQDLTLLKALVRQQLPEKYKEIFFDQSKNGYAGYIDGGASQEEFYKFIKPILEKMDGTEELLVKLNREDLLRKQRTFDNGSIPHQIHLGELHAILRRQEDFYPFLKDNREKIEKILTFRIPYYVGPLARGNSRFAWMTRKSEETITPWNFEEVVDKGASAQSFIERMTNFDKNLPNEKVLPKHSLLYEYFTVYNELTKVKYVTEGMRKPAFLSGEQKKAIVDLLFKTNRKVTVKQLKEDYFKKIECFDSVEISGVEDRFNASLGTYHDLLKIIKDKDFLDNEENEDILEDIVLTLTLFEDREMIEERLKTYAHLFDDKVMKQLKRRRYTGWGRLSRKLINGIRDKQSGKTILDFLKSDGFANRNFMQLIHDDSLTFKEDIQKAQVSGQGDSLHEHIANLAGSPAIKKGILQTVKVVDELVKVMGRHKPENIVIEMARENQTTQKGQKNSRERMKRIEEGIKELGSQILKEHPVENTQLQNEKLYLYYLQNGRDMYVDQELDINRLSDYDVDHIVPQSFLKDDSIDNKVLTRSDKARGKSDNVPSEEVVKKMKNYWRQLLNAKLITQRKFDNLTKAERGGLSELDKAGFIKRQLVETRQITKHVAQILDSRMNTKYDENDKLIREVKVITLKSKLVSDFRKDFQFYKVREINNYHHAHDAYLNAVVGTALIKKYPKLESEFVYGDYKVYDVRKMIAKSEQEIGKATAKYFFYSNIMNFFKTEITLANGEIRKRPLIETNGETGEIVWDKGRDFATVRKVLSMPQVNIVKKTEVQTGGFSKESILPKRNSDKLIARKKDWDPKKYGGFDSPTVAYSVLVVAKVEKGKSKKLKSVKELLGITIMERSSFEKNPIDFLEAKGYKEVKKDLIIKLPKYSLFELENGRKRMLASAGELQKGNELALPSKYVNFLYLASHYEKLKGSPEDNEQKQLFVEQHKHYLDEIIEQISEFSKRVILADANLDKVLSAYNKHRDKPIREQAENIIHLFTLTNLGAPAAFKYFDTTIDRKRYTSTKEVLDATLIHQSITGLYETRIDLSQLGGDGGGGGGSSEAAAKGGTAPLEEEYRLFLEAPIQNVTLLEQWKREIPKVWAEINPPGLASTQAPIHVQLLSTALPVRVRQYPITLEAKRSLRETIRKFRAAGILRPVHSPWNTPLLPVRKSGTSEYRMVQDLREVNKRVETIHPTVPNPYTLLSLLPPDRIWYSVLDLKDAFFCIPLAPESQLIFAFEWADAEEGESGQLTWTRLPQGFKNSPTLFNEALNRDLQGFRLDHPSVSLLQYVDDLLIAADTQAACLSATRDLLMTLAELGYRVSGKKAQLCQEEVTYLGFKIHKGSRSLSNSRTQAILQIPVPKTKRQVREFLGTIGYCRLWIPGFAELAQPLYAATRPGNDPLVWGEKEEEAFQSLKLALTQPPALALPSLDKPFQLFVEETSGAAKGVLTQALGPWKRPVAYLSKRLDPVAAGWPRCLRAIAAAALLTREASKLTFGQDIEITSSHNLESLLRSPPDKWLTNARITQYQVLLLDPPRVRFKQTAALNPATLLPETDDTLPIHHCLDTLDSLTSTRPDLTDQPLAQAEATLFTDGSSYIRDGKRYAGAAVVTLDSVIWAEPLPIGTSAQKAELIALTKALEWSKDKSVNIYTDSRYAFATLHVHGMIYRERGWLTAGGKAIKNAPEILALLTAVWLPKRVAVMHCKGHQKDDAPTSTGNRRADEVAREVAIRPLSTQATISAGKRTADGSEFEKRTADGSEFESPKKKAKVE

SEQ ID NO: 7274 - protein, 2218 aa, synthetic construct
MPAAKRVKLDGGDKKYSIGLDIGTNSVGWAVITDEYKVPSKKFKVLGNTDRHSIKKNLIGALLFDSGETAEATRLKRTARRRYTRRKNRICYLQEIFSNEMAKVDDSFFHRLEESFLVEEDKKHERHPIFGNIVDEVAYHEKYPTIYHLRKKLVDSTDKADLRLIYLALAHMIKFRGHFLIEGDLNPDNSDVDKLFIQLVQTYNQLFEENPINASGVDAKAILSARLSKSRRLENLIAQLPGEKKNGLFGNLIALSLGLTPNFKSNFDLAEDAKLQLSKDTYDDDLDNLLAQIGDQYADLFLAAKNLSDAILLSDILRVNTEITKAPLSASMIKRYDEHHQDLTLLKALVRQQLPEKYKEIFFDQSKNGYAGYIDGGASQEEFYKFIKPILEKMDGTEELLVKLNREDLLRKQRTFDNGSIPHQIHLGELHAILRRQEDFYPFLKDNREKIEKILTFRIPYYVGPLARGNSRFAWMTRKSEETITPWNFEEVVDKGASAQSFIERMTNFDKNLPNEKVLPKHSLLYEYFTVYNELTKVKYVTEGMRKPAFLSGEQKKAIVDLLFKTNRKVTVKQLKEDYFKKIECFDSVEISGVEDRFNASLGTYHDLLKIIKDKDFLDNEENEDILEDIVLTLTLFEDREMIEERLKTYAHLFDDKVMKQLKRRRYTGWGRLSRKLINGIRDKQSGKTILDFLKSDGFANRNFMQLIHDDSLTFKEDIQKAQVSGQGDSLHEHIANLAGSPAIKKGILQTVKVVDELVKVMGRHKPENIVIEMARENQTTQKGQKNSRERMKRIEEGIKELGSQILKEHPVENTQLQNEKLYLYYLQNGRDMYVDQELDINRLSDYDVDHIVPQSFLKDDSIDNKVLTRSDKARGKSDNVPSEEVVKKMKNYWRQLLNAKLITQRKFDNLTKAERGGLSELDKAGFIKRQLVETRQITKHVAQILDSRMNTKYDENDKLIREVKVITLKSKLVSDFRKDFQFYKVREINNYHHAHDAYLNAVVGTALIKKYPKLESEFVYGDYKVYDVRKMIAKSEQEIGKATAKYFFYSNIMNFFKTEITLANGEIRKRPLIETNGETGEIVWDKGRDFATVRKVLSMPQVNIVKKTEVQTGGFSKESILPKRNSDKLIARKKDWDPKKYGGFDSPTVAYSVLVVAKVEKGKSKKLKSVKELLGITIMERSSFEKNPIDFLEAKGYKEVKKDLIIKLPKYSLFELENGRKRMLASAGELQKGNELALPSKYVNFLYLASHYEKLKGSPEDNEQKQLFVEQHKHYLDEIIEQISEFSKRVILADANLDKVLSAYNKHRDKPIREQAENIIHLFTLTNLGAPAAFKYFDTTIDRKRYTSTKEVLDATLIHQSITGLYETRIDLSQLGGDGGGGGGSSEAAAKGGTLGDQGSRGSDPLPEPRVTLTVEGIPTEFLVNTGAEHSVLTKPMGKMGSKRTVVAGATGSKVYPWTTKRLLKIGQKQVTHSFLVIPECPAPLLGRDLLTKLKAQIQFSTEGPQVTWEDRPAMCLVLNLEEEYRLHEKPVPPSIDPSWLQLFPMVWAEKAGMGLANQVPPVVVELKSDASPVAVRQYPMSKEAREGIRPHIQRFLDLGILVPCQSPWNTPLLPVKKPGTNDYRPVQDLREVNKRVQDIHPTVPNPYNLLSSLPPSHTWYSVLDLKDAFFCLKLHPNSQPLFAFEWRDPEKGNTGQLTWTRLPQGFKNSPTLFNEALHRDLASFRALNPQVVMLQYVDDLLVAAPTYRDCKEGTRRLLQELSKLGYRVSAKKAQLCREEVTYLGYLLKGGKRWLTPARKATVMKIPTPTTPRQVREFLGTAGFCRLWIPGFASLAAPLYPLTRPKVPFTWTEAHQEAFGRIKEALLSAPALALPDLTKPFALYVDEKEGVARGVLTQTLGPWRRPVAYLSKKLDPVASGWPTCLKAIAAVALLLKDADKLTLGQNVLVIAPHNLESIVRQPPDRWMTNARMTHYQSLLLNERVSFAPPAILNPATLLPVESDDTPIHICSEILAEETGTRPDLRDQPLPGVPAWYTDGSSFIMDGRRQAGAAIVDNKRTVWASNLPEGTSAQKAELIALTQALRLAEGKSINIYTDSRYAFATAHVHGAIYKQRGWLTSAGKDIKNKEEILALLEAIHLPKRVAIIHCPGHQRGTDPVATGNRKADEAAKQAAQSTRILTETTKNAGKRTADGSEFEKRTADGSEFESPKKKAKVE

SEQ ID NO: 7275 - protein, 2096 aa, synthetic construct
MPAAKRVKLDGGDKKYSIGLDIGTNSVGWAVITDEYKVPSKKFKVLGNTDRHSIKKNLIGALLFDSGETAEATRLKRTARRRYTRRKNRICYLQEIFSNEMAKVDDSFFHRLEESFLVEEDKKHERHPIFGNIVDEVAYHEKYPTIYHLRKKLVDSTDKADLRLIYLALAHMIKFRGHFLIEGDLNPDNSDVDKLFIQLVQTYNQLFEENPINASGVDAKAILSARLSKSRRLENLIAQLPGEKKNGLFGNLIALSLGLTPNFKSNFDLAEDAKLQLSKDTYDDDLDNLLAQIGDQYADLFLAAKNLSDAILLSDILRVNTEITKAPLSASMIKRYDEHHQDLTLLKALVRQQLPEKYKEIFFDQSKNGYAGYIDGGASQEEFYKFIKPILEKMDGTEELLVKLNREDLLRKQRTFDNGSIPHQIHLGELHAILRRQEDFYPFLKDNREKIEKILTFRIPYYVGPLARGNSRFAWMTRKSEETITPWNFEEVVDKGASAQSFIERMTNFDKNLPNEKVLPKHSLLYEYFTVYNELTKVKYVTEGMRKPAFLSGEQKKAIVDLLFKTNRKVTVKQLKEDYFKKIECFDSVEISGVEDRFNASLGTYHDLLKIIKDKDFLDNEENEDILEDIVLTLTLFEDREMIEERLKTYAHLFDDKVMKQLKRRRYTGWGRLSRKLINGIRDKQSGKTILDFLKSDGFANRNFMQLIHDDSLTFKEDIQKAQVSGQGDSLHEHIANLAGSPAIKKGILQTVKVVDELVKVMGRHKPENIVIEMARENQTTQKGQKNSRERMKRIEEGIKELGSQILKEHPVENTQLQNEKLYLYYLQNGRDMYVDQELDINRLSDYDVDHIVPQSFLKDDSIDNKVLTRSDKARGKSDNVPSEEVVKKMKNYWRQLLNAKLITQRKFDNLTKAERGGLSELDKAGFIKRQLVETRQITKHVAQILDSRMNTKYDENDKLIREVKVITLKSKLVSDFRKDFQFYKVREINNYHHAHDAYLNAVVGTALIKKYPKLESEFVYGDYKVYDVRKMIAKSEQEIGKATAKYFFYSNIMNFFKTEITLANGEIRKRPLIETNGETGEIVWDKGRDFATVRKVLSMPQVNIVKKTEVQTGGFSKESILPKRNSDKLIARKKDWDPKKYGGFDSPTVAYSVLVVAKVEKGKSKKLKSVKELLGITIMERSSFEKNPIDFLEAKGYKEVKKDLIIKLPKYSLFELENGRKRMLASAGELQKGNELALPSKYVNFLYLASHYEKLKGSPEDNEQKQLFVEQHKHYLDEIIEQISEFSKRVILADANLDKVLSAYNKHRDKPIREQAENIIHLFTLTNLGAPAAFKYFDTTIDRKRYTSTKEVLDATLIHQSITGLYETRIDLSQLGGDGGGGGGSSEAAAKGGTLNLEDEYRLYETSAEPEVSPGSTWLSDFPQAWAETGGMGLAVRQAPLIIPLKATSTPVSIKQYPMSQEAKLGIKPHIQRLLDQGILVPCQSPWNTPLLPVKKPGTNDYRPVQDLREVNKRVEDIHPTVPNPYNLLSGLPPSHRWYTVLDLKDAFFCLRLHPTSQPLFAFEWRDPGMGISGQLTWTRLPQGFKNSPTLFNEALHRDLADFRIQHPDLILLQYVDDILLAATSELDCQQGTRALLLTLGNLGYRASAKKAQLCQKQVKYLGYLLKEGQRWLTEARKETVMGQPTPKTPRQLREFLGKAGFCRLFIPGFAEMAAPLYPLTKPGTLFNWGPDQQKAYQEIKQALLTAPALGLPDLTKPFELFVDEKQGYAKGVLTQKLGPWRRPVAYLSKKLDPVAAGWPPCLRMVAAIAVLRKDAGKLTMGQPLVILAPHAVEALVKQPPDRWLSNARMTHYQAMLLDTDRVQFGPVVALNPATLLPLPEEGAPHDCLEILAETHGTRPDLTDQPIPDADHTWYTDGSSFLQEGQRKAGAAVTTETEVIWARALPAGTSAQRAELIALTQALKMAEGKRLNVYTDSRYAFATAHIHGEIYRRRGWLTSEGREIKNKSEILALLKALFLPKRLSIIHCLGHQKGDSAEARGNRLADQAAREAAIKTPPDTSTLLAGKRTADGSEFEKRTADGSEFESPKKKAKVE

SEQ ID NO: 7276 - protein, 2096 aa, synthetic construct
MPAAKRVKLDGGDKKYSIGLDIGTNSVGWAVITDEYKVPSKKFKVLGNTDRHSIKKNLIGALLFDSGETAEATRLKRTARRRYTRRKNRICYLQEIFSNEMAKVDDSFFHRLEESFLVEEDKKHERHPIFGNIVDEVAYHEKYPTIYHLRKKLVDSTDKADLRLIYLALAHMIKFRGHFLIEGDLNPDNSDVDKLFIQLVQTYNQLFEENPINASGVDAKAILSARLSKSRRLENLIAQLPGEKKNGLFGNLIALSLGLTPNFKSNFDLAEDAKLQLSKDTYDDDLDNLLAQIGDQYADLFLAAKNLSDAILLSDILRVNTEITKAPLSASMIKRYDEHHQDLTLLKALVRQQLPEKYKEIFFDQSKNGYAGYIDGGASQEEFYKFIKPILEKMDGTEELLVKLNREDLLRKQRTFDNGSIPHQIHLGELHAILRRQEDFYPFLKDNREKIEKILTFRIPYYVGPLARGNSRFAWMTRKSEETITPWNFEEVVDKGASAQSFIERMTNFDKNLPNEKVLPKHSLLYEYFTVYNELTKVKYVTEGMRKPAFLSGEQKKAIVDLLFKTNRKVTVKQLKEDYFKKIECFDSVEISGVEDRFNASLGTYHDLLKIIKDKDFLDNEENEDILEDIVLTLTLFEDREMIEERLKTYAHLFDDKVMKQLKRRRYTGWGRLSRKLINGIRDKQSGKTILDFLKSDGFANRNFMQLIHDDSLTFKEDIQKAQVSGQGDSLHEHIANLAGSPAIKKGILQTVKVVDELVKVMGRHKPENIVIEMARENQTTQKGQKNSRERMKRIEEGIKELGSQILKEHPVENTQLQNEKLYLYYLQNGRDMYVDQELDINRLSDYDVDHIVPQSFLKDDSIDNKVLTRSDKARGKSDNVPSEEVVKKMKNYWRQLLNAKLITQRKFDNLTKAERGGLSELDKAGFIKRQLVETRQITKHVAQILDSRMNTKYDENDKLIREVKVITLKSKLVSDFRKDFQFYKVREINNYHHAHDAYLNAVVGTALIKKYPKLESEFVYGDYKVYDVRKMIAKSEQEIGKATAKYFFYSNIMNFFKTEITLANGEIRKRPLIETNGETGEIVWDKGRDFATVRKVLSMPQVNIVKKTEVQTGGFSKESILPKRNSDKLIARKKDWDPKKYGGFDSPTVAYSVLVVAKVEKGKSKKLKSVKELLGITIMERSSFEKNPIDFLEAKGYKEVKKDLIIKLPKYSLFELENGRKRMLASAGELQKGNELALPSKYVNFLYLASHYEKLKGSPEDNEQKQLFVEQHKHYLDEIIEQISEFSKRVILADANLDKVLSAYNKHRDKPIREQAENIIHLFTLTNLGAPAAFKYFDTTIDRKRYTSTKEVLDATLIHQSITGLYETRIDLSQLGGDGGGGGGSSEAAAKGGTLNIEDEYRLHETSKEPDVSLGSTWLSDFPQAWAETGGMGLAVRQAPLIIPLKATSTPVSIKQYPMSQEARLGIKPHIQRLLDQGILVPCQSPWNTPLLPVKKPGTNDYRPVQDLREVNKRVEDIHPTVPNPYNLLSGLPPSHQWYTVLDLKDAFFCLRLHPTSQPLFAFEWRDPEMGISGQLTWTRLPQGFKNSPTLFNEALHRDLAGFRIQHPDLILLQYVDDLLLAATSELDCQQGTRALLQTLGDLGYRASAKKAQICQKQVKYLGYLLKEGQRWLTEARKETVMGQPIPKTPRQLREFLGTAGFCRLWIPGFAEMAAPLYPLTKPGTLFNWGPDQQKAFQEIKQALLTAPALGLPDLTKPFELFVDEKQGYAKGVLTQKLGPWRRPVAYLSKKLDPVAAGWPPCLRMVAAIAVLTKDAGKLTMGQPLVILAPHAVEALVKQPPDRWLSNARMTHYQALLLDTDRVQFGPVVALNPATLLPLPEEGLQHDCLDILAEAHGTRSDLMDQPLPDADHTWYTDGSSFLQEGQRKAGAAVTTETEVIWARALPAGTSAQRAELIALTQALKMAEGKKLNVYTDSRYAFATAHIHGEIYRRRGWLTSEGKEIKNKDEILALLKALFLPKRLSIIHCPGHQKGNSAEARGNRMADQAAREVATRETPETSTLLAGKRTADGSEFEKRTADGSEFESPKKKAKVE

SEQ ID NO: 7277 - protein, 2096 aa, synthetic construct
MPAAKRVKLDGGDKKYSIGLDIGTNSVGWAVITDEYKVPSKKFKVLGNTDRHSIKKNLIGALLFDSGETAEATRLKRTARRRYTRRKNRICYLQEIFSNEMAKVDDSFFHRLEESFLVEEDKKHERHPIFGNIVDEVAYHEKYPTIYHLRKKLVDSTDKADLRLIYLALAHMIKFRGHFLIEGDLNPDNSDVDKLFIQLVQTYNQLFEENPINASGVDAKAILSARLSKSRRLENLIAQLPGEKKNGLFGNLIALSLGLTPNFKSNFDLAEDAKLQLSKDTYDDDLDNLLAQIGDQYADLFLAAKNLSDAILLSDILRVNTEITKAPLSASMIKRYDEHHQDLTLLKALVRQQLPEKYKEIFFDQSKNGYAGYIDGGASQEEFYKFIKPILEKMDGTEELLVKLNREDLLRKQRTFDNGSIPHQIHLGELHAILRRQEDFYPFLKDNREKIEKILTFRIPYYVGPLARGNSRFAWMTRKSEETITPWNFEEVVDKGASAQSFIERMTNFDKNLPNEKVLPKHSLLYEYFTVYNELTKVKYVTEGMRKPAFLSGEQKKAIVDLLFKTNRKVTVKQLKEDYFKKIECFDSVEISGVEDRFNASLGTYHDLLKIIKDKDFLDNEENEDILEDIVLTLTLFEDREMIEERLKTYAHLFDDKVMKQLKRRRYTGWGRLSRKLINGIRDKQSGKTILDFLKSDGFANRNFMQLIHDDSLTFKEDIQKAQVSGQGDSLHEHIANLAGSPAIKKGILQTVKVVDELVKVMGRHKPENIVIEMARENQTTQKGQKNSRERMKRIEEGIKELGSQILKEHPVENTQLQNEKLYLYYLQNGRDMYVDQELDINRLSDYDVDHIVPQSFLKDDSIDNKVLTRSDKARGKSDNVPSEEVVKKMKNYWRQLLNAKLITQRKFDNLTKAERGGLSELDKAGFIKRQLVETRQITKHVAQILDSRMNTKYDENDKLIREVKVITLKSKLVSDFRKDFQFYKVREINNYHHAHDAYLNAVVGTALIKKYPKLESEFVYGDYKVYDVRKMIAKSEQEIGKATAKYFFYSNIMNFFKTEITLANGEIRKRPLIETNGETGEIVWDKGRDFATVRKVLSMPQVNIVKKTEVQTGGFSKESILPKRNSDKLIARKKDWDPKKYGGFDSPTVAYSVLVVAKVEKGKSKKLKSVKELLGITIMERSSFEKNPIDFLEAKGYKEVKKDLIIKLPKYSLFELENGRKRMLASAGELQKGNELALPSKYVNFLYLASHYEKLKGSPEDNEQKQLFVEQHKHYLDEIIEQISEFSKRVILADANLDKVLSAYNKHRDKPIREQAENIIHLFTLTNLGAPAAFKYFDTTIDRKRYTSTKEVLDATLIHQSITGLYETRIDLSQLGGDGGGGGGSSEAAAKGGTLNIEDEHRLHETSKEPDVSLGSTWLSDFPQAWAETGGMGLAVRQAPLIIPLKATSTPVSIKQYPMSQEARLGIKPHIQRLLDQGILVPCQSPWNTPLLPVKKPGTNDYRPVQDLREVNKRVEDIHPTVPNPYNLLSGLPPSHQWYTVLDLKDAFFCLRLHPTSQPLFAFEWRDPEMGISGQLTWTRLPQGFKNSPTLFDEALHRDLADFRIQHPDLILLQYVDDLLLAATSELDCQQGTRALLQTLGNLGYRASAKKAQICQKQVKYLGYLLKEGQRWLTEARKETVMGQPTPKTPRQLREFLGTAGFCRLWIPGFAEMAAPLYPLTKTGTLFNWGPDQQKAYQEIKQALLTAPALGLPDLTKPFELFVDEKQGYAKGVLTQKLGPWRRPVAYLSKKLDPVAAGWPPCLRMVAAIAVLTKDAGKLTMGQPLVILAPHAVEALVKQPPDRWLSNARMTHYQALLLDTDRVQFGPVVALNPATLLPLPEEGLQHNCLDILAEAHGTRPDLTDQPLPDADHTWYTDGSSLLQEGQRKAGAAVTTETEVIWAKALPAGTSAQRAELIALTQALKMAEGKKLNVYTDSRYAFATAHIHGEIYRRRGLLTSEGKEIKNKDEILALLKALFLPKRLSIIHCPGHQKGHSAEARGNRMADQAARKAAITETPDTSTLLAGKRTADGSEFEKRTADGSEFESPKKKAKVE

SEQ ID NO: 7278 - protein, 2088 aa, synthetic construct
MPAAKRVKLDGGDKKYSIGLDIGTNSVGWAVITDEYKVPSKKFKVLGNTDRHSIKKNLIGALLFDSGETAEATRLKRTARRRYTRRKNRICYLQEIFSNEMAKVDDSFFHRLEESFLVEEDKKHERHPIFGNIVDEVAYHEKYPTIYHLRKKLVDSTDKADLRLIYLALAHMIKFRGHFLIEGDLNPDNSDVDKLFIQLVQTYNQLFEENPINASGVDAKAILSARLSKSRRLENLIAQLPGEKKNGLFGNLIALSLGLTPNFKSNFDLAEDAKLQLSKDTYDDDLDNLLAQIGDQYADLFLAAKNLSDAILLSDILRVNTEITKAPLSASMIKRYDEHHQDLTLLKALVRQQLPEKYKEIFFDQSKNGYAGYIDGGASQEEFYKFIKPILEKMDGTEELLVKLNREDLLRKQRTFDNGSIPHQIHLGELHAILRRQEDFYPFLKDNREKIEKILTFRIPYYVGPLARGNSRFAWMTRKSEETITPWNFEEVVDKGASAQSFIERMTNFDKNLPNEKVLPKHSLLYEYFTVYNELTKVKYVTEGMRKPAFLSGEQKKAIVDLLFKTNRKVTVKQLKEDYFKKIECFDSVEISGVEDRFNASLGTYHDLLKIIKDKDFLDNEENEDILEDIVLTLTLFEDREMIEERLKTYAHLFDDKVMKQLKRRRYTGWGRLSRKLINGIRDKQSGKTILDFLKSDGFANRNFMQLIHDDSLTFKEDIQKAQVSGQGDSLHEHIANLAGSPAIKKGILQTVKVVDELVKVMGRHKPENIVIEMARENQTTQKGQKNSRERMKRIEEGIKELGSQILKEHPVENTQLQNEKLYLYYLQNGRDMYVDQELDINRLSDYDVDHIVPQSFLKDDSIDNKVLTRSDKARGKSDNVPSEEVVKKMKNYWRQLLNAKLITQRKFDNLTKAERGGLSELDKAGFIKRQLVETRQITKHVAQILDSRMNTKYDENDKLIREVKVITLKSKLVSDFRKDFQFYKVREINNYHHAHDAYLNAVVGTALIKKYPKLESEFVYGDYKVYDVRKMIAKSEQEIGKATAKYFFYSNIMNFFKTEITLANGEIRKRPLIETNGETGEIVWDKGRDFATVRKVLSMPQVNIVKKTEVQTGGFSKESILPKRNSDKLIARKKDWDPKKYGGFDSPTVAYSVLVVAKVEKGKSKKLKSVKELLGITIMERSSFEKNPIDFLEAKGYKEVKKDLIIKLPKYSLFELENGRKRMLASAGELQKGNELALPSKYVNFLYLASHYEKLKGSPEDNEQKQLFVEQHKHYLDEIIEQISEFSKRVILADANLDKVLSAYNKHRDKPIREQAENIIHLFTLTNLGAPAAFKYFDTTIDRKRYTSTKEVLDATLIHQSITGLYETRIDLSQLGGDGGGGGGSSEAAAKGGLDDEYRLYSPLVKPDQNIQFWLEQFPQAWAETAGMGLAKQVPPQVIQLKASATPVSVRQYPLSKEAQEGIRPHVQRLIQQGILVPVQSPWNTPLLPVRKPGTNDYRPVQDLREVNKRVQDIHPTVPNPYNLLCALPPQRSWYTVLDLKDAFFCLRLHPTSQPLFAFEWRDPGTGRTGQLTWTRLPQGFKNSPTIFNEALHRDLANFRIQHPQVTLLQYVDDLLLAGATKQDCLEGTKALLLELSDLGYRASAKKAQICRREVTYLGYSLRDGQRWLTEARKKTVVQIPAPTTAKQVREFLGKAGFCRLFIPGFATLAAPLYPLTKPKGEFSWAPEHQKAFDAIKKALLSAPALALPDVTKPFTLYVDERKGVARGVLTQTLGPWRRPVAYLSKKLDPVASGWPVCLKAIAAVAILVKDADKLTLGQNITVIAPHALENIVRQPPDRWMTNARMTHYQSLLLTERVTFAPPAALNPATLLPEETDEPVTHDCHQLLIEETGVRKDLTDIPLTGEVLTWFTDGSSYVVEGKRMAGAAVVDGTRTIWASSLPEGTSAQKAELMALTQALRLAEGKSINIYTDSRYAFATAHVHGAIYKQRGWLTSAGREIKNKEEILSLLEALHLPKRLAIIHCPGHQKAKDPISRGNQMADRVAKQAAQGVNLLPAGKRTADGSEFEKRTADGSEFESPKKKAKVE

SEQ ID NO: 7279 - protein, 2088 aa, synthetic construct; identical to SEQ ID NO: 7278

SEQ ID NO: 7280 - protein, 2090 aa, synthetic construct
MPAAKRVKLDGGDKKYSIGLDIGTNSVGWAVITDEYKVPSKKFKVLGNTDRHSIKKNLIGALLFDSGETAEATRLKRTARRRYTRRKNRICYLQEIFSNEMAKVDDSFFHRLEESFLVEEDKKHERHPIFGNIVDEVAYHEKYPTIYHLRKKLVDSTDKADLRLIYLALAHMIKFRGHFLIEGDLNPDNSDVDKLFIQLVQTYNQLFEENPINASGVDAKAILSARLSKSRRLENLIAQLPGEKKNGLFGNLIALSLGLTPNFKSNFDLAEDAKLQLSKDTYDDDLDNLLAQIGDQYADLFLAAKNLSDAILLSDILRVNTEITKAPLSASMIKRYDEHHQDLTLLKALVRQQLPEKYKEIFFDQSKNGYAGYIDGGASQEEFYKFIKPILEKMDGTEELLVKLNREDLLRKQRTFDNGSIPHQIHLGELHAILRRQEDFYPFLKDNREKIEKILTFRIPYYVGPLARGNSRFAWMTRKSEETITPWNFEEVVDKGASAQSFIERMTNFDKNLPNEKVLPKHSLLYEYFTVYNELTKVKYVTEGMRKPAFLSGEQKKAIVDLLFKTNRKVTVKQLKEDYFKKIECFDSVEISGVEDRFNASLGTYHDLLKIIKDKDFLDNEENEDILEDIVLTLTLFEDREMIEERLKTYAHLFDDKVMKQLKRRRYTGWGRLSRKLINGIRDKQSGKTILDFLKSDGFANRNFMQLIHDDSLTFKEDIQKAQVSGQGDSLHEHIANLAGSPAIKKGILQTVKVVDELVKVMGRHKPENIVIEMARENQTTQKGQKNSRERMKRIEEGIKELGSQILKEHPVENTQLQNEKLYLYYLQNGRDMYVDQELDINRLSDYDVDHIVPQSFLKDDSIDNKVLTRSDKARGKSDNVPSEEVVKKMKNYWRQLLNAKLITQRKFDNLTKAERGGLSELDKAGFIKRQLVETRQITKHVAQILDSRMNTKYDENDKLIREVKVITLKSKLVSDFRKDFQFYKVREINNYHHAHDAYLNAVVGTALIKKYPKLESEFVYGDYKVYDVRKMIAKSEQEIGKATAKYFFYSNIMNFFKTEITLANGEIRKRPLIETNGETGEIVWDKGRDFATVRKVLSMPQVNIVKKTEVQTGGFSKESILPKRNSDKLIARKKDWDPKKYGGFDSPTVAYSVLVVAKVEKGKSKKLKSVKELLGITIMERSSFEKNPIDFLEAKGYKEVKKDLIIKLPKYSLFELENGRKRMLASAGELQKGNELALPSKYVNFLYLASHYEKLKGSPEDNEQKQLFVEQHKHYLDEIIEQISEFSKRVILADANLDKVLSAYNKHRDKPIREQAENIIHLFTLTNLGAPAAFKYFDTTIDRKRYTSTKEVLDATLIHQSITGLYETRIDLSQLGGDGGGGGGSSEAAAKGGTLQLDDEYRLYSPLVKPDQNIQFWLEQFPQAWAETAGMGLAKQVPPQVIQLKASATPVSVRQYPLSKEAQEGIRPHVQRLIQQGILVPVQSPWNTPLLPVRKPGTNDYRPVQDLREVNKRVQDIHPTVPNPYNLLCALPPQRSWYTVLDLKDAFFCLRLHPTSQPLFAFEWRDPGTGRTGQLTWTRLPQGFKNSPTIFDEALHRDLANFRIQHPQVTLLQYVDDLLLAGATKQDCLEGTKALLLELSDLGYRASAKKAQICRREVTYLGYSLRDGQRWLTEARKKTVVQIPAPTTAKQVREFLGTAGFCRLWIPGFATLAAPLYPLTKEKGEFSWAPEHQKAFDAIKKALLSAPALALPDVTKPFTLYVDERKGVARGVLTQTLGPWRRPVAYLSKKLDPVASGWPVCLKAIAAVAILVKDADKLTLGQNITVIAPHALENIVRQPPDRWMTNARMTHYQSLLLTERVTFAPPAALNPATLLPEETDEPVTHDCHQLLIEETGVRKDLTDIPLTGEVLTWFTDGSSYVVEGKRMAGAAVVDGTRTIWASSLPEGTSAQKAELMALTQALRLAEGKSINIYTDSRYAFATAHVHGAIYKQRGLLTSAGREIKNKEEILSLLEALHLPKRLAIIHCPGHQKAKDPISRGNQMADRVAKQAAQGVNLLAGKRTADGSEFEKRTADGSEFESPKKKAKVE

SEQ ID NO: 7281 - protein, 2094 aa, synthetic construct
MPAAKRVKLDGGDKKYSIGLDIGTNSVGWAVITDEYKVPSKKFKVLGNTDRHSIKKNLIGALLFDSGETAEATRLKRTARRRYTRRKNRICYLQEIFSNEMAKVDDSFFHRLEESFLVEEDKKHERHPIFGNIVDEVAYHEKYPTIYHLRKKLVDSTDKADLRLIYLALAHMIKFRGHFLIEGDLNPDNSDVDKLFIQLVQTYNQLFEENPINASGVDAKAILSARLSKSRRLENLIAQLPGEKKNGLFGNLIALSLGLTPNFKSNFDLAEDAKLQLSKDTYDDDLDNLLAQIGDQYADLFLAAKNLSDAILLSDILRVNTEITKAPLSASMIKRYDEHHQDLTLLKALVRQQLPEKYKEIFFDQSKNGYAGYIDGGASQEEFYKFIKPILEKMDGTEELLVKLNREDLLRKQRTFDNGSIPHQIHLGELHAILRRQEDFYPFLKDNREKIEKILTFRIPYYVGPLARGNSRFAWMTRKSEETITPWNFEEVVDKGASAQSFIERMTNFDKNLPNEKVLPKHSLLYEYFTVYNELTKVKYVTEGMRKPAFLSGEQKKAIVDLLFKTNRKVTVKQLKEDYFKKIECFDSVEISGVEDRFNASLGTYHDLLKIIKDKDFLDNEENEDILEDIVLTLTLFEDREMIEERLKTYAHLFDDKVMKQLKRRRYTGWGRLSRKLINGIRDKQSGKTILDFLKSDGFANRNFMQLIHDDSLTFKEDIQKAQVSGQGDSLHEHIANLAGSPAIKKGILQTVKVVDELVKVMGRHKPENIVIEMARENQTTQKGQKNSRERMKRIEEGIKELGSQILKEHPVENTQLQNEKLYLYYLQNGRDMYVDQELDINRLSDYDVDHIVPQSFLKDDSIDNKVLTRSDKARGKSDNVPSEEVVKKMKNYWRQLLNAKLITQRKFDNLTKAERGGLSELDKAGFIKRQLVETRQITKHVAQILDSRMNTKYDENDKLIREVKVITLKSKLVSDFRKDFQFYKVREINNYHHAHDAYLNAVVGTALIKKYPKLESEFVYGDYKVYDVRKMIAKSEQEIGKATAKYFFYSNIMNFFKTEITLANGEIRKRPLIETNGETGEIVWDKGRDFATVRKVLSMPQVNIVKKTEVQTGGFSKESILPKRNSDKLIARKKDWDPKKYGGFDSPTVAYSVLVVAKVEKGKSKKLKSVKELLGITIMERSSFEKNPIDFLEAKGYKEVKKDLIIKLPKYSLFELENGRKRMLASAGELQKGNELALPSKYVNFLYLASHYEKLKGSPEDNEQKQLFVEQHKHYLDEIIEQISEFSKRVILADANLDKVLSAYNKHRDKPIREQAENIIHLFTLTNLGAPAAFKYFDTTIDRKRYTSTKEVLDATLIHQSITGLYETRIDLSQLGGDGGGGGGSSEAAAKGGVLNLEEEYRLHEKPVPSSIDPSWLQLFPTVWAERAGMGLANQVPPVVVELRSGASPVAVRQYPMSKEAREGIRPHIQRFLDLGVLVPCQSPWNTPLLPVKKPGTNDYRPVQDLREINKRVQDIHPTVPNPYNLLSSLPPSHTWYSVLDLKDAFFCLKLHPNSQPLFAFEWRDPEKGNTGQLTWTRLPQGFKNSPTLFNEALHRDLAPFRALNPQVVLLQYVDDLLVAAPTYRDCKEGTQKLLQELSKLGYRVSAKKAQLCQKEVTYLGYLLKEGKRWLTPARKATVMKIPPPTTPRQVREFLGKAGFCRLFIPGFASLAAPLYPLTKPSIPFIWTEEHQKAFDRIKEALLSAPALALPDLTKPFTLYVDERAGVARGVLTQTLGPWRRPVAYLSKKLDPVASGWPTCLKAVAAVALLLKDADKLTLGQNVTVIASHSLESIVRQPPDRWMTNARMTHYQSLLLNERVSFAPPAVLNPATLLPVESEATPVHRCSEILAEETGTRRDLKDQPLPGVPAWYTDGSSFIAEGKRRAGAAIVDGKRTVWASSLPEGTSAQKAELVALTQALRLAEGKDINIYTDSRYAFATAHIHGAIYKQRGWLTSAGKDIKNKEEILALLEAIHLPKRVAIIHCPGHQKGNDPVATGNRRADEAAKQAALSTRVLAETTKPAGKRTADGSEFEKRTADGSEFESPKKKAKVE

SEQ ID NO: 7282 - protein, 2096 aa, synthetic construct
MPAAKRVKLDGGDKKYSIGLDIGTNSVGWAVITDEYKVPSKKFKVLGNTDRHSIKKNLIGALLFDSGETAEATRLKRTARRRYTRRKNRICYLQEIFSNEMAKVDDSFFHRLEESFLVEEDKKHERHPIFGNIVDEVAYHEKYPTIYHLRKKLVDSTDKADLRLIYLALAHMIKFRGHFLIEGDLNPDNSDVDKLFIQLVQTYNQLFEENPINASGVDAKAILSARLSKSRRLENLIAQLPGEKKNGLFGNLIALSLGLTPNFKSNFDLAEDAKLQLSKDTYDDDLDNLLAQIGDQYADLFLAAKNLSDAILLSDILRVNTEITKAPLSASMIKRYDEHHQDLTLLKALVRQQLPEKYKEIFFDQSKNGYAGYIDGGASQEEFYKFIKPILEKMDGTEELLVKLNREDLLRKQRTFDNGSIPHQIHLGELHAILRRQEDFYPFLKDNREKIEKILTFRIPYYVGPLARGNSRFAWMTRKSEETITPWNFEEVVDKGASAQSFIERMTNFDKNLPNEKVLPKHSLLYEYFTVYNELTKVKYVTEGMRKPAFLSGEQKKAIVDLLFKTNRKVTVKQLKEDYFKKIECFDSVEISGVEDRFNASLGTYHDLLKIIKDKDFLDNEENEDILEDIVLTLTLFEDREMIEERLKTYAHLFDDKVMKQLKRRRYTGWGRLSRKLINGIRDKQSGKTILDFLKSDGFANRNFMQLIHDDSLTFKEDIQKAQVSGQGDSLHEHIANLAGSPAIKKGILQTVKVVDELVKVMGRHKPENIVIEMARENQTTQKGQKNSRERMKRIEEGIKELGSQILKEHPVENTQLQNEKLYLYYLQNGRDMYVDQELDINRLSDYDVDHIVPQSFLKDDSIDNKVLTRSDKARGKSDNVPSEEVVKKMKNYWRQLLNAKLITQRKFDNLTKAERGGLSELDKAGFIKRQLVETRQITKHVAQILDSRMNTKYDENDKLIREVKVITLKSKLVSDFRKDFQFYKVREINNYHHAHDAYLNAVVGTALIKKYPKLESEFVYGDYKVYDVRKMIAKSEQEIGKATAKYFFYSNIMNFFKTEITLANGEIRKRPLIETNGETGEIVWDKGRDFATVRKVLSMPQVNIVKKTEVQTGGFSKESILPKRNSDKLIARKKDWDPKKYGGFDSPTVAYSVLVVAKVEKGKSKKLKSVKELLGITIMERSSFEKNPIDFLEAKGYKEVKKDLIIKLPKYSLFELENGRKRMLASAGELQKGNELALPSKYVNFLYLASHYEKLKGSPEDNEQKQLFVEQHKHYLDEIIEQISEFSKRVILADANLDKVLSAYNKHRDKPIREQAENIIHLFTLTNLGAPAAFKYFDTTIDRKRYTSTKEVLDATLIHQSITGLYETRIDLSQLGGDGGGGGGSSEAAAKGGTLNIEDEYRLHETSKEPDVPLGSTWLSDFPQAWAETGGMGLAVRQAPLIIPLKATSTPVSIKQYPMSQEARLGIKPHIQRLLDQGILVPCQSPWNTPLLPVKKPGTNDYRPVQDLREVNKRVEDIHPTVPNPYNLLSGLPPSHQWYTVLDLKDAFFCLRLHPTSQPLFAFEWRDPEMGISGQLTWTRLPQGFKNSPTLFNEALHRDLADFRIQHPDLILLQYVDDLLLAATSEQDCQRGTRALLQTLGNLGYRASAKKAQICQKQVKYLGYLLKEGQRWLTEARKETVMGQPTPKTPRQLREFLGTAGFCRLWIPGFAEMAAPLYPLTKPGTLFNWGPDQQKAYQEIKQALLTAPALGLPDLTKPFELFVDEKQGYAKGVLTQKLGPWRRPVAYLSKKLDPVAAGWPPCLRMVAAIAVLTKDAGKLTMGQPLVILAPHAVEALVKQPPDRWLSNARMTHYQAMLLDTDRVQFGPVVALNPATLLPLPEKEAPHDCLEILAETHGTRPDLTDQPIPDADYTWYTDGSSFLQEGQRRAGAAVTTETEVIWARALPAGTSAQRAELIALTQALKMAEGKKLNVYTDSRYAFATAHVHGEIYRRRGWLTSEGREIKNKNEILALLKALFLPKRLSIIHCPGHQKGNSAEARGNRMADQAAREAAMKAVLETSTLLAGKRTADGSEFEKRTADGSEFESPKKKAKVE

SEQ ID NO: 7283 - protein, 2173 aa, synthetic construct
MPAAKRVKLDGGDKKYSIGLDIGTNSVGWAVITDEYKVPSKKFKVLGNTDRHSIKKNLIGALLFDSGETAEATRLKRTARRRYTRRKNRICYLQEIFSNEMAKVDDSFFHRLEESFLVEEDKKHERHPIFGNIVDEVAYHEKYPTIYHLRKKLVDSTDKADLRLIYLALAHMIKFRGHFLIEGDLNPDNSDVDKLFIQLVQTYNQLFEENPINASGVDAKAILSARLSKSRRLENLIAQLPGEKKNGLFGNLIALSLGLTPNFKSNFDLAEDAKLQLSKDTYDDDLDNLLAQIGDQYADLFLAAKNLSDAILLSDILRVNTEITKAPLSASMIKRYDEHHQDLTLLKALVRQQLPEKYKEIFFDQSKNGYAGYIDGGASQEEFYKFIKPILEKMDGTEELLVKLNREDLLRKQRTFDNGSIPHQIHLGELHAILRRQEDFYPFLKDNREKIEKILTFRIPYYVGPLARGNSRFAWMTRKSEETITPWNFEEVVDKGASAQSFIERMTNFDKNLPNEKVLPKHSLLYEYFTVYNELTKVKYVTEGMRKPAFLSGEQKKAIVDLLFKTNRKVTVKQLKEDYFKKIECFDSVEISGVEDRFNASLGTYHDLLKIIKDKDFLDNEENEDILEDIVLTLTLFEDREMIEERLKTYAHLFDDKVMKQLKRRRYTGWGRLSRKLINGIRDKQSGKTILDFLKSDGFANRNFMQLIHDDSLTFKEDIQKAQVSGQGDSLHEHIANLAGSPAIKKGILQTVKVVDELVKVMGRHKPENIVIEMARENQTTQKGQKNSRERMKRIEEGIKELGSQILKEHPVENTQLQNEKLYLYYLQNGRDMYVDQELDINRLSDYDVDHIVPQSFLKDDSIDNKVLTRSDKARGKSDNVPSEEVVKKMKNYWRQLLNAKLITQRKFDNLTKAERGGLSELDKAGFIKRQLVETRQITKHVAQILDSRMNTKYDENDKLIREVKVITLKSKLVSDFRKDFQFYKVREINNYHHAHDAYLNAVVGTALIKKYPKLESEFVYGDYKVYDVRKMIAKSEQEIGKATAKYFFYSNIMNFFKTEITLANGEIRKRPLIETNGETGEIVWDKGRDFATVRKVLSMPQVNIVKKTEVQTGGFSKESILPKRNSDKLIARKKDWDPKKYGGFDSPTVAYSVLVVAKVEKGKSKKLKSVKELLGITIMERSSFEKNPIDFLEAKGYKEVKKDLIIKLPKYSLFELENGRKRMLASAGELQKGNELALPSKYVNFLYLASHYEKLKGSPEDNEQKQLFVEQHKHYLDEIIEQISEFSKRVILADANLDKVLSAYNKHRDKPIREQAENIIHLFTLTNLGAPAAFKYFDTTIDRKRYTSTKEVLDATLIHQSITGLYETRIDLSQLGGDGGGGGEAAAKGSSGGMDLLKPLTVERKGVKIKGYWNSQADITCVPKDLLQGEEPVRQQNVTTIHGTQEGDVYYVNLKIDGRRINTEVIGTTLDYAIITPGDVPWILKKPLELTIKLDLEEQQGTLLNNSILSKKGKEELKQLFEKYSALWQSWENQVGHRRIRPHKIATGTVKPTPQKQYHINPKAKPDIQIVINDLLKQGVLIQKESTMNTPVYPVPKPNGRWRMVLDYRAVNKVTPLIAVQNQHSYGILGSLFKGRYKTTIDLSNGFWAHPIVPEDYWITAFTWQGKQYCWTVLPQGFLNSPGLFNGDVVDLLQGIPNVEVYVDDVYISHDSEKEHLEYLDILFNRLKEAGYIISLKKSNIANSIVDFLGFQITNEGRGLTDTFKEKLENITAPTTLKQLQSILGKLNFARNFIPDFTELIAPLYALIPKSPKNYVPWQIEHSTTLETLITKLNGAEYLQGRKGDKTLIMKVNASYTTGYIRYYNEGEKKPISYVSIVFSKTELKFTELEKLLTTVHKGLLKALDLSMGQNIHVYSPIVSMQNIQKTPQTAKKALASRWLSWLSYLEDPRIRFFYDPQMPALKDLPAVDTGKDNKKHPSNFQHIFYTDGSAITSPTKEGHLNAGMGIVYFINKDGNLQKQQEWSISLGNHTAQFAEIAAFEFALKKCLPLGGNILVVTDSNYVAKAYNEELDVWASNGFVNNRKKPLKHISKWKSVADLKRLRPDVVVTHEPGHQKLDSSPHAYGNNLADQLATQASFKVHAGKRTADGSEFEKRTADGSEFESPKKKAKVE

SEQ ID NO: 7284 - protein, 2095 aa, synthetic construct
MPAAKRVKLDGGDKKYSIGLDIGTNSVGWAVITDEYKVPSKKFKVLGNTDRHSIKKNLIGALLFDSGETAEATRLKRTARRRYTRRKNRICYLQEIFSNEMAKVDDSFFHRLEESFLVEEDKKHERHPIFGNIVDEVAYHEKYPTIYHLRKKLVDSTDKADLRLIYLALAHMIKFRGHFLIEGDLNPDNSDVDKLFIQLVQTYNQLFEENPINASGVDAKAILSARLSKSRRLENLIAQLPGEKKNGLFGNLIALSLGLTPNFKSNFDLAEDAKLQLSKDTYDDDLDNLLAQIGDQYADLFLAAKNLSDAILLSDILRVNTEITKAPLSASMIKRYDEHHQDLTLLKALVRQQLPEKYKEIFFDQSKNGYAGYIDGGASQEEFYKFIKPILEKMDGTEELLVKLNREDLLRKQRTFDNGSIPHQIHLGELHAILRRQEDFYPFLKDNREKIEKILTFRIPYYVGPLARGNSRFAWMTRKSEETITPWNFEEVVDKGASAQSFIERMTNFDKNLPNEKVLPKHSLLYEYFTVYNELTKVKYVTEGMRKPAFLSGEQKKAIVDLLFKTNRKVTVKQLKEDYFKKIECFDSVEISGVEDRFNASLGTYHDLLKIIKDKDFLDNEENEDILEDIVLTLTLFEDREMIEERLKTYAHLFDDKVMKQLKRRRYTGWGRLSRKLINGIRDKQSGKTILDFLKSDGFANRNFMQLIHDDSLTFKEDIQKAQVSGQGDSLHEHIANLAGSPAIKKGILQTVKVVDELVKVMGRHKPENIVIEMARENQTTQKGQKNSRERMKRIEEGIKELGSQILKEHPVENTQLQNEKLYLYYLQNGRDMYVDQELDINRLSDYDVDHIVPQSFLKDDSIDNKVLTRSDKARGKSDNVPSEEVVKKMKNYWRQLLNAKLITQRKFDNLTKAERGGLSELDKAGFIKRQLVETRQITKHVAQILDSRMNTKYDENDKLIREVKVITLKSKLVSDFRKDFQFYKVREINNYHHAHDAYLNAVVGTALIKKYPKLESEFVYGDYKVYDVRKMIAKSEQEIGKATAKYFFYSNIMNFFKTEITLANGEIRKRPLIETNGETGEIVWDKGRDFATVRKVLSMPQVNIVKKTEVQTGGFSKESILPKRNSDKLIARKKDWDPKKYGGFDSPTVAYSVLVVAKVEKGKSKKLKSVKELLGITIMERSSFEKNPIDFLEAKGYKEVKKDLIIKLPKYSLFELENGRKRMLASAGELQKGNELALPSKYVNFLYLASHYEKLKGSPEDNEQKQLFVEQHKHYLDEIIEQISEFSKRVILADANLDKVLSAYNKHRDKPIREQAENIIHLFTLTNLGAPAAFKYFDTTIDRKRYTSTKEVLDATLIHQSITGLYETRIDLSQLGGDGGGGGEAAAKGSSGGTLQLEEEYRLFEPESTQKQEMDIWLKNFPQAWAETGGMGTAHCQAPVLIQLKATATPISIRQYPMPHEAYQGIKPHIRRMLDQGILKPCQSPWNTPLLPVKKPGTEDYRPVQDLREVNKRVEDIHPTVPNPYNLLSTLPPSHPWYTVLDLKDAFFCLRLHSESQLLFAFEWRDPEIGLSGQLTWTRLPQGFKNSPTLFNEALHSDLADFRVRYPALVLLQYVDDLLLAAATRTECLEGTKALLETLGNKGYRASAKKAQICLQEVTYLGYSLKDGQRWLTKARKEAILSIPVPKNSRQVREFLGKAGYCRLFIPGFAELAAPLYPLTRPGTLFQWGTEQQLAFEDIKKALLSSPALGLPDITKPFELFIDENSGFAKGVLVQKLGPWKRPVAYLSKKLDTVASGWPPCLRMVAAIAILVKDAGKLTLGQPLTILTSHPVEALVRQPPNKWLSNARMTHYQAMLLDAERVHFGPTVSLNPATLLPLPSGGNHHDCLQILAETHGTRPDLTDQPLPDADLTWYTDGSSFIRNGEREAGAAVTTESEVIWAAPLPPGTSAQRAELIALTQALKMAEGKKLTVYTDSRYAFATTHVHGEIYRRRGWLTSEGKEIKNKNEILALLEALFLPKRLSIIHCPGHQKGDSPQAKGNRLADDTAKKAATETHSSLTVLPAGKRTADGSEFEKRTADGSEFESPKKKAKVE

SEQ ID NO: 7285 - protein, 2176 aa, synthetic construct
MPAAKRVKLDGGDKKYSIGLDIGTNSVGWAVITDEYKVPSKKFKVLGNTDRHSIKKNLIGALLFDSGETAEATRLKRTARRRYTRRKNRICYLQEIFSNEMAKVDDSFFHRLEESFLVEEDKKHERHPIFGNIVDEVAYHEKYPTIYHLRKKLVDSTDKADLRLIYLALAHMIKFRGHFLIEGDLNPDNSDVDKLFIQLVQTYNQLFEENPINASGVDAKAILSARLSKSRRLENLIAQLPGEKKNGLFGNLIALSLGLTPNFKSNFDLAEDAKLQLSKDTYDDDLDNLLAQIGDQYADLFLAAKNLSDAILLSDILRVNTEITKAPLSASMIKRYDEHHQDLTLLKALVRQQLPEKYKEIFFDQSKNGYAGYIDGGASQEEFYKFIKPILEKMDGTEELLVKLNREDLLRKQRTFDNGSIPHQIHLGELHAILRRQEDFYPFLKDNREKIEKILTFRIPYYVGPLARGNSRFAWMTRKSEETITPWNFEEVVDKGASAQSFIERMTNFDKNLPNEKVLPKHSLLYEYFTVYNELTKVKYVTEGMRKPAFLSGEQKKAIVDLLFKTNRKVTVKQLKEDYFKKIECFDSVEISGVEDRFNASLGTYHDLLKIIKDKDFLDNEENEDILEDIVLTLTLFEDREMIEERLKTYAHLFDDKVMKQLKRRRYTGWGRLSRKLINGIRDKQSGKTILDFLKSDGFANRNFMQLIHDDSLTFKEDIQKAQVSGQGDSLHEHIANLAGSPAIKKGILQTVKVVDELVKVMGRHKPENIVIEMARENQTTQKGQKNSRERMKRIEEGIKELGSQILKEHPVENTQLQNEKLYLYYLQNGRDMYVDQELDINRLSDYDVDHIVPQSFLKDDSIDNKVLTRSDKARGKSDNVPSEEVVKKMKNYWRQLLNAKLITQRKFDNLTKAERGGLSELDKAGFIKRQLVETRQITKHVAQILDSRMNTKYDENDKLIREVKVITLKSKLVSDFRKDFQFYKVREINNYHHAHDAYLNAVVGTALIKKYPKLESEFVYGDYKVYDVRKMIAKSEQEIGKATAKYFFYSNIMNFFKTEITLANGEIRKRPLIETNGETGEIVWDKGRDFATVRKVLSMPQVNIVKKTEVQTGGFSKESILPKRNSDKLIARKKDWDPKKYGGFDSPTVAYSVLVVAKVEKGKSKKLKSVKELLGITIMERSSFEKNPIDFLEAKGYKEVKKDLIIKLPKYSLFELENGRKRMLASAGELQKGNELALPSKYVNFLYLASHYEKLKGSPEDNEQKQLFVEQHKHYLDEIIEQISEFSKRVILADANLDKVLSAYNKHRDKPIREQAENIIHLFTLTNLGAPAAFKYFDTTIDRKRYTSTKEVLDATLIHQSITGLYETRIDLSQLGGDGGGGGEAAAKGSSGGMNPLQLLQPLPAEIKGTKLLAHWNSGATITCIPESFLEDEQPIKKTLIKTIHGEKQQNVYYVTFKVKGRKVEAEVIASPYEYILLSPTDVPWLTQQPLQLTILVPLQEYQEKILSKTALPEDQKQQLKTLFVKYDNLWQHWENQVGHRKIRPHNIATGDYPPRPQKQYPINPKAKPSIQIVIDDLLKQGVLTPQNSTMNTPVYPVPKPDGRWRMVLDYREVNKTIPLTAAQNQHSAGILATIVRQKYKTTLDLANGFWAHPITPESYWLTAFTWQGKQYCWTRLPQGFLNSPALFTADVVDLLKEIPNVQVYVDDIYLSHDDPKEHVQQLEKVFQILLQAGYVVSLKKSEIGQKTVEFLGFNITKEGRGLTDTFKTKLLNITPPKDLKQLQSILGLLNFARNFIPNFAELVQPLYNLIASAKGKYIEWSEENTKQLNMVIEALNTASNLEERLPEQRLVIKVNTSPSAGYVRYYNETGKKPIMYLNYVFSKAELKFSMLEKLLTTMHKALIKAMDLAMGQEILVYSPIVSMTKIQKTPLPERKALPIRWITWMTYLEDPRIQFHYDKTLPELKHIPDVYTSSQSPVKHPSQYEGVFYTDGSAIKSPDPTKSNNAGMGIVHATYKPEYQVLNQWSIPLGNHTAQMAEIAAVEFACKKALKIPGPVLVITDSFYVAESANKELPYWKSNGFVNNKKKPLKHISKWKSIAECLSMKPDITIQHEKGISLQIPVFILKGNALADKLATQGSYVVNAGKRTADGSEFEKRTADGSEFESPKKKAKVE

SEQ ID NO: 7286 - protein, 2127 aa, synthetic construct
MPAAKRVKLDGGDKKYSIGLDIGTNSVGWAVITDEYKVPSKKFKVLGNTDRHSIKKNLIGALLFDSGETAEATRLKRTARRRYTRRKNRICYLQEIFSNEMAKVDDSFFHRLEESFLVEEDKKHERHPIFGNIVDEVAYHEKYPTIYHLRKKLVDSTDKADLRLIYLALAHMIKFRGHFLIEGDLNPDNSDVDKLFIQLVQTYNQLFEENPINASGVDAKAILSARLSKSRRLENLIAQLPGEKKNGLFGNLIALSLGLTPNFKSNFDLAEDAKLQLSKDTYDDDLDNLLAQIGDQYADLFLAAKNLSDAILLSDILRVNTEITKAPLSASMIKRYDEHHQDLTLLKALVRQQLPEKYKEIFFDQSKNGYAGYIDGGASQEEFYKFIKPILEKMDGTEELLVKLNREDLLRKQRTFDNGSIPHQIHLGELHAILRRQEDFYPFLKDNREKIEKILTFRIPYYVGPLARGNSRFAWMTRKSEETITPWNFEEVVDKGASAQSFIERMTNFDKNLPNEKVLPKHSLLYEYFTVYNELTKVKYVTEGMRKPAFLSGEQKKAIVDLLFKTNRKVTVKQLKEDYFKKIECFDSVEISGVEDRFNASLGTYHDLLKIIKDKDFLDNEENEDILEDIVLTLTLFEDREMIEERLKTYAHLFDDKVMKQLKRRRYTGWGRLSRKLINGIRDKQSGKTILDFLKSDGFANRNFMQLIHDDSLTFKEDIQKAQVSGQGDSLHEHIANLAGSPAIKKGILQTVKVVDELVKVMGRHKPENIVIEMARENQTTQKGQKNSRERMKRIEEGIKELGSQILKEHPVENTQLQNEKLYLYYLQNGRDMYVDQELDINRLSDYDVDHIVPQSFLKDDSIDNKVLTRSDKARGKSDNVPSEEVVKKMKNYWRQLLNAKLITQRKFDNLTKAERGGLSELDKAGFIKRQLVETRQITKHVAQILDSRMNTKYDENDKLIREVKVITLKSKLVSDFRKDFQFYKVREINNYHHAHDAYLNAVVGTALIKKYPKLESEFVYGDYKVYDVRKMIAKSEQEIGKATAKYFFYSNIMNFFKTEITLANGEIRKRPLIETNGETGEIVWDKGRDFATVRKVLSMPQVNIVKKTEVQTGGFSKESILPKRNSDKLIARKKDWDPKKYGGFDSPTVAYSVLVVAKVEKGKSKKLKSVKELLGITIMERSSFEKNPIDFLEAKGYKEVKKDLIIKLPKYSLFELENGRKRMLASAGELQKGNELALPSKYVNFLYLASHYEKLKGSPEDNEQKQLFVEQHKHYLDEIIEQISEFSKRVILADANLDKVLSAYNKHRDKPIREQAENIIHLFTLTNLGAPAAFKYFDTTIDRKRYTSTKEVLDATLIHQSITGLYETRIDLSQLGGDGGGGGEAAAKGSSGGLLGRDLLTKLKAQIQFSTEGPQVTWEDRPAMCLVLNLEEEYRLHEKPVPPSIDPSWLQLFPMVWAEKAGMGLANQVPPVVVELKSDASPVAVRQYPMSKEAREGIRPHIQRFLDLGILVPCQSPWNTPLLPVKKPGTNDYRPVQDLREVNKRVQDIHPTVPNPYNLLSSLPPSHTWYSVLDLKDAFFCLKLHPNSQPLFAFEWRDPEKGNTGQLTWTRLPQGFKNSPTLFNEALHRDLASFRALNPQVVMLQYVDDLLVAAPTYRDCKEGTRRLLQELSKLGYRVSAKKAQLCREEVTYLGYLLKGGKRWLTPARKATVMKIPTPTTPRQVREFLGTAGFCRLWIPGFASLAAPLYPLTRPKVPFTWTEAHQEAFGRIKEALLSAPALALPDLTKPFALYVDEKEGVARGVLTQTLGPWRRPVAYLSKKLDPVASGWPTCLKAIAAVALLLKDADKLTLGQNVLVIAPHNLESIVRQPPDRWMTNARMTHYQSLLLNERVSFAPPAILNPATLLPVESDDTPIHICSEILAEETGTRPDLRDQPLPGVPAWYTDGSSFIMDGRRQAGAAIVDNKRTVWASNLPEGTSAQKAELIALTQALRLAEGKSINIYTDSRYAFATAHVHGAIYKQRGWLTSAGKDIKNKEEILALLEAIHLPKRVAIIHCPGHQRGTDPVATGNRKADEAAKQAAQSTRILTETTKNAGKRTADGSEFEKRTADGSEFESPKKKAKVE

SEQ ID NO: 7287 - protein, 2218 aa, synthetic construct
MPAAKRVKLDGGDKKYSIGLDIGTNSVGWAVITDEYKVPSKKFKVLGNTDRHSIKKNLIGALLFDSGETAEATRLKRTARRRYTRRKNRICYLQEIFSNEMAKVDDSFFHRLEESFLVEEDKKHERHPIFGNIVDEVAYHEKYPTIYHLRKKLVDSTDKADLRLIYLALAHMIKFRGHFLIEGDLNPDNSDVDKLFIQLVQTYNQLFEENPINASGVDAKAILSARLSKSRRLENLIAQLPGEKKNGLFGNLIALSLGLTPNFKSNFDLAEDAKLQLSKDTYDDDLDNLLAQIGDQYADLFLAAKNLSDAILLSDILRVNTEITKAPLSASMIKRYDEHHQDLTLLKALVRQQLPEKYKEIFFDQSKNGYAGYIDGGASQEEFYKFIKPILEKMDGTEELLVKLNREDLLRKQRTFDNGSIPHQIHLGELHAILRRQEDFYPFLKDNREKIEKILTFRIPYYVGPLARGNSRFAWMTRKSEETITPWNFEEVVDKGASAQSFIERMTNFDKNLPNEKVLPKHSLLYEYFTVYNELTKVKYVTEGMRKPAFLSGEQKKAIVDLLFKTNRKVTVKQLKEDYFKKIECFDSVEISGVEDRFNASLGTYHDLLKIIKDKDFLDNEENEDILEDIVLTLTLFEDREMIEERLKTYAHLFDDKVMKQLKRRRYTGWGRLSRKLINGIRDKQSGKTILDFLKSDGFANRNFMQLIHDDSLTFKEDIQKAQVSGQGDSLHEHIANLAGSPAIKKGILQTVKVVDELVKVMGRHKPENIVIEMARENQTTQKGQKNSRERMKRIEEGIKELGSQILKEHPVENTQLQNEKLYLYYLQNGRDMYVDQELDINRLSDYDVDHIVPQSFLKDDSIDNKVLTRSDKARGKSDNVPSEEVVKKMKNYWRQLLNAKLITQRKFDNLTKAERGGLSELDKAGFIKRQLVETRQITKHVAQILDSRMNTKYDENDKLIREVKVITLKSKLVSDFRKDFQFYKVREINNYHHAHDAYLNAVVGTALIKKYPKLESEFVYGDYKVYDVRKMIAKSEQEIGKATAKYFFYSNIMNFFKTEITLANGEIRKRPLIETNGETGEIVWDKGRDFATVRKVLSMPQVNIVKKTEVQTGGFSKESILPKRNSDKLIARKKDWDPKKYGGFDSPTVAYSVLVVAKVEKGKSKKLKSVKELLGITIMERSSFEKNPIDFLEAKGYKEVKKDLIIKLPKYSLFELENGRKRMLASAGELQKGNELALPSKYVNFLYLASHYEKLKGSPEDNEQKQLFVEQHKHYLDEIIEQISEFSKRVILADANLDKVLSAYNKHRDKPIREQAENIIHLFTLTNLGAPAAFKYFDTTIDRKRYTSTKEVLDATLIHQSITGLYETRIDLSQLGGDGGGGGEAAAKGSSGGTLGDQGSRGSDPLPEPRVTLTVEGIPTEFLVNTGAEHSVLTKPMGKMGSKRTVVAGATGSKVYPWTTKRLLKIGQKQVTHSFLVIPECPAPLLGRDLLTKLKAQIQFSTEGPQVTWEDRPAMCLVLNLEEEYRLHEKPVPPSIDPSWLQLFPMVWAEKAGMGLANQVPPVVVELKSDASPVAVRQYPMSKEAREGIRPHIQRFLDLGILVPCQSPWNTPLLPVKKPGTNDYRPVQDLREVNKRVQDIHPTVPNPYNLLSSLPPSHTWYSVLDLKDAFFCLKLHPNSQPLFAFEWRDPEKGNTGQLTWTRLPQGFKNSPTLFNEALHRDLASFRALNPQVVMLQYVDDLLVAAPTYRDCKEGTRRLLQELSKLGYRVSAKKAQLCREEVTYLGYLLKGGKRWLTPARKATVMKIPTPTTPRQVREFLGTAGFCRLWIPGFASLAAPLYPLTRPKVPFTWTEAHQEAFGRIKEALLSAPALALPDLTKPFALYVDEKEGVARGVLTQTLGPWRRPVAYLSKKLDPVASGWPTCLKAIAAVALLLKDADKLTLGQNVLVIAPHNLESIVRQPPDRWMTNARMTHYQSLLLNERVSFAPPAILNPATLLPVESDDTPIHICSEILAEETGTRPDLRDQPLPGVPAWYTDGSSFIMDGRRQAGAAIVDNKRTVWASNLPEGTSAQKAELIALTQALRLAEGKSINIYTDSRYAFATAHVHGAIYKQRGWLTSAGKDIKNKEEILALLEAIHLPKRVAIIHCPGHQRGTDPVATGNRKADEAAKQAAQSTRILTETTKNAGKRTADGSEFEKRTADGSEFESPKKKAKVE

SEQ ID NO: 7288 - protein, 2096 aa, synthetic construct
MPAAKRVKLDGGDKKYSIGLDIGTNSVGWAVITDEYKVPSKKFKVLGNTDRHSIKKNLIGALLFDSGETAEATRLKRTARRRYTRRKNRICYLQEIFSNEMAKVDDSFFHRLEESFLVEEDKKHERHPIFGNIVDEVAYHEKYPTIYHLRKKLVDSTDKADLRLIYLALAHMIKFRGHFLIEGDLNPDNSDVDKLFIQLVQTYNQLFEENPINASGVDAKAILSARLSKSRRLENLIAQLPGEKKNGLFGNLIALSLGLTPNFKSNFDLAEDAKLQLSKDTYDDDLDNLLAQIGDQYADLFLAAKNLSDAILLSDILRVNTEITKAPLSASMIKRYDEHHQDLTLLKALVRQQLPEKYKEIFFDQSKNGYAGYIDGGASQEEFYKFIKPILEKMDGTEELLVKLNREDLLRKQRTFDNGSIPHQIHLGELHAILRRQEDFYPFLKDNREKIEKILTFRIPYYVGPLARGNSRFAWMTRKSEETITPWNFEEVVDKGASAQSFIERMTNFDKNLPNEKVLPKHSLLYEYFTVYNELTKVKYVTEGMRKPAFLSGEQKKAIVDLLFKTNRKVTVKQLKEDYFKKIECFDSVEISGVEDRFNASLGTYHDLLKIIKDKDFLDNEENEDILEDIVLTLTLFEDREMIEERLKTYAHLFDDKVMKQLKRRRYTGWGRLSRKLINGIRDKQSGKTILDFLKSDGFANRNFMQLIHDDSLTFKEDIQKAQVSGQGDSLHEHIANLAGSPAIKKGILQTVKVVDELVKVMGRHKPENIVIEMARENQTTQKGQKNSRERMKRIEEGIKELGSQILKEHPVENTQLQNEKLYLYYLQNGRDMYVDQELDINRLSDYDVDHIVPQSFLKDDSIDNKVLTRSDKARGKSDNVPSEEVVKKMKNYWRQLLNAKLITQRKFDNLTKAERGGLSELDKAGFIKRQLVETRQITKHVAQILDSRMNTKYDENDKLIREVKVITLKSKLVSDFRKDFQFYKVREINNYHHAHDAYLNAVVGTALIKKYPKLESEFVYGDYKVYDVRKMIAKSEQEIGKATAKYFFYSNIMNFFKTEITLANGEIRKRPLIETNGETGEIVWDKGRDFATVRKVLSMPQVNIVKKTEVQTGGFSKESILPKRNSDKLIARKKDWDPKKYGGFDSPTVAYSVLVVAKVEKGKSKKLKSVKELLGITIMERSSFEKNPIDFLEAKGYKEVKKDLIIKLPKYSLFELENGRKRMLASAGELQKGNELALPSKYVNFLYLASHYEKLKGSPEDNEQKQLFVEQHKHYLDEIIEQISEFSKRVILADANLDKVLSAYNKHRDKPIREQAENIIHLFTLTNLGAPAAFKYFDTTIDRKRYTSTKEVLDATLIHQSITGLYETRIDLSQLGGDGGGGGEAAAKGSSGGTLNLEDEYRLYETSAEPEVSPGSTWLSDFPQAWAETGGMGLAVRQAPLIIPLKATSTPVSIKQYPMSQEAKLGIKPHIQRLLDQGILVPCQSPWNTPLLPVKKPGTNDYRPVQDLREVNKRVEDIHPTVPNPYNLLSGLPPSHRWYTVLDLKDAFFCLRLHPTSQPLFAFEWRDPGMGISGQLTWTRLPQGFKNSPTLFNEALHRDLADFRIQHPDLILLQYVDDILLAATSELDCQQGTRALLLTLGNLGYRASAKKAQLCQKQVKYLGYLLKEGQRWLTEARKETVMGQPTPKTPRQLREFLGTAGFCRLWIPGFAEMAAPLYPLTKPGTLFNWGPDQQKAYQEIKQALLTAPALGLPDLTKPFELFVDEKQGYAKGVLTQKLGPWRRPVAYLSKKLDPVAAGWPPCLRMVAAIAVLRKDAGKLTMGQPLVILAPHAVEALVKQPPDRWLSNARMTHYQAMLLDTDRVQFGPVVALNPATLLPLPEEGAPHDCLEILAETHGTRPDLTDQPIPDADHTWYTDGSSFLQEGQRKAGAAVTTETEVIWARALPAGTSAQRAELIALTQALKMAEGKRLNVYTDSRYAFATAHIHGEIYRRRGWLTSEGREIKNKSEILALLKALFLPKRLSIIHCLGHQKGDSAEARGNRLADQAAREAAIKTPPDTSTLLAGKRTADGSEFEKRTADGSEFESPKKKAKVE

SEQ ID NO: 7289 - protein, 2096 aa, synthetic construct
MPAAKRVKLDGGDKKYSIGLDIGTNSVGWAVITDEYKVPSKKFKVLGNTDRHSIKKNLIGALLFDSGETAEATRLKRTARRRYTRRKNRICYLQEIFSNEMAKVDDSFFHRLEESFLVEEDKKHERHPIFGNIVDEVAYHEKYPTIYHLRKKLVDSTDKADLRLIYLALAHMIKFRGHFLIEGDLNPDNSDVDKLFIQLVQTYNQLFEENPINASGVDAKAILSARLSKSRRLENLIAQLPGEKKNGLFGNLIALSLGLTPNFKSNFDLAEDAKLQLSKDTYDDDLDNLLAQIGDQYADLFLAAKNLSDAILLSDILRVNTEITKAPLSASMIKRYDEHHQDLTLLKALVRQQLPEKYKEIFFDQSKNGYAGYIDGGASQEEFYKFIKPILEKMDGTEELLVKLNREDLLRKQRTFDNGSIPHQIHLGELHAILRRQEDFYPFLKDNREKIEKILTFRIPYYVGPLARGNSRFAWMTRKSEETITPWNFEEVVDKGASAQSFIERMTNFDKNLPNEKVLPKHSLLYEYFTVYNELTKVKYVTEGMRKPAFLSGEQKKAIVDLLFKTNRKVTVKQLKEDYFKKIECFDSVEISGVEDRFNASLGTYHDLLKIIKDKDFLDNEENEDILEDIVLTLTLFEDREMIEERLKTYAHLFDDKVMKQLKRRRYTGWGRLSRKLINGIRDKQSGKTILDFLKSDGFANRNFMQLIHDDSLTFKEDIQKAQVSGQGDSLHEHIANLAGSPAIKKGILQTVKVVDELVKVMGRHKPENIVIEMARENQTTQKGQKNSRERMKRIEEGIKELGSQILKEHPVENTQLQNEKLYLYYLQNGRDMYVDQELDINRLSDYDVDHIVPQSFLKDDSIDNKVLTRSDKARGKSDNVPSEEVVKKMKNYWRQLLNAKLITQRKFDNLTKAERGGLSELDKAGFIKRQLVETRQITKHVAQILDSRMNTKYDENDKLIREVKVITLKSKLVSDFRKDFQFYKVREINNYHHAHDAYLNAVVGTALIKKYPKLESEFVYGDYKVYDVRKMIAKSEQEIGKATAKYFFYSNIMNFFKTEITLANGEIRKRPLIETNGETGEIVWDKGRDFATVRKVLSMPQVNIVKKTEVQTGGFSKESILPKRNSDKLIARKKDWDPKKYGGFDSPTVAYSVLVVAKVEKGKSKKLKSVKELLGITIMERSSFEKNPIDFLEAKGYKEVKKDLIIKLPKYSLFELENGRKRMLASAGELQKGNELALPSKYVNFLYLASHYEKLKGSPEDNEQKQLFVEQHKHYLDEIIEQISEFSKRVILADANLDKVLSAYNKHRDKPIREQAENIIHLFTLTNLGAPAAFKYFDTTIDRKRYTSTKEVLDATLIHQSITGLYETRIDLSQLGGDGGGGGEAAAKGSSGGTLGIEDEYRLHETSTEPDVSLGSTWLSDFPQAWAETGGMGLAVRQAPLIIPLKATSTPVSIQQYPMSHEARLGIKPHIQRLLDQGILVPCQSPWNTPLLPVKKPGTNDYRPVQDLREVNKRVEDIHPTVPNPYNLLSGLPPSHQWYTVLDLKDAFFCLRLHPTSQPLFAFEWRDPGMGISGQLTWTRLPQGFKNSPTLFDEALHRDLADFRIQHPDLILLQYVDDILLAATSELDCQQGTRALLQTLGDLGYRASAKKAQICQKQVKYLGYLLREGQRWLTEARKETVMGQPVPKTPRQLREFLGTAGFCRLWIPGFAEMAAPLYPLTKTGTLFSWGPDQQKAYQEIKQALLTAPALGLPDLTKPFELFVDEKQGYAKGVLTQKLGPWRRPVAYLSKKLDPVAAGWPPCLRMVAAIAVLTKDAGKLTMGQPLVILAPHAVEALVKQPPDRWLSNARMTHYQAMLLDTDRVQFGPVVALNPATLLPLPEEGAPHDCLEILAETHGTRPDLTDQPIPDADHTWYTDGSSFLQEGQRKAGAAVTTETEVIWAGALPAGTSAQRAELIALTQALKMAEGKRLNVYTDSRYAFATAHIHGEIYRRRGLLTSEGREIKNKSEILALLKALFLPKRLSIIHCLGHQKGDSAEARGNRLADQAAREAAIKTPPDTSTLLAGKRTADGSEFEKRTADGSEFESPKKKAKVE

SEQ ID NO: 7290 - protein, 2096 aa, synthetic construct
MPAAKRVKLDGGDKKYSIGLDIGTNSVGWAVITDEYKVPSKKFKVLGNTDRHSIKKNLIGALLFDSGETAEATRLKRTARRRYTRRKNRICYLQEIFSNEMAKVDDSFFHRLEESFLVEEDKKHERHPIFGNIVDEVAYHEKYPTIYHLRKKLVDSTDKADLRLIYLALAHMIKFRGHFLIEGDLNPDNSDVDKLFIQLVQTYNQLFEENPINASGVDAKAILSARLSKSRRLENLIAQLPGEKKNGLFGNLIALSLGLTPNFKSNFDLAEDAKLQLSKDTYDDDLDNLLAQIGDQYADLFLAAKNLSDAILLSDILRVNTEITKAPLSASMIKRYDEHHQDLTLLKALVRQQLPEKYKEIFFDQSKNGYAGYIDGGASQEEFYKFIKPILEKMDGTEELLVKLNREDLLRKQRTFDNGSIPHQIHLGELHAILRRQEDFYPFLKDNREKIEKILTFRIPYYVGPLARGNSRFAWMTRKSEETITPWNFEEVVDKGASAQSFIERMTNFDKNLPNEKVLPKHSLLYEYFTVYNELTKVKYVTEGMRKPAFLSGEQKKAIVDLLFKTNRKVTVKQLKEDYFKKIECFDSVEISGVEDRFNASLGTYHDLLKIIKDKDFLDNEENEDILEDIVLTLTLFEDREMIEERLKTYAHLFDDKVMKQLKRRRYTGWGRLSRKLINGIRDKQSGKTILDFLKSDGFANRNFMQLIHDDSLTFKEDIQKAQVSGQGDSLHEHIANLAGSPAIKKGILQTVKVVDELVKVMGRHKPENIVIEMARENQTTQKGQKNSRERMKRIEEGIKELGSQILKEHPVENTQLQNEKLYLYYLQNGRDMYVDQELDINRLSDYDVDHIVPQSFLKDDSIDNKVLTRSDKARGKSDNVPSEEVVKKMKNYWRQLLNAKLITQRKFDNLTKAERGGLSELDKAGFIKRQLVETRQITKHVAQILDSRMNTKYDENDKLIREVKVITLKSKLVSDFRKDFQFYKVREINNYHHAHDAYLNAVVGTALIKKYPKLESEFVYGDYKVYDVRKMIAKSEQEIGKATAKYFFYSNIMNFFKTEITLANGEIRKRPLIETNGETGEIVWDKGRDFATVRKVLSMPQVNIVKKTEVQTGGFSKESILPKRNSDKLIARKKDWDPKKYGGFDSPTVAYSVLVVAKVEKGKSKKLKSVKELLGITIMERSSFEKNPIDFLEAKGYKEVKKDLIIKLPKYSLFELENGRKRMLASAGELQKGNELALPSKYVNFLYLASHYEKLKGSPEDNEQKQLFVEQHKHYLDEIIEQISEFSKRVILADANLDKVLSAYNKHRDKPIREQAENIIHLFTLTNLGAPAAFKYFDTTIDRKRYTSTKEVLDATLIHQSITGLYETRIDLSQLGGDGGGGGEAAAKGSSGGTLGIEDEYRLHETSTEPDVSLGSTWLSDFPQAWAETGGMGLAVRQAPLIIPLKATSTPVSIQQYPMSHEARLGIKPHIQRLLDQGILVPCQSPWNTPLLPVKKPGTNDYRPVQDLREVNKRVEDIHPTVPNPYNLLSGLPPSHQWYTVLDLKDAFFCLRLHPTSQPLFAFEWRDPGMGISGQLTWTRLPQGFKNSPTLFNEALHRDLADFRIQHPDLILLQYVDDILLAATSELDCQQGTRALLQTLGDLGYRASAKKAQICQKQVKYLGYLLREGQRWLTEARKETVMGQPVPKTPRQLREFLGTAGFCRLWIPGFAEMAAPLYPLTKPGTLFSWGPDQQKAYQEIKQALLTAPALGLPDLTKPFELFVDEKQGYAKGVLTQKLGPWRRPVAYLSKKLDPVAAGWPPCLRMVAAIAVLTKDAGKLTMGQPLVILAPHAVEALVKQPPDRWLSNARMTHYQAMLLDTDRVQFGPVVALNPATLLPLPEEGAPHDCLEILAETHGTRPDLTDQPIPDADHTWYTDGSSFLQEGQRKAGAAVTTETEVIWAGALPAGTSAQRAELIALTQALKMAEGKRLNVYTDSRYAFATAHIHGEIYRRRGWLTSEGREIKNKSEILALLKALFLPKRLSIIHCLGHQKGDSAEARGNRLADQAAREAAIKTPPDTSTLLAGKRTADGSEFEKRTADGSEFESPKKKAKVE

SEQ ID NO: 7291 - protein, 2096 aa, synthetic construct
MPAAKRVKLDGGDKKYSIGLDIGTNSVGWAVITDEYKVPSKKFKVLGNTDRHSIKKNLIGALLFDSGETAEATRLKRTARRRYTRRKNRICYLQEIFSNEMAKVDDSFFHRLEESFLVEEDKKHERHPIFGNIVDEVAYHEKYPTIYHLRKKLVDSTDKADLRLIYLALAHMIKFRGHFLIEGDLNPDNSDVDKLFIQLVQTYNQLFEENPINASGVDAKAILSARLSKSRRLENLIAQLPGEKKNGLFGNLIALSLGLTPNFKSNFDLAEDAKLQLSKDTYDDDLDNLLAQIGDQYADLFLAAKNLSDAILLSDILRVNTEITKAPLSASMIKRYDEHHQDLTLLKALVRQQLPEKYKEIFFDQSKNGYAGYIDGGASQEEFYKFIKPILEKMDGTEELLVKLNREDLLRKQRTFDNGSIPHQIHLGELHAILRRQEDFYPFLKDNREKIEKILTFRIPYYVGPLARGNSRFAWMTRKSEETITPWNFEEVVDKGASAQSFIERMTNFDKNLPNEKVLPKHSLLYEYFTVYNELTKVKYVTEGMRKPAFLSGEQKKAIVDLLFKTNRKVTVKQLKEDYFKKIECFDSVEISGVEDRFNASLGTYHDLLKIIKDKDFLDNEENEDILEDIVLTLTLFEDREMIEERLKTYAHLFDDKVMKQLKRRRYTGWGRLSRKLINGIRDKQSGKTILDFLKSDGFANRNFMQLIHDDSLTFKEDIQKAQVSGQGDSLHEHIANLAGSPAIKKGILQTVKVVDELVKVMGRHKPENIVIEMARENQTTQKGQKNSRERMKRIEEGIKELGSQILKEHPVENTQLQNEKLYLYYLQNGRDMYVDQELDINRLSDYDVDHIVPQSFLKDDSIDNKVLTRSDKARGKSDNVPSEEVVKKMKNYWRQLLNAKLITQRKFDNLTKAERGGLSELDKAGFIKRQLVETRQITKHVAQILDSRMNTKYDENDKLIREVKVITLKSKLVSDFRKDFQFYKVREINNYHHAHDAYLNAVVGTALIKKYPKLESEFVYGDYKVYDVRKMIAKSEQEIGKATAKYFFYSNIMNFFKTEITLANGEIRKRPLIETNGETGEIVWDKGRDFATVRKVLSMPQVNIVKKTEVQTGGFSKESILPKRNSDKLIARKKDWDPKKYGGFDSPTVAYSVLVVAKVEKGKSKKLKSVKELLGITIMERSSFEKNPIDFLEAKGYKEVKKDLIIKLPKYSLFELENGRKRMLASAGELQKGNELALPSKYVNFLYLASHYEKLKGSPEDNEQKQLFVEQHKHYLDEIIEQISEFSKRVILADANLDKVLSAYNKHRDKPIREQAENIIHLFTLTNLGAPAAFKYFDTTIDRKRYTSTKEVLDATLIHQSITGLYETRIDLSQLGGDGGGGGEAAAKGSSGGTLNIEDEYRLHETSKEPDVSLGSTWLSDFPQAWAETGGMGLAVRQAPLIIPLKATSTPVSIKQYPMSQEARLGIKPHIQRLLDQGILVPCQSPWNTPLLPVKKPGTNDYRPVQDLREVNKRVEDIHPTVPNPYNLLSGLPPSHQWYTVLDLKDAFFCLRLHPTSQPLFAFEWRDPEMGISGQLTWTRLPQGFKNSPTLFNEALHRDLAGFRIQHPDLILLQYVDDLLLAATSELDCQQGTRALLQTLGDLGYRASAKKAQICQKQVKYLGYLLKEGQRWLTEARKETVMGQPIPKTPRQLREFLGTAGFCRLWIPGFAEMAAPLYPLTKPGTLFNWGPDQQKAFQEIKQALLTAPALGLPDLTKPFELFVDEKQGYAKGVLTQKLGPWRRPVAYLSKKLDPVAAGWPPCLRMVAAIAVLTKDAGKLTMGQPLVILAPHAVEALVKQPPDRWLSNARMTHYQALLLDTDRVQFGPVVALNPATLLPLPEEGLQHDCLDILAEAHGTRSDLMDQPLPDADHTWYTDGSSFLQEGQRKAGAAVTTETEVIWARALPAGTSAQRAELIALTQALKMAEGKKLNVYTDSRYAFATAHIHGEIYRRRGWLTSEGKEIKNKDEILALLKALFLPKRLSIIHCPGHQKGNSAEARGNRMADQAAREVATRETPETSTLLAGKRTADGSEFEKRTADGSEFESPKKKAKVE

SEQ ID NO: 7292 - protein, 2096 aa, synthetic construct
MPAAKRVKLDGGDKKYSIGLDIGTNSVGWAVITDEYKVPSKKFKVLGNTDRHSIKKNLIGALLFDSGETAEATRLKRTARRRYTRRKNRICYLQEIFSNEMAKVDDSFFHRLEESFLVEEDKKHERHPIFGNIVDEVAYHEKYPTIYHLRKKLVDSTDKADLRLIYLALAHMIKFRGHFLIEGDLNPDNSDVDKLFIQLVQTYNQLFEENPINASGVDAKAILSARLSKSRRLENLIAQLPGEKKNGLFGNLIALSLGLTPNFKSNFDLAEDAKLQLSKDTYDDDLDNLLAQIGDQYADLFLAAKNLSDAILLSDILRVNTEITKAPLSASMIKRYDEHHQDLTLLKALVRQQLPEKYKEIFFDQSKNGYAGYIDGGASQEEFYKFIKPILEKMDGTEELLVKLNREDLLRKQRTFDNGSIPHQIHLGELHAILRRQEDFYPFLKDNREKIEKILTFRIPYYVGPLARGNSRFAWMTRKSEETITPWNFEEVVDKGASAQSFIERMTNFDKNLPNEKVLPKHSLLYEYFTVYNELTKVKYVTEGMRKPAFLSGEQKKAIVDLLFKTNRKVTVKQLKEDYFKKIECFDSVEISGVEDRFNASLGTYHDLLKIIKDKDFLDNEENEDILEDIVLTLTLFEDREMIEERLKTYAHLFDDKVMKQLKRRRYTGWGRLSRKLINGIRDKQSGKTILDFLKSDGFANRNFMQLIHDDSLTFKEDIQKAQVSGQGDSLHEHIANLAGSPAIKKGILQTVKVVDELVKVMGRHKPENIVIEMARENQTTQKGQKNSRERMKRIEEGIKELGSQILKEHPVENTQLQNEKLYLYYLQNGRDMYVDQELDINRLSDYDVDHIVPQSFLKDDSIDNKVLTRSDKARGKSDNVPSEEVVKKMKNYWRQLLNAKLITQRKFDNLTKAERGGLSELDKAGFIKRQLVETRQITKHVAQILDSRMNTKYDENDKLIREVKVITLKSKLVSDFRKDFQFYKVREINNYHHAHDAYLNAVVGTALIKKYPKLESEFVYGDYKVYDVRKMIAKSEQEIGKATAKYFFYSNIMNFFKTEITLANGEIRKRPLIETNGETGEIVWDKGRDFATVRKVLSMPQVNIVKKTEVQTGGFSKESILPKRNSDKLIARKKDWDPKKYGGFDSPTVAYSVLVVAKVEKGKSKKLKSVKELLGITIMERSSFEKNPIDFLEAKGYKEVKKDLIIKLPKYSLFELENGRKRMLASAGELQKGNELALPSKYVNFLYLASHYEKLKGSPEDNEQKQLFVEQHKHYLDEIIEQISEFSKRVILADANLDKVLSAYNKHRDKPIREQAENIIHLFTLTNLGAPAAFKYFDTTIDRKRYTSTKEVLDATLIHQSITGLYETRIDLSQLGGDGGGGGEAAAKGSSGGTLNIEDEYRLHETSKGPDVPLGSTWLSDFPQAWAETGGMGLAVRQAPLIIPLKATSTPVSIKQYPMSQEARLGIKPHIQRLLDQGILVPCQSPWNTPLLPVKKPGTNDYRPVQDLREVNKRVEDIHPTVPNPYNLLSGLPPSHQWYTVLDLKDAFFCLRLHPTSQSLFAFEWRDPEMGISGQLTWTRLPQGFKNSPTLFNEALHRDLADFRIQHPDLILLQYVDDLLLAATSELDCQQGTRALLQTLGDLGYRASAKKAQICQKQVKYLGYLLKEGQRWLTEARKETVMGQPTPKTPRQLREFLGTAGFCRLWIPGFAEMAAPLYPLTKPGTLFEWGPDQQKAYQEIKQALLTAPALGLPDLTKPFELFVDEKQGYAKGVLTQKLGPWRRPVAYLSKKLDPVAAGWPPCLRMVAAIAVLTKDAGKLTMGQPLVILAPHAVEALVKQPPDRWLSNARMTHYQALLLDTDRVQFGPIVALNPATLLPLPEEGLQHDCLDILAEAHGTRPDLTDQPLPDADHTWYTDGSSFLQEGQRKAGAAVTTETEVVWAKALPAGTSAQRAELIALTQALKMAEGKKLNVYTDSRYAFATAHIHGEIYRRRGWLTSEGKEIKNKDEILALLKALFLPKRLSIIHCPGHQKGNRAEARGNRMADQAAREVATRETPETSTLLAGKRTADGSEFEKRTADGSEFESPKKKAKVE

SEQ ID NO: 7293 - protein, 2096 aa, synthetic construct; identical to SEQ ID NO: 4530

SEQ ID NO: 7294 - protein, 2096 aa, synthetic construct
MPAAKRVKLDGGDKKYSIGLDIGTNSVGWAVITDEYKVPSKKFKVLGNTDRHSIKKNLIGALLFDSGETAEATRLKRTARRRYTRRKNRICYLQEIFSNEMAKVDDSFFHRLEESFLVEEDKKHERHPIFGNIVDEVAYHEKYPTIYHLRKKLVDSTDKADLRLIYLALAHMIKFRGHFLIEGDLNPDNSDVDKLFIQLVQTYNQLFEENPINASGVDAKAILSARLSKSRRLENLIAQLPGEKKNGLFGNLIALSLGLTPNFKSNFDLAEDAKLQLSKDTYDDDLDNLLAQIGDQYADLFLAAKNLSDAILLSDILRVNTEITKAPLSASMIKRYDEHHQDLTLLKALVRQQLPEKYKEIFFDQSKNGYAGYIDGGASQEEFYKFIKPILEKMDGTEELLVKLNREDLLRKQRTFDNGSIPHQIHLGELHAILRRQEDFYPFLKDNREKIEKILTFRIPYYVGPLARGNSRFAWMTRKSEETITPWNFEEVVDKGASAQSFIERMTNFDKNLPNEKVLPKHSLLYEYFTVYNELTKVKYVTEGMRKPAFLSGEQKKAIVDLLFKTNRKVTVKQLKEDYFKKIECFDSVEISGVEDRFNASLGTYHDLLKIIKDKDFLDNEENEDILEDIVLTLTLFEDREMIEERLKTYAHLFDDKVMKQLKRRRYTGWGRLSRKLINGIRDKQSGKTILDFLKSDGFANRNFMQLIHDDSLTFKEDIQKAQVSGQGDSLHEHIANLAGSPAIKKGILQTVKVVDELVKVMGRHKPENIVIEMARENQTTQKGQKNSRERMKRIEEGIKELGSQILKEHPVENTQLQNEKLYLYYLQNGRDMYVDQELDINRLSDYDVDHIVPQSFLKDDSIDNKVLTRSDKARGKSDNVPSEEVVKKMKNYWRQLLNAKLITQRKFDNLTKAERGGLSELDKAGFIKRQLVETRQITKHVAQILDSRMNTKYDENDKLIREVKVITLKSKLVSDFRKDFQFYKVREINNYHHAHDAYLNAVVGTALIKKYPKLESEFVYGDYKVYDVRKMIAKSEQEIGKATAKYFFYSNIMNFFKTEITLANGEIRKRPLIETNGETGEIVWDKGRDFATVRKVLSMPQVNIVKKTEVQTGGFSKESILPKRNSDKLIARKKDWDPKKYGGFDSPTVAYSVLVVAKVEKGKSKKLKSVKELLGITIMERSSFEKNPIDFLEAKGYKEVKKDLIIKLPKYSLFELENGRKRMLASAGELQKGNELALPSKYVNFLYLASHYEKLKGSPEDNEQKQLFVEQHKHYLDEIIEQISEFSKRVILADANLDKVLSAYNKHRDKPIREQAENIIHLFTLTNLGAPAAFKYFDTTIDRKRYTSTKEVLDATLIHQSITGLYETRIDLSQLGGDGGGGGEAAAKGSSGGTLNIEDEHRLHETSKEPDVSLGSTWLSDFPQAWAETGGMGLAVRQAPLIIPLKATSTPVSIKQYPMSQEARLGIKPHIQRLLDQGILVPCQSPWNTPLLPVKKPGTNDYRPVQDLREVNKRVEDIHPTVPNPYNLLSGLPPSHQWYTVLDLKDAFFCLRLHPTSQPLFAFEWRDPEMGISGQLTWTRLPQGFKNSPTLFDEALHRDLADFRIQHPDLILLQYVDDLLLAATSELDCQQGTRALLQTLGNLGYRASAKKAQICQKQVKYLGYLLKEGQRWLTEARKETVMGQPTPKTPRQLREFLGTAGFCRLWIPGFAEMAAPLYPLTKTGTLFNWGPDQQKAYQEIKQALLTAPALGLPDLTKPFELFVDEKQGYAKGVLTQKLGPWRRPVAYLSKKLDPVAAGWPPCLRMVAAIAVLTKDAGKLTMGQPLVILAPHAVEALVKQPPDRWLSNARMTHYQALLLDTDRVQFGPVVALNPATLLPLPEEGLQHNCLDILAEAHGTRPDLTDQPLPDADHTWYTDGSSLLQEGQRKAGAAVTTETEVIWAKALPAGTSAQRAELIALTQALKMAEGKKLNVYTDSRYAFATAHIHGEIYRRRGLLTSEGKEIKNKDEILALLKALFLPKRLSIIHCPGHQKGHSAEARGNRMADQAARKAAITETPDTSTLLAGKRTADGSEFEKRTADGSEFESPKKKAKVE

SEQ ID NO: 7295 - protein, 2096 aa, synthetic construct; identical to SEQ ID NO: 4530

SEQ ID NO: 7296 - protein, 2090 aa, synthetic construct
MPAAKRVKLDGGDKKYSIGLDIGTNSVGWAVITDEYKVPSKKFKVLGNTDRHSIKKNLIGALLFDSGETAEATRLKRTARRRYTRRKNRICYLQEIFSNEMAKVDDSFFHRLEESFLVEEDKKHERHPIFGNIVDEVAYHEKYPTIYHLRKKLVDSTDKADLRLIYLALAHMIKFRGHFLIEGDLNPDNSDVDKLFIQLVQTYNQLFEENPINASGVDAKAILSARLSKSRRLENLIAQLPGEKKNGLFGNLIALSLGLTPNFKSNFDLAEDAKLQLSKDTYDDDLDNLLAQIGDQYADLFLAAKNLSDAILLSDILRVNTEITKAPLSASMIKRYDEHHQDLTLLKALVRQQLPEKYKEIFFDQSKNGYAGYIDGGASQEEFYKFIKPILEKMDGTEELLVKLNREDLLRKQRTFDNGSIPHQIHLGELHAILRRQEDFYPFLKDNREKIEKILTFRIPYYVGPLARGNSRFAWMTRKSEETITPWNFEEVVDKGASAQSFIERMTNFDKNLPNEKVLPKHSLLYEYFTVYNELTKVKYVTEGMRKPAFLSGEQKKAIVDLLFKTNRKVTVKQLKEDYFKKIECFDSVEISGVEDRFNASLGTYHDLLKIIKDKDFLDNEENEDILEDIVLTLTLFEDREMIEERLKTYAHLFDDKVMKQLKRRRYTGWGRLSRKLINGIRDKQSGKTILDFLKSDGFANRNFMQLIHDDSLTFKEDIQKAQVSGQGDSLHEHIANLAGSPAIKKGILQTVKVVDELVKVMGRHKPENIVIEMARENQTTQKGQKNSRERMKRIEEGIKELGSQILKEHPVENTQLQNEKLYLYYLQNGRDMYVDQELDINRLSDYDVDHIVPQSFLKDDSIDNKVLTRSDKARGKSDNVPSEEVVKKMKNYWRQLLNAKLITQRKFDNLTKAERGGLSELDKAGFIKRQLVETRQITKHVAQILDSRMNTKYDENDKLIREVKVITLKSKLVSDFRKDFQFYKVREINNYHHAHDAYLNAVVGTALIKKYPKLESEFVYGDYKVYDVRKMIAKSEQEIGKATAKYFFYSNIMNFFKTEITLANGEIRKRPLIETNGETGEIVWDKGRDFATVRKVLSMPQVNIVKKTEVQTGGFSKESILPKRNSDKLIARKKDWDPKKYGGFDSPTVAYSVLVVAKVEKGKSKKLKSVKELLGITIMERSSFEKNPIDFLEAKGYKEVKKDLIIKLPKYSLFELENGRKRMLASAGELQKGNELALPSKYVNFLYLASHYEKLKGSPEDNEQKQLFVEQHKHYLDEIIEQISEFSKRVILADANLDKVLSAYNKHRDKPIREQAENIIHLFTLTNLGAPAAFKYFDTTIDRKRYTSTKEVLDATLIHQSITGLYETRIDLSQLGGDGGGGGEAAAKGSSGGTLQLDDEYRLYSPLVKPDQNIQFWLEQFPQAWAETAGMGLAKQVPPQVIQLKASATPVSVRQYPLSKEAQEGIRPHVQRLIQQGILVPVQSPWNTPLLPVRKPGTNDYRPVQDLREVNKRVQDIHPTVPNPYNLLCALPPQRSWYTVLDLKDAFFCLRLHPTSQPLFAFEWRDPGTGRTGQLTWTRLPQGFKNSPTIFDEALHRDLANFRIQHPQVTLLQYVDDLLLAGATKQDCLEGTKALLLELSDLGYRASAKKAQICRREVTYLGYSLRDGQRWLTEARKKTVVQIPAPTTAKQVREFLGTAGFCRLWIPGFATLAAPLYPLTKEKGEFSWAPEHQKAFDAIKKALLSAPALALPDVTKPFTLYVDERKGVARGVLTQTLGPWRRPVAYLSKKLDPVASGWPVCLKAIAAVAILVKDADKLTLGQNITVIAPHALENIVRQPPDRWMTNARMTHYQSLLLTERVTFAPPAALNPATLLPEETDEPVTHDCHQLLIEETGVRKDLTDIPLTGEVLTWFTDGSSYVVEGKRMAGAAVVDGTRTIWASSLPEGTSAQKAELMALTQALRLAEGKSINIYTDSRYAFATAHVHGAIYKQRGLLTSAGREIKNKEEILSLLEALHLPKRLAIIHCPGHQKAKDPISRGNQMADRVAKQAAQGVNLLAGKRTADGSEFEKRTADGSEFESPKKKAKVE

SEQ ID NO: 7297 - protein, 2176 aa, synthetic construct
MPAAKRVKLDGGDKKYSIGLDIGTNSVGWAVITDEYKVPSKKFKVLGNTDRHSIKKNLIGALLFDSGETAEATRLKRTARRRYTRRKNRICYLQEIFSNEMAKVDDSFFHRLEESFLVEEDKKHERHPIFGNIVDEVAYHEKYPTIYHLRKKLVDSTDKADLRLIYLALAHMIKFRGHFLIEGDLNPDNSDVDKLFIQLVQTYNQLFEENPINASGVDAKAILSARLSKSRRLENLIAQLPGEKKNGLFGNLIALSLGLTPNFKSNFDLAEDAKLQLSKDTYDDDLDNLLAQIGDQYADLFLAAKNLSDAILLSDILRVNTEITKAPLSASMIKRYDEHHQDLTLLKALVRQQLPEKYKEIFFDQSKNGYAGYIDGGASQEEFYKFIKPILEKMDGTEELLVKLNREDLLRKQRTFDNGSIPHQIHLGELHAILRRQEDFYPFLKDNREKIEKILTFRIPYYVGPLARGNSRFAWMTRKSEETITPWNFEEVVDKGASAQSFIERMTNFDKNLPNEKVLPKHSLLYEYFTVYNELTKVKYVTEGMRKPAFLSGEQKKAIVDLLFKTNRKVTVKQLKEDYFKKIECFDSVEISGVEDRFNASLGTYHDLLKIIKDKDFLDNEENEDILEDIVLTLTLFEDREMIEERLKTYAHLFDDKVMKQLKRRRYTGWGRLSRKLINGIRDKQSGKTILDFLKSDGFANRNFMQLIHDDSLTFKEDIQKAQVSGQGDSLHEHIANLAGSPAIKKGILQTVKVVDELVKVMGRHKPENIVIEMARENQTTQKGQKNSRERMKRIEEGIKELGSQILKEHPVENTQLQNEKLYLYYLQNGRDMYVDQELDINRLSDYDVDHIVPQSFLKDDSIDNKVLTRSDKARGKSDNVPSEEVVKKMKNYWRQLLNAKLITQRKFDNLTKAERGGLSELDKAGFIKRQLVETRQITKHVAQILDSRMNTKYDENDKLIREVKVITLKSKLVSDFRKDFQFYKVREINNYHHAHDAYLNAVVGTALIKKYPKLESEFVYGDYKVYDVRKMIAKSEQEIGKATAKYFFYSNIMNFFKTEITLANGEIRKRPLIETNGETGEIVWDKGRDFATVRKVLSMPQVNIVKKTEVQTGGFSKESILPKRNSDKLIARKKDWDPKKYGGFDSPTVAYSVLVVAKVEKGKSKKLKSVKELLGITIMERSSFEKNPIDFLEAKGYKEVKKDLIIKLPKYSLFELENGRKRMLASAGELQKGNELALPSKYVNFLYLASHYEKLKGSPEDNEQKQLFVEQHKHYLDEIIEQISEFSKRVILADANLDKVLSAYNKHRDKPIREQAENIIHLFTLTNLGAPAAFKYFDTTIDRKRYTSTKEVLDATLIHQSITGLYETRIDLSQLGGDGGGGGEAAAKGSSGGMNPLQLLQPLPAEVKGTKLLAHWNSGATITCIPESFLEDEQPIKQTLIKTIHGEKQQNVYYLTFKVKGRKVEAEVIASPYEYILLSPTDVPWLTQQPLQLTILVPLQEYQDRILNKTALPEEQKQQLKALFTKYDNLWQHWENQVGHRKIRPHNIATGDYPPRPQKQYPINPKAKPSIQIVIDDLLKQGVLTPQNSTMNTPVYPVPKPDGRWRMVLDYREVNKTIPLTAAQNQHSAGILATIVRQKYKTTLDLANGFWAHPITPDSYWLTAFTWQGKQYCWTRLPQGFLNSPALFTADAVDLLKEVPNVQVYVDDIYLSHDNPHEHIQQLEKVFQILLQAGYVVSLKKSEIGQRTVEFLGFNITKEGRGLTDTFKTKLLNVTPPKDLKQLQSILGLLNFARNFIPNFAELVQTLYNLIASSKGKYIEWTEDNTKQLNKVIEALNTASNLEERLPDQRLVIKVNTSPSAGYVRYYNESGKKPIMYLNYVFSKAELKFSMLEKLLTTMHKALIKAMDLAMGQEILVYSPIVSMTKIQKTPLPERKALPIRWITWMTYLEDPRIQFHYDKTLPELKHIPDVYTSSIPPLKHPSQYEGVFCTDGSAIKSPDPTKSNNAGMGIVHAIYNPEYKILNQWSIPLGHHTAQMAEIAAVEFACKKALKVPGPVLVITDSFYVAESANKELPYWKSNGFVNNKKEPLKHISKWKSIAECLSIKPDITIQHEKGHQPINTSIHTEGNALADKLATQGSYVVNAGKRTADGSEFEKRTADGSEFESPKKKAKVE

SEQ ID NO: 7298 - protein, 2096 aa, synthetic construct
MPAAKRVKLDGGDKKYSIGLDIGTNSVGWAVITDEYKVPSKKFKVLGNTDRHSIKKNLIGALLFDSGETAEATRLKRTARRRYTRRKNRICYLQEIFSNEMAKVDDSFFHRLEESFLVEEDKKHERHPIFGNIVDEVAYHEKYPTIYHLRKKLVDSTDKADLRLIYLALAHMIKFRGHFLIEGDLNPDNSDVDKLFIQLVQTYNQLFEENPINASGVDAKAILSARLSKSRRLENLIAQLPGEKKNGLFGNLIALSLGLTPNFKSNFDLAEDAKLQLSKDTYDDDLDNLLAQIGDQYADLFLAAKNLSDAILLSDILRVNTEITKAPLSASMIKRYDEHHQDLTLLKALVRQQLPEKYKEIFFDQSKNGYAGYIDGGASQEEFYKFIKPILEKMDGTEELLVKLNREDLLRKQRTFDNGSIPHQIHLGELHAILRRQEDFYPFLKDNREKIEKILTFRIPYYVGPLARGNSRFAWMTRKSEETITPWNFEEVVDKGASAQSFIERMTNFDKNLPNEKVLPKHSLLYEYFTVYNELTKVKYVTEGMRKPAFLSGEQKKAIVDLLFKTNRKVTVKQLKEDYFKKIECFDSVEISGVEDRFNASLGTYHDLLKIIKDKDFLDNEENEDILEDIVLTLTLFEDREMIEERLKTYAHLFDDKVMKQLKRRRYTGWGRLSRKLINGIRDKQSGKTILDFLKSDGFANRNFMQLIHDDSLTFKEDIQKAQVSGQGDSLHEHIANLAGSPAIKKGILQTVKVVDELVKVMGRHKPENIVIEMARENQTTQKGQKNSRERMKRIEEGIKELGSQILKEHPVENTQLQNEKLYLYYLQNGRDMYVDQELDINRLSDYDVDHIVPQSFLKDDSIDNKVLTRSDKARGKSDNVPSEEVVKKMKNYWRQLLNAKLITQRKFDNLTKAERGGLSELDKAGFIKRQLVETRQITKHVAQILDSRMNTKYDENDKLIREVKVITLKSKLVSDFRKDFQFYKVREINNYHHAHDAYLNAVVGTALIKKYPKLESEFVYGDYKVYDVRKMIAKSEQEIGKATAKYFFYSNIMNFFKTEITLANGEIRKRPLIETNGETGEIVWDKGRDFATVRKVLSMPQVNIVKKTEVQTGGFSKESILPKRNSDKLIARKKDWDPKKYGGFDSPTVAYSVLVVAKVEKGKSKKLKSVKELLGITIMERSSFEKNPIDFLEAKGYKEVKKDLIIKLPKYSLFELENGRKRMLASAGELQKGNELALPSKYVNFLYLASHYEKLKGSPEDNEQKQLFVEQHKHYLDEIIEQISEFSKRVILADANLDKVLSAYNKHRDKPIREQAENIIHLFTLTNLGAPAAFKYFDTTIDRKRYTSTKEVLDATLIHQSITGLYETRIDLSQLGGDGGGGGEAAAKGSSGGTLNIEDEYRLHETSKEPDVPLGSTWLSDFPQAWAETGGMGLAVRQAPLIIPLKATSTPVSIKQYPMSQEARLGIKPHIQRLLDQGILVPCQSPWNTPLLPVKKPGTNDYRPVQDLREVNKRVEDIHPTVPNPYNLLSGLPPSHQWYTVLDLKDAFFCLRLHPTSQPLFAFEWRDPEMGISGQLTWTRLPQGFKNSPTLFNEALHRDLADFRIQHPDLILLQYVDDLLLAATSEQDCQRGTRALLQTLGNLGYRASAKKAQICQKQVKYLGYLLKEGQRWLTEARKETVMGQPTPKTPRQLREFLGTAGFCRLWIPGFAEMAAPLYPLTKPGTLFNWGPDQQKAYQEIKQALLTAPALGLPDLTKPFELFVDEKQGYAKGVLTQKLGPWRRPVAYLSKKLDPVAAGWPPCLRMVAAIAVLTKDAGKLTMGQPLVILAPHAVEALVKQPPDRWLSNARMTHYQAMLLDTDRVQFGPVVALNPATLLPLPEKEAPHDCLEILAETHGTRPDLTDQPIPDADYTWYTDGSSFLQEGQRRAGAAVTTETEVIWARALPAGTSAQRAELIALTQALKMAEGKKLNVYTDSRYAFATAHVHGEIYRRRGWLTSEGREIKNKNEILALLKALFLPKRLSIIHCPGHQKGNSAEARGNRMADQAAREAAMKAVLETSTLLAGKRTADGSEFEKRTADGSEFESPKKKAKVE

SEQ ID NO: 7299 - protein, 2102 aa, synthetic construct
MPAAKRVKLDGGDKKYSIGLDIGTNSVGWAVITDEYKVPSKKFKVLGNTDRHSIKKNLIGALLFDSGETAEATRLKRTARRRYTRRKNRICYLQEIFSNEMAKVDDSFFHRLEESFLVEEDKKHERHPIFGNIVDEVAYHEKYPTIYHLRKKLVDSTDKADLRLIYLALAHMIKFRGHFLIEGDLNPDNSDVDKLFIQLVQTYNQLFEENPINASGVDAKAILSARLSKSRRLENLIAQLPGEKKNGLFGNLIALSLGLTPNFKSNFDLAEDAKLQLSKDTYDDDLDNLLAQIGDQYADLFLAAKNLSDAILLSDILRVNTEITKAPLSASMIKRYDEHHQDLTLLKALVRQQLPEKYKEIFFDQSKNGYAGYIDGGASQEEFYKFIKPILEKMDGTEELLVKLNREDLLRKQRTFDNGSIPHQIHLGELHAILRRQEDFYPFLKDNREKIEKILTFRIPYYVGPLARGNSRFAWMTRKSEETITPWNFEEVVDKGASAQSFIERMTNFDKNLPNEKVLPKHSLLYEYFTVYNELTKVKYVTEGMRKPAFLSGEQKKAIVDLLFKTNRKVTVKQLKEDYFKKIECFDSVEISGVEDRFNASLGTYHDLLKIIKDKDFLDNEENEDILEDIVLTLTLFEDREMIEERLKTYAHLFDDKVMKQLKRRRYTGWGRLSRKLINGIRDKQSGKTILDFLKSDGFANRNFMQLIHDDSLTFKEDIQKAQVSGQGDSLHEHIANLAGSPAIKKGILQTVKVVDELVKVMGRHKPENIVIEMARENQTTQKGQKNSRERMKRIEEGIKELGSQILKEHPVENTQLQNEKLYLYYLQNGRDMYVDQELDINRLSDYDVDHIVPQSFLKDDSIDNKVLTRSDKARGKSDNVPSEEVVKKMKNYWRQLLNAKLITQRKFDNLTKAERGGLSELDKAGFIKRQLVETRQITKHVAQILDSRMNTKYDENDKLIREVKVITLKSKLVSDFRKDFQFYKVREINNYHHAHDAYLNAVVGTALIKKYPKLESEFVYGDYKVYDVRKMIAKSEQEIGKATAKYFFYSNIMNFFKTEITLANGEIRKRPLIETNGETGEIVWDKGRDFATVRKVLSMPQVNIVKKTEVQTGGFSKESILPKRNSDKLIARKKDWDPKKYGGFDSPTVAYSVLVVAKVEKGKSKKLKSVKELLGITIMERSSFEKNPIDFLEAKGYKEVKKDLIIKLPKYSLFELENGRKRMLASAGELQKGNELALPSKYVNFLYLASHYEKLKGSPEDNEQKQLFVEQHKHYLDEIIEQISEFSKRVILADANLDKVLSAYNKHRDKPIREQAENIIHLFTLTNLGAPAAFKYFDTTIDRKRYTSTKEVLDATLIHQSITGLYETRIDLSQLGGDGGGSSGGGEAAAKGGTVSLQDEHRLFDIPVTTSLPDVWLQDFPQAWAETGGLGRAKCQAPIIIDLKPTAVPVSIKQYPMSLEAHMGIRQHIIKFLELGVLRPCRSPWNTPLLPVKKPGTQDYRPVQDLREINKRTVDIHPTVPNPYNLLSTLKPDYSWYTVLDLKDAFFCLPLAPQSQELFAFEWKDPERGISGQLTWTRLPQGFKNSPTLFNEALHRDLTDFRTQHPEVTLLQYVDDLLLAAPTKKACTQGTRHLLQELGEKGYRASAKKAQICQTKVTYLGYILSEGKRWLTPGRIETVARIPPPRNPREVREFLGTAGFCRLWIPGFAELAAPLYALTKPSTPFTWQTEHQLAFEALKKALLSAPALGLPDTSKPFTLFLDERQGIAKGVLTQKLGPWKRPVAYLSKKLDPVAAGWPPCLRIMAATAMLVKDSAKLTLGQPLTVITPHTLEAIVRQPPDRWITNARLTHYQALLLDTDRVQFGPPVTLNPATLLPVPENQPSPHDCRQVLAETHGTREDLKDQELPDADHTWYTDGSSYLDSGTRRAGAAVVDGHNTIWAQSLPPGTSAQKAELIALTKALELSKGKKANIYTDSRYAFATAHTHGSIYERRGWLTSEGKEIKNKAEIIALLKALFLPQEVAIIHCPGHQKGQDPVAVGNRQADRVARQAAMAEVLTLATEPDNTSHITAGKRTADGSEFEKRTADGSEFESPKKKAKVE

SEQ ID NO: 7300 - protein, 2218 aa, synthetic construct
MPAAKRVKLDGGDKKYSIGLDIGTNSVGWAVITDEYKVPSKKFKVLGNTDRHSIKKNLIGALLFDSGETAEATRLKRTARRRYTRRKNRICYLQEIFSNEMAKVDDSFFHRLEESFLVEEDKKHERHPIFGNIVDEVAYHEKYPTIYHLRKKLVDSTDKADLRLIYLALAHMIKFRGHFLIEGDLNPDNSDVDKLFIQLVQTYNQLFEENPINASGVDAKAILSARLSKSRRLENLIAQLPGEKKNGLFGNLIALSLGLTPNFKSNFDLAEDAKLQLSKDTYDDDLDNLLAQIGDQYADLFLAAKNLSDAILLSDILRVNTEITKAPLSASMIKRYDEHHQDLTLLKALVRQQLPEKYKEIFFDQSKNGYAGYIDGGASQEEFYKFIKPILEKMDGTEELLVKLNREDLLRKQRTFDNGSIPHQIHLGELHAILRRQEDFYPFLKDNREKIEKILTFRIPYYVGPLARGNSRFAWMTRKSEETITPWNFEEVVDKGASAQSFIERMTNFDKNLPNEKVLPKHSLLYEYFTVYNELTKVKYVTEGMRKPAFLSGEQKKAIVDLLFKTNRKVTVKQLKEDYFKKIECFDSVEISGVEDRFNASLGTYHDLLKIIKDKDFLDNEENEDILEDIVLTLTLFEDREMIEERLKTYAHLFDDKVMKQLKRRRYTGWGRLSRKLINGIRDKQSGKTILDFLKSDGFANRNFMQLIHDDSLTFKEDIQKAQVSGQGDSLHEHIANLAGSPAIKKGILQTVKVVDELVKVMGRHKPENIVIEMARENQTTQKGQKNSRERMKRIEEGIKELGSQILKEHPVENTQLQNEKLYLYYLQNGRDMYVDQELDINRLSDYDVDHIVPQSFLKDDSIDNKVLTRSDKARGKSDNVPSEEVVKKMKNYWRQLLNAKLITQRKFDNLTKAERGGLSELDKAGFIKRQLVETRQITKHVAQILDSRMNTKYDENDKLIREVKVITLKSKLVSDFRKDFQFYKVREINNYHHAHDAYLNAVVGTALIKKYPKLESEFVYGDYKVYDVRKMIAKSEQEIGKATAKYFFYSNIMNFFKTEITLANGEIRKRPLIETNGETGEIVWDKGRDFATVRKVLSMPQVNIVKKTEVQTGGFSKESILPKRNSDKLIARKKDWDPKKYGGFDSPTVAYSVLVVAKVEKGKSKKLKSVKELLGITIMERSSFEKNPIDFLEAKGYKEVKKDLIIKLPKYSLFELENGRKRMLASAGELQKGNELALPSKYVNFLYLASHYEKLKGSPEDNEQKQLFVEQHKHYLDEIIEQISEFSKRVILADANLDKVLSAYNKHRDKPIREQAENIIHLFTLTNLGAPAAFKYFDTTIDRKRYTSTKEVLDATLIHQSITGLYETRIDLSQLGGDGGGSSGGGEAAAKGGTLGDQGSRGSDPLPEPRVTLTVEGIPTEFLVNTGAEHSVLTKPMGKMGSKRTVVAGATGSKVYPWTTKRLLKIGQKQVTHSFLVIPECPAPLLGRDLLTKLKAQIQFSTEGPQVTWEDRPAMCLVLNLEEEYRLHEKPVPPSIDPSWLQLFPMVWAEKAGMGLANQVPPVVVELKSDASPVAVRQYPMSKEAREGIRPHIQRFLDLGILVPCQSPWNTPLLPVKKPGTNDYRPVQDLREVNKRVQDIHPTVPNPYNLLSSLPPSHTWYSVLDLKDAFFCLKLHPNSQPLFAFEWRDPEKGNTGQLTWTRLPQGFKNSPTLFDEALHRDLASFRALNPQVVMLQYVDDLLVAAPTYRDCKEGTRRLLQELSKLGYRVSAKKAQLCREEVTYLGYLLKGGKRWLTPARKATVMKIPTPTTPRQVREFLGTAGFCRLWIPGFASLAAPLYPLTREKVPFTWTEAHQEAFGRIKEALLSAPALALPDLTKPFALYVDEKEGVARGVLTQTLGPWRRPVAYLSKKLDPVASGWPTCLKAIAAVALLLKDADKLTLGQNVLVIAPHNLESIVRQPPDRWMTNARMTHYQSLLLNERVSFAPPAILNPATLLPVESDDTPIHICSEILAEETGTRPDLRDQPLPGVPAWYTDGSSFIMDGRRQAGAAIVDNKRTVWASNLPEGTSAQKAELIALTQALRLAEGKSINIYTDSRYAFATAHVHGAIYKQRGLLTSAGKDIKNKEEILALLEAIHLPKRVAIIHCPGHQRGTDPVATGNRKADEAAKQAAQSTRILTETTKNAGKRTADGSEFEKRTADGSEFESPKKKAKVE

SEQ ID NO: 7301 - protein, 2127 aa, synthetic construct
MPAAKRVKLDGGDKKYSIGLDIGTNSVGWAVITDEYKVPSKKFKVLGNTDRHSIKKNLIGALLFDSGETAEATRLKRTARRRYTRRKNRICYLQEIFSNEMAKVDDSFFHRLEESFLVEEDKKHERHPIFGNIVDEVAYHEKYPTIYHLRKKLVDSTDKADLRLIYLALAHMIKFRGHFLIEGDLNPDNSDVDKLFIQLVQTYNQLFEENPINASGVDAKAILSARLSKSRRLENLIAQLPGEKKNGLFGNLIALSLGLTPNFKSNFDLAEDAKLQLSKDTYDDDLDNLLAQIGDQYADLFLAAKNLSDAILLSDILRVNTEITKAPLSASMIKRYDEHHQDLTLLKALVRQQLPEKYKEIFFDQSKNGYAGYIDGGASQEEFYKFIKPILEKMDGTEELLVKLNREDLLRKQRTFDNGSIPHQIHLGELHAILRRQEDFYPFLKDNREKIEKILTFRIPYYVGPLARGNSRFAWMTRKSEETITPWNFEEVVDKGASAQSFIERMTNFDKNLPNEKVLPKHSLLYEYFTVYNELTKVKYVTEGMRKPAFLSGEQKKAIVDLLFKTNRKVTVKQLKEDYFKKIECFDSVEISGVEDRFNASLGTYHDLLKIIKDKDFLDNEENEDILEDIVLTLTLFEDREMIEERLKTYAHLFDDKVMKQLKRRRYTGWGRLSRKLINGIRDKQSGKTILDFLKSDGFANRNFMQLIHDDSLTFKEDIQKAQVSGQGDSLHEHIANLAGSPAIKKGILQTVKVVDELVKVMGRHKPENIVIEMARENQTTQKGQKNSRERMKRIEEGIKELGSQILKEHPVENTQLQNEKLYLYYLQNGRDMYVDQELDINRLSDYDVDHIVPQSFLKDDSIDNKVLTRSDKARGKSDNVPSEEVVKKMKNYWRQLLNAKLITQRKFDNLTKAERGGLSELDKAGFIKRQLVETRQITKHVAQILDSRMNTKYDENDKLIREVKVITLKSKLVSDFRKDFQFYKVREINNYHHAHDAYLNAVVGTALIKKYPKLESEFVYGDYKVYDVRKMIAKSEQEIGKATAKYFFYSNIMNFFKTEITLANGEIRKRPLIETNGETGEIVWDKGRDFATVRKVLSMPQVNIVKKTEVQTGGFSKESILPKRNSDKLIARKKDWDPKKYGGFDSPTVAYSVLVVAKVEKGKSKKLKSVKELLGITIMERSSFEKNPIDFLEAKGYKEVKKDLIIKLPKYSLFELENGRKRMLASAGELQKGNELALPSKYVNFLYLASHYEKLKGSPEDNEQKQLFVEQHKHYLDEIIEQISEFSKRVILADANLDKVLSAYNKHRDKPIREQAENIIHLFTLTNLGAPAAFKYFDTTIDRKRYTSTKEVLDATLIHQSITGLYETRIDLSQLGGDGGGSSGGGEAAAKGGLLGRDLLTKLKAQIQFSTEGPQVTWEDRPAMCLVLNLEEEYRLHEKPVPPSIDPSWLQLFPMVWAEKAGMGLANQVPPVVVELKSDASPVAVRQYPMSKEAREGIRPHIQRFLDLGILVPCQSPWNTPLLPVKKPGTNDYRPVQDLREVNKRVQDIHPTVPNPYNLLSSLPPSHTWYSVLDLKDAFFCLKLHPNSQPLFAFEWRDPEKGNTGQLTWTRLPQGFKNSPTLFNEALHRDLASFRALNPQVVMLQYVDDLLVAAPTYRDCKEGTRRLLQELSKLGYRVSAKKAQLCREEVTYLGYLLKGGKRWLTPARKATVMKIPTPTTPRQVREFLGTAGFCRLWIPGFASLAAPLYPLTRPKVPFTWTEAHQEAFGRIKEALLSAPALALPDLTKPFALYVDEKEGVARGVLTQTLGPWRRPVAYLSKKLDPVASGWPTCLKAIAAVALLLKDADKLTLGQNVLVIAPHNLESIVRQPPDRWMTNARMTHYQSLLLNERVSFAPPAILNPATLLPVESDDTPIHICSEILAEETGTRPDLRDQPLPGVPAWYTDGSSFIMDGRRQAGAAIVDNKRTVWASNLPEGTSAQKAELIALTQALRLAEGKSINIYTDSRYAFATAHVHGAIYKQRGWLTSAGKDIKNKEEILALLEAIHLPKRVAIIHCPGHQRGTDPVATGNRKADEAAKQAAQSTRILTETTKNAGKRTADGSEFEKRTADGSEFESPKKKAKVE

SEQ ID NO: 7302 - protein, 2096 aa, synthetic construct
MPAAKRVKLDGGDKKYSIGLDIGTNSVGWAVITDEYKVPSKKFKVLGNTDRHSIKKNLIGALLFDSGETAEATRLKRTARRRYTRRKNRICYLQEIFSNEMAKVDDSFFHRLEESFLVEEDKKHERHPIFGNIVDEVAYHEKYPTIYHLRKKLVDSTDKADLRLIYLALAHMIKFRGHFLIEGDLNPDNSDVDKLFIQLVQTYNQLFEENPINASGVDAKAILSARLSKSRRLENLIAQLPGEKKNGLFGNLIALSLGLTPNFKSNFDLAEDAKLQLSKDTYDDDLDNLLAQIGDQYADLFLAAKNLSDAILLSDILRVNTEITKAPLSASMIKRYDEHHQDLTLLKALVRQQLPEKYKEIFFDQSKNGYAGYIDGGASQEEFYKFIKPILEKMDGTEELLVKLNREDLLRKQRTFDNGSIPHQIHLGELHAILRRQEDFYPFLKDNREKIEKILTFRIPYYVGPLARGNSRFAWMTRKSEETITPWNFEEVVDKGASAQSFIERMTNFDKNLPNEKVLPKHSLLYEYFTVYNELTKVKYVTEGMRKPAFLSGEQKKAIVDLLFKTNRKVTVKQLKEDYFKKIECFDSVEISGVEDRFNASLGTYHDLLKIIKDKDFLDNEENEDILEDIVLTLTLFEDREMIEERLKTYAHLFDDKVMKQLKRRRYTGWGRLSRKLINGIRDKQSGKTILDFLKSDGFANRNFMQLIHDDSLTFKEDIQKAQVSGQGDSLHEHIANLAGSPAIKKGILQTVKVVDELVKVMGRHKPENIVIEMARENQTTQKGQKNSRERMKRIEEGIKELGSQILKEHPVENTQLQNEKLYLYYLQNGRDMYVDQELDINRLSDYDVDHIVPQSFLKDDSIDNKVLTRSDKARGKSDNVPSEEVVKKMKNYWRQLLNAKLITQRKFDNLTKAERGGLSELDKAGFIKRQLVETRQITKHVAQILDSRMNTKYDENDKLIREVKVITLKSKLVSDFRKDFQFYKVREINNYHHAHDAYLNAVVGTALIKKYPKLESEFVYGDYKVYDVRKMIAKSEQEIGKATAKYFFYSNIMNFFKTEITLANGEIRKRPLIETNGETGEIVWDKGRDFATVRKVLSMPQVNIVKKTEVQTGGFSKESILPKRNSDKLIARKKDWDPKKYGGFDSPTVAYSVLVVAKVEKGKSKKLKSVKELLGITIMERSSFEKNPIDFLEAKGYKEVKKDLIIKLPKYSLFELENGRKRMLASAGELQKGNELALPSKYVNFLYLASHYEKLKGSPEDNEQKQLFVEQHKHYLDEIIEQISEFSKRVILADANLDKVLSAYNKHRDKPIREQAENIIHLFTLTNLGAPAAFKYFDTTIDRKRYTSTKEVLDATLIHQSITGLYETRIDLSQLGGDGGGSSGGGEAAAKGGTLNIEDEYRLHETSKGPDVPLGSTWLSDFPQAWAETGGMGLAVRQAPLIIPLKATSTPVSIKQYPMSQEARLGIKPHIQRLLDQGILVPCQSPWNTPLLPVKKPGTNDYRPVQDLREVNKRVEDIHPTVPNPYNLLSGLPPSHQWYTVLDLKDAFFCLRLHPTSQSLFAFEWRDPEMGISGQLTWTRLPQGFKNSPTLFNEALHRDLADFRIQHPDLILLQYVDDLLLAATSELDCQQGTRALLQTLGDLGYRASAKKAQICQKQVKYLGYLLKEGQRWLTEARKETVMGQPTPKTPRQLREFLGTAGFCRLWIPGFAEMAAPLYPLTKPGTLFEWGPDQQKAYQEIKQALLTAPALGLPDLTKPFELFVDEKQGYAKGVLTQKLGPWRRPVAYLSKKLDPVAAGWPPCLRMVAAIAVLTKDAGKLTMGQPLVILAPHAVEALVKQPPDRWLSNARMTHYQALLLDTDRVQFGPIVALNPATLLPLPEEGLQHDCLDILAEAHGTRPDLTDQPLPDADHTWYTDGSSFLQEGQRKAGAAVTTETEVVWAKALPAGTSAQRAELIALTQALKMAEGKKLNVYTDSRYAFATAHIHGEIYRRRGWLTSEGKEIKNKDEILALLKALFLPKRLSIIHCPGHQKGNRAEARGNRMADQAAREVATRETPETSTLLAGKRTADGSEFEKRTADGSEFESPKKKAKVE

SEQ ID NO: 7303 - protein, 2090 aa, synthetic construct
MPAAKRVKLDGGDKKYSIGLDIGTNSVGWAVITDEYKVPSKKFKVLGNTDRHSIKKNLIGALLFDSGETAEATRLKRTARRRYTRRKNRICYLQEIFSNEMAKVDDSFFHRLEESFLVEEDKKHERHPIFGNIVDEVAYHEKYPTIYHLRKKLVDSTDKADLRLIYLALAHMIKFRGHFLIEGDLNPDNSDVDKLFIQLVQTYNQLFEENPINASGVDAKAILSARLSKSRRLENLIAQLPGEKKNGLFGNLIALSLGLTPNFKSNFDLAEDAKLQLSKDTYDDDLDNLLAQIGDQYADLFLAAKNLSDAILLSDILRVNTEITKAPLSASMIKRYDEHHQDLTLLKALVRQQLPEKYKEIFFDQSKNGYAGYIDGGASQEEFYKFIKPILEKMDGTEELLVKLNREDLLRKQRTFDNGSIPHQIHLGELHAILRRQEDFYPFLKDNREKIEKILTFRIPYYVGPLARGNSRFAWMTRKSEETITPWNFEEVVDKGASAQSFIERMTNFDKNLPNEKVLPKHSLLYEYFTVYNELTKVKYVTEGMRKPAFLSGEQKKAIVDLLFKTNRKVTVKQLKEDYFKKIECFDSVEISGVEDRFNASLGTYHDLLKIIKDKDFLDNEENEDILEDIVLTLTLFEDREMIEERLKTYAHLFDDKVMKQLKRRRYTGWGRLSRKLINGIRDKQSGKTILDFLKSDGFANRNFMQLIHDDSLTFKEDIQKAQVSGQGDSLHEHIANLAGSPAIKKGILQTVKVVDELVKVMGRHKPENIVIEMARENQTTQKGQKNSRERMKRIEEGIKELGSQILKEHPVENTQLQNEKLYLYYLQNGRDMYVDQELDINRLSDYDVDHIVPQSFLKDDSIDNKVLTRSDKARGKSDNVPSEEVVKKMKNYWRQLLNAKLITQRKFDNLTKAERGGLSELDKAGFIKRQLVETRQITKHVAQILDSRMNTKYDENDKLIREVKVITLKSKLVSDFRKDFQFYKVREINNYHHAHDAYLNAVVGTALIKKYPKLESEFVYGDYKVYDVRKMIAKSEQEIGKATAKYFFYSNIMNFFKTEITLANGEIRKRPLIETNGETGEIVWDKGRDFATVRKVLSMPQVNIVKKTEVQTGGFSKESILPKRNSDKLIARKKDWDPKKYGGFDSPTVAYSVLVVAKVEKGKSKKLKSVKELLGITIMERSSFEKNPIDFLEAKGYKEVKKDLIIKLPKYSLFELENGRKRMLASAGELQKGNELALPSKYVNFLYLASHYEKLKGSPEDNEQKQLFVEQHKHYLDEIIEQISEFSKRVILADANLDKVLSAYNKHRDKPIREQAENIIHLFTLTNLGAPAAFKYFDTTIDRKRYTSTKEVLDATLIHQSITGLYETRIDLSQLGGDGGGSSGGGEAAAKGGTLQLDDEYRLYSPLVKPDQNIQFWLEQFPQAWAETAGMGLAKQVPPQVIQLKASATPVSVRQYPLSKEAQEGIRPHVQRLIQQGILVPVQSPWNTPLLPVRKPGTNDYRPVQDLREVNKRVQDIHPTVPNPYNLLCALPPQRSWYTVLDLKDAFFCLRLHPTSQPLFAFEWRDPGTGRTGQLTWTRLPQGFKNSPTIFDEALHRDLANFRIQHPQVTLLQYVDDLLLAGATKQDCLEGTKALLLELSDLGYRASAKKAQICRREVTYLGYSLRDGQRWLTEARKKTVVQIPAPTTAKQVREFLGTAGFCRLWIPGFATLAAPLYPLTKEKGEFSWAPEHQKAFDAIKKALLSAPALALPDVTKPFTLYVDERKGVARGVLTQTLGPWRRPVAYLSKKLDPVASGWPVCLKAIAAVAILVKDADKLTLGQNITVIAPHALENIVRQPPDRWMTNARMTHYQSLLLTERVTFAPPAALNPATLLPEETDEPVTHDCHQLLIEETGVRKDLTDIPLTGEVLTWFTDGSSYVVEGKRMAGAAVVDGTRTIWASSLPEGTSAQKAELMALTQALRLAEGKSINIYTDSRYAFATAHVHGAIYKQRGLLTSAGREIKNKEEILSLLEALHLPKRLAIIHCPGHQKAKDPISRGNQMADRVAKQAAQGVNLLAGKRTADGSEFEKRTADGSEFESPKKKAKVE

SEQ ID NO: 7304 - protein, 2087 aa, synthetic construct
MPAAKRVKLDGGDKKYSIGLDIGTNSVGWAVITDEYKVPSKKFKVLGNTDRHSIKKNLIGALLFDSGETAEATRLKRTARRRYTRRKNRICYLQEIFSNEMAKVDDSFFHRLEESFLVEEDKKHERHPIFGNIVDEVAYHEKYPTIYHLRKKLVDSTDKADLRLIYLALAHMIKFRGHFLIEGDLNPDNSDVDKLFIQLVQTYNQLFEENPINASGVDAKAILSARLSKSRRLENLIAQLPGEKKNGLFGNLIALSLGLTPNFKSNFDLAEDAKLQLSKDTYDDDLDNLLAQIGDQYADLFLAAKNLSDAILLSDILRVNTEITKAPLSASMIKRYDEHHQDLTLLKALVRQQLPEKYKEIFFDQSKNGYAGYIDGGASQEEFYKFIKPILEKMDGTEELLVKLNREDLLRKQRTFDNGSIPHQIHLGELHAILRRQEDFYPFLKDNREKIEKILTFRIPYYVGPLARGNSRFAWMTRKSEETITPWNFEEVVDKGASAQSFIERMTNFDKNLPNEKVLPKHSLLYEYFTVYNELTKVKYVTEGMRKPAFLSGEQKKAIVDLLFKTNRKVTVKQLKEDYFKKIECFDSVEISGVEDRFNASLGTYHDLLKIIKDKDFLDNEENEDILEDIVLTLTLFEDREMIEERLKTYAHLFDDKVMKQLKRRRYTGWGRLSRKLINGIRDKQSGKTILDFLKSDGFANRNFMQLIHDDSLTFKEDIQKAQVSGQGDSLHEHIANLAGSPAIKKGILQTVKVVDELVKVMGRHKPENIVIEMARENQTTQKGQKNSRERMKRIEEGIKELGSQILKEHPVENTQLQNEKLYLYYLQNGRDMYVDQELDINRLSDYDVDHIVPQSFLKDDSIDNKVLTRSDKARGKSDNVPSEEVVKKMKNYWRQLLNAKLITQRKFDNLTKAERGGLSELDKAGFIKRQLVETRQITKHVAQILDSRMNTKYDENDKLIREVKVITLKSKLVSDFRKDFQFYKVREINNYHHAHDAYLNAVVGTALIKKYPKLESEFVYGDYKVYDVRKMIAKSEQEIGKATAKYFFYSNIMNFFKTEITLANGEIRKRPLIETNGETGEIVWDKGRDFATVRKVLSMPQVNIVKKTEVQTGGFSKESILPKRNSDKLIARKKDWDPKKYGGFDSPTVAYSVLVVAKVEKGKSKKLKSVKELLGITIMERSSFEKNPIDFLEAKGYKEVKKDLIIKLPKYSLFELENGRKRMLASAGELQKGNELALPSKYVNFLYLASHYEKLKGSPEDNEQKQLFVEQHKHYLDEIIEQISEFSKRVILADANLDKVLSAYNKHRDKPIREQAENIIHLFTLTNLGAPAAFKYFDTTIDRKRYTSTKEVLDATLIHQSITGLYETRIDLSQLGGDGGGSSGGGEAAAKGGIPWLMKKPLQLTTLVPLQEYEERLLKQTMLTGSYKEKLQSLFLKYDALWQHWENQVGHRRIKPHHIATGTVNPRPQKQYPINPKAKASIQTVINDLLKQGVLIQQNSIMNTPVYPVPKPDGKWRMVLDYREVNKTIPLIAAQNQHSAGILSSIFRGKYKTTLDLSNGFWAHSITPESYWLTAFTWLGQQYCWTRLPQGFLNSPALFNADVVDLLKEVPNVQVYVDDIYISHDDPREHLEQLEKVFSLLLNAGYVVSLKKSEIAQHEVEFLGFNITKEGRGLTETFKQKLLNITPPRDLKQLQSILGKLNFARNFIPNFSELVKPLYNIIATAPGKYITWTTDNSQQLQNIISMLNSAENLEERNPEVRLIMKVNTSPSAGYIRFYNEFAKRPIMYLNYVYTKAEVKFTNTEKLLTTIHKGLIKALDLGMGQEILVYSPIVSMTKIQKTPLPERKALPIRWITWMSYLEDPRIQFHYDKTLPELQQVPTVTDDIIAKIKHPSEFSMVFYTDGSAIKHPNVNKSHNAGMGIAQVQFKPEFTVINTWSIPLGDHTAQLAEVAAVEFACKKALKIDGPVLIVTDSFYVAESVNKELPYWQSNGFFNNKKKPLKHVSKWKSIADCIQLKPDIIIIHEKGHQPTASTFHTEGNNLADKLATQGSYVVNAGKRTADGSEFEKRTADGSEFESPKKKAKVE

SEQ ID NO: 7305 - protein, 2176 aa, synthetic construct
MPAAKRVKLDGGDKKYSIGLDIGTNSVGWAVITDEYKVPSKKFKVLGNTDRHSIKKNLIGALLFDSGETAEATRLKRTARRRYTRRKNRICYLQEIFSNEMAKVDDSFFHRLEESFLVEEDKKHERHPIFGNIVDEVAYHEKYPTIYHLRKKLVDSTDKADLRLIYLALAHMIKFRGHFLIEGDLNPDNSDVDKLFIQLVQTYNQLFEENPINASGVDAKAILSARLSKSRRLENLIAQLPGEKKNGLFGNLIALSLGLTPNFKSNFDLAEDAKLQLSKDTYDDDLDNLLAQIGDQYADLFLAAKNLSDAILLSDILRVNTEITKAPLSASMIKRYDEHHQDLTLLKALVRQQLPEKYKEIFFDQSKNGYAGYIDGGASQEEFYKFIKPILEKMDGTEELLVKLNREDLLRKQRTFDNGSIPHQIHLGELHAILRRQEDFYPFLKDNREKIEKILTFRIPYYVGPLARGNSRFAWMTRKSEETITPWNFEEVVDKGASAQSFIERMTNFDKNLPNEKVLPKHSLLYEYFTVYNELTKVKYVTEGMRKPAFLSGEQKKAIVDLLFKTNRKVTVKQLKEDYFKKIECFDSVEISGVEDRFNASLGTYHDLLKIIKDKDFLDNEENEDILEDIVLTLTLFEDREMIEERLKTYAHLFDDKVMKQLKRRRYTGWGRLSRKLINGIRDKQSGKTILDFLKSDGFANRNFMQLIHDDSLTFKEDIQKAQVSGQGDSLHEHIANLAGSPAIKKGILQTVKVVDELVKVMGRHKPENIVIEMARENQTTQKGQKNSRERMKRIEEGIKELGSQILKEHPVENTQLQNEKLYLYYLQNGRDMYVDQELDINRLSDYDVDHIVPQSFLKDDSIDNKVLTRSDKARGKSDNVPSEEVVKKMKNYWRQLLNAKLITQRKFDNLTKAERGGLSELDKAGFIKRQLVETRQITKHVAQILDSRMNTKYDENDKLIREVKVITLKSKLVSDFRKDFQFYKVREINNYHHAHDAYLNAVVGTALIKKYPKLESEFVYGDYKVYDVRKMIAKSEQEIGKATAKYFFYSNIMNFFKTEITLANGEIRKRPLIETNGETGEIVWDKGRDFATVRKVLSMPQVNIVKKTEVQTGGFSKESILPKRNSDKLIARKKDWDPKKYGGFDSPTVAYSVLVVAKVEKGKSKKLKSVKELLGITIMERSSFEKNPIDFLEAKGYKEVKKDLIIKLPKYSLFELENGRKRMLASAGELQKGNELALPSKYVNFLYLASHYEKLKGSPEDNEQKQLFVEQHKHYLDEIIEQISEFSKRVILADANLDKVLSAYNKHRDKPIREQAENIIHLFTLTNLGAPAAFKYFDTTIDRKRYTSTKEVLDATLIHQSITGLYETRIDLSQLGGDGGGSSGGGEAAAKGGMDPLQLLQPLEAEIKGTKLKAHWNSGATITCVPQAFLEEEVPIKNIWIKTIHGEKEQPVYYLTFKIQGRKVEAEVISSPYDYILVSPSDIPWLMKKPLQLTTLVPLQEYEERLLKQTMLTGSYKEKLQSLFLKYDALWQHWENQVGHRRIKPHHIATGTVNPRPQKQYPINPKAKASIQTVINDLLKQGVLIQQNSIMNTPVYPVPKPDGKWRMVLDYREVNKTIPLIAAQNQHSAGILSSIFRGKYKTTLDLSNGFWAHSITPESYWLTAFTWLGQQYCWTRLPQGFLNSPALFNADVVDLLKEVPNVQVYVDDIYISHDDPREHLEQLEKVFSLLLNAGYVVSLKKSEIAQHEVEFLGFNITKEGRGLTETFKQKLLNITPPRDLKQLQSILGLLNFARNFIPNFSELVKPLYNIIATAPGKYITWTTDNSQQLQNIISMLNSAENLEERNPEVRLIMKVNTSPSAGYIRFYNEFAKRPIMYLNYVYTKAEVKFTNTEKLLTTIHKGLIKALDLGMGQEILVYSPIVSMTKIQKTPLPERKALPIRWITWMSYLEDPRIQFHYDKTLPELQQVPTVTDDIIAKIKHPSEFSMVFYTDGSAIKHPNVNKSHNAGMGIAQVQFKPEFTVINTWSIPLGDHTAQLAEVAAVEFACKKALKIDGPVLIVTDSFYVAESVNKELPYWQSNGFFNNKKKPLKHVSKWKSIADCIQLKPDIIIIHEKGHQPTASTFHTEGNNLADKLATQGSYVVNAGKRTADGSEFEKRTADGSEFESPKKKAKVE

SEQ ID NO: 7306 - protein, 2094 aa, synthetic construct
MPAAKRVKLDGGDKKYSIGLDIGTNSVGWAVITDEYKVPSKKFKVLGNTDRHSIKKNLIGALLFDSGETAEATRLKRTARRRYTRRKNRICYLQEIFSNEMAKVDDSFFHRLEESFLVEEDKKHERHPIFGNIVDEVAYHEKYPTIYHLRKKLVDSTDKADLRLIYLALAHMIKFRGHFLIEGDLNPDNSDVDKLFIQLVQTYNQLFEENPINASGVDAKAILSARLSKSRRLENLIAQLPGEKKNGLFGNLIALSLGLTPNFKSNFDLAEDAKLQLSKDTYDDDLDNLLAQIGDQYADLFLAAKNLSDAILLSDILRVNTEITKAPLSASMIKRYDEHHQDLTLLKALVRQQLPEKYKEIFFDQSKNGYAGYIDGGASQEEFYKFIKPILEKMDGTEELLVKLNREDLLRKQRTFDNGSIPHQIHLGELHAILRRQEDFYPFLKDNREKIEKILTFRIPYYVGPLARGNSRFAWMTRKSEETITPWNFEEVVDKGASAQSFIERMTNFDKNLPNEKVLPKHSLLYEYFTVYNELTKVKYVTEGMRKPAFLSGEQKKAIVDLLFKTNRKVTVKQLKEDYFKKIECFDSVEISGVEDRFNASLGTYHDLLKIIKDKDFLDNEENEDILEDIVLTLTLFEDREMIEERLKTYAHLFDDKVMKQLKRRRYTGWGRLSRKLINGIRDKQSGKTILDFLKSDGFANRNFMQLIHDDSLTFKEDIQKAQVSGQGDSLHEHIANLAGSPAIKKGILQTVKVVDELVKVMGRHKPENIVIEMARENQTTQKGQKNSRERMKRIEEGIKELGSQILKEHPVENTQLQNEKLYLYYLQNGRDMYVDQELDINRLSDYDVDHIVPQSFLKDDSIDNKVLTRSDKARGKSDNVPSEEVVKKMKNYWRQLLNAKLITQRKFDNLTKAERGGLSELDKAGFIKRQLVETRQITKHVAQILDSRMNTKYDENDKLIREVKVITLKSKLVSDFRKDFQFYKVREINNYHHAHDAYLNAVVGTALIKKYPKLESEFVYGDYKVYDVRKMIAKSEQEIGKATAKYFFYSNIMNFFKTEITLANGEIRKRPLIETNGETGEIVWDKGRDFATVRKVLSMPQVNIVKKTEVQTGGFSKESILPKRNSDKLIARKKDWDPKKYGGFDSPTVAYSVLVVAKVEKGKSKKLKSVKELLGITIMERSSFEKNPIDFLEAKGYKEVKKDLIIKLPKYSLFELENGRKRMLASAGELQKGNELALPSKYVNFLYLASHYEKLKGSPEDNEQKQLFVEQHKHYLDEIIEQISEFSKRVILADANLDKVLSAYNKHRDKPIREQAENIIHLFTLTNLGAPAAFKYFDTTIDRKRYTSTKEVLDATLIHQSITGLYETRIDLSQLGGDGGGSSGGGEAAAKGGVLNLEEEYRLHEKPVPSSIDPSWLQLFPTVWAERAGMGLANQVPPVVVELRSGASPVAVRQYPMSKEAREGIRPHIQRFLDLGVLVPCQSPWNTPLLPVKKPGTNDYRPVQDLREINKRVQDIHPTVPNPYNLLSSLPPSHTWYSVLDLKDAFFCLKLHPNSQPLFAFEWRDPEKGNTGQLTWTRLPQGFKNSPTLFNEALHRDLAPFRALNPQVVLLQYVDDLLVAAPTYRDCKEGTQKLLQELSKLGYRVSAKKAQLCQKEVTYLGYLLKEGKRWLTPARKATVMKIPPPTTPRQVREFLGTAGFCRLWIPGFASLAAPLYPLTKPSIPFIWTEEHQKAFDRIKEALLSAPALALPDLTKPFTLYVDERAGVARGVLTQTLGPWRRPVAYLSKKLDPVASGWPTCLKAVAAVALLLKDADKLTLGQNVTVIASHSLESIVRQPPDRWMTNARMTHYQSLLLNERVSFAPPAVLNPATLLPVESEATPVHRCSEILAEETGTRRDLKDQPLPGVPAWYTDGSSFIAEGKRRAGAAIVDGKRTVWASSLPEGTSAQKAELVALTQALRLAEGKDINIYTDSRYAFATAHIHGAIYKQRGWLTSAGKDIKNKEEILALLEAIHLPKRVAIIHCPGHQKGNDPVATGNRRADEAAKQAALSTRVLAETTKPAGKRTADGSEFEKRTADGSEFESPKKKAKVE

SEQ ID NO: 7307 - protein, 2102 aa, synthetic construct
MPAAKRVKLDGGDKKYSIGLDIGTNSVGWAVITDEYKVPSKKFKVLGNTDRHSIKKNLIGALLFDSGETAEATRLKRTARRRYTRRKNRICYLQEIFSNEMAKVDDSFFHRLEESFLVEEDKKHERHPIFGNIVDEVAYHEKYPTIYHLRKKLVDSTDKADLRLIYLALAHMIKFRGHFLIEGDLNPDNSDVDKLFIQLVQTYNQLFEENPINASGVDAKAILSARLSKSRRLENLIAQLPGEKKNGLFGNLIALSLGLTPNFKSNFDLAEDAKLQLSKDTYDDDLDNLLAQIGDQYADLFLAAKNLSDAILLSDILRVNTEITKAPLSASMIKRYDEHHQDLTLLKALVRQQLPEKYKEIFFDQSKNGYAGYIDGGASQEEFYKFIKPILEKMDGTEELLVKLNREDLLRKQRTFDNGSIPHQIHLGELHAILRRQEDFYPFLKDNREKIEKILTFRIPYYVGPLARGNSRFAWMTRKSEETITPWNFEEVVDKGASAQSFIERMTNFDKNLPNEKVLPKHSLLYEYFTVYNELTKVKYVTEGMRKPAFLSGEQKKAIVDLLFKTNRKVTVKQLKEDYFKKIECFDSVEISGVEDRFNASLGTYHDLLKIIKDKDFLDNEENEDILEDIVLTLTLFEDREMIEERLKTYAHLFDDKVMKQLKRRRYTGWGRLSRKLINGIRDKQSGKTILDFLKSDGFANRNFMQLIHDDSLTFKEDIQKAQVSGQGDSLHEHIANLAGSPAIKKGILQTVKVVDELVKVMGRHKPENIVIEMARENQTTQKGQKNSRERMKRIEEGIKELGSQILKEHPVENTQLQNEKLYLYYLQNGRDMYVDQELDINRLSDYDVDHIVPQSFLKDDSIDNKVLTRSDKARGKSDNVPSEEVVKKMKNYWRQLLNAKLITQRKFDNLTKAERGGLSELDKAGFIKRQLVETRQITKHVAQILDSRMNTKYDENDKLIREVKVITLKSKLVSDFRKDFQFYKVREINNYHHAHDAYLNAVVGTALIKKYPKLESEFVYGDYKVYDVRKMIAKSEQEIGKATAKYFFYSNIMNFFKTEITLANGEIRKRPLIETNGETGEIVWDKGRDFATVRKVLSMPQVNIVKKTEVQTGGFSKESILPKRNSDKLIARKKDWDPKKYGGFDSPTVAYSVLVVAKVEKGKSKKLKSVKELLGITIMERSSFEKNPIDFLEAKGYKEVKKDLIIKLPKYSLFELENGRKRMLASAGELQKGNELALPSKYVNFLYLASHYEKLKGSPEDNEQKQLFVEQHKHYLDEIIEQISEFSKRVILADANLDKVLSAYNKHRDKPIREQAENIIHLFTLTNLGAPAAFKYFDTTIDRKRYTSTKEVLDATLIHQSITGLYETRIDLSQLGGDGGGSSEAAAKGGGGGTVSLQDEHRLFDIPVTTSLPDVWLQDFPQAWAETGGLGRAKCQAPIIIDLKPTAVPVSIKQYPMSLEAHMGIRQHIIKFLELGVLRPCRSPWNTPLLPVKKPGTQDYRPVQDLREINKRTVDIHPTVPNPYNLLSTLKPDYSWYTVLDLKDAFFCLPLAPQSQELFAFEWKDPERGISGQLTWTRLPQGFKNSPTLFNEALHRDLTDFRTQHPEVTLLQYVDDLLLAAPTKKACTQGTRHLLQELGEKGYRASAKKAQICQTKVTYLGYILSEGKRWLTPGRIETVARIPPPRNPREVREFLGTAGFCRLWIPGFAELAAPLYALTKPSTPFTWQTEHQLAFEALKKALLSAPALGLPDTSKPFTLFLDERQGIAKGVLTQKLGPWKRPVAYLSKKLDPVAAGWPPCLRIMAATAMLVKDSAKLTLGQPLTVITPHTLEAIVRQPPDRWITNARLTHYQALLLDTDRVQFGPPVTLNPATLLPVPENQPSPHDCRQVLAETHGTREDLKDQELPDADHTWYTDGSSYLDSGTRRAGAAVVDGHNTIWAQSLPPGTSAQKAELIALTKALELSKGKKANIYTDSRYAFATAHTHGSIYERRGWLTSEGKEIKNKAEIIALLKALFLPQEVAIIHCPGHQKGQDPVAVGNRQADRVARQAAMAEVLTLATEPDNTSHITAGKRTADGSEFEKRTADGSEFESPKKKAKVE

SEQ ID NO: 7308 - protein, 2173 aa, synthetic construct
MPAAKRVKLDGGDKKYSIGLDIGTNSVGWAVITDEYKVPSKKFKVLGNTDRHSIKKNLIGALLFDSGETAEATRLKRTARRRYTRRKNRICYLQEIFSNEMAKVDDSFFHRLEESFLVEEDKKHERHPIFGNIVDEVAYHEKYPTIYHLRKKLVDSTDKADLRLIYLALAHMIKFRGHFLIEGDLNPDNSDVDKLFIQLVQTYNQLFEENPINASGVDAKAILSARLSKSRRLENLIAQLPGEKKNGLFGNLIALSLGLTPNFKSNFDLAEDAKLQLSKDTYDDDLDNLLAQIGDQYADLFLAAKNLSDAILLSDILRVNTEITKAPLSASMIKRYDEHHQDLTLLKALVRQQLPEKYKEIFFDQSKNGYAGYIDGGASQEEFYKFIKPILEKMDGTEELLVKLNREDLLRKQRTFDNGSIPHQIHLGELHAILRRQEDFYPFLKDNREKIEKILTFRIPYYVGPLARGNSRFAWMTRKSEETITPWNFEEVVDKGASAQSFIERMTNFDKNLPNEKVLPKHSLLYEYFTVYNELTKVKYVTEGMRKPAFLSGEQKKAIVDLLFKTNRKVTVKQLKEDYFKKIECFDSVEISGVEDRFNASLGTYHDLLKIIKDKDFLDNEENEDILEDIVLTLTLFEDREMIEERLKTYAHLFDDKVMKQLKRRRYTGWGRLSRKLINGIRDKQSGKTILDFLKSDGFANRNFMQLIHDDSLTFKEDIQKAQVSGQGDSLHEHIANLAGSPAIKKGILQTVKVVDELVKVMGRHKPENIVIEMARENQTTQKGQKNSRERMKRIEEGIKELGSQILKEHPVENTQLQNEKLYLYYLQNGRDMYVDQELDINRLSDYDVDHIVPQSFLKDDSIDNKVLTRSDKARGKSDNVPSEEVVKKMKNYWRQLLNAKLITQRKFDNLTKAERGGLSELDKAGFIKRQLVETRQITKHVAQILDSRMNTKYDENDKLIREVKVITLKSKLVSDFRKDFQFYKVREINNYHHAHDAYLNAVVGTALIKKYPKLESEFVYGDYKVYDVRKMIAKSEQEIGKATAKYFFYSNIMNFFKTEITLANGEIRKRPLIETNGETGEIVWDKGRDFATVRKVLSMPQVNIVKKTEVQTGGFSKESILPKRNSDKLIARKKDWDPKKYGGFDSPTVAYSVLVVAKVEKGKSKKLKSVKELLGITIMERSSFEKNPIDFLEAKGYKEVKKDLIIKLPKYSLFELENGRKRMLASAGELQKGNELALPSKYVNFLYLASHYEKLKGSPEDNEQKQLFVEQHKHYLDEIIEQISEFSKRVILADANLDKVLSAYNKHRDKPIREQAENIIHLFTLTNLGAPAAFKYFDTTIDRKRYTSTKEVLDATLIHQSITGLYETRIDLSQLGGDGGGSSEAAAKGGGGGMDLLKPLTVERKGVKIKGYWNSQADITCVPKDLLQGEEPVRQQNVTTIHGTQEGDVYYVNLKIDGRRINTEVIGTTLDYAIITPGDVPWILKKPLELTIKLDLEEQQGTLLNNSILSKKGKEELKQLFEKYSALWQSWENQVGHRRIRPHKIATGTVKPTPQKQYHINPKAKPDIQIVINDLLKQGVLIQKESTMNTPVYPVPKPNGRWRMVLDYRAVNKVTPLIAVQNQHSYGILGSLFKGRYKTTIDLSNGFWAHPIVPEDYWITAFTWQGKQYCWTVLPQGFLNSPGLFNGDVVDLLQGIPNVEVYVDDVYISHDSEKEHLEYLDILFNRLKEAGYIISLKKSNIANSIVDFLGFQITNEGRGLTDTFKEKLENITAPTTLKQLQSILGKLNFARNFIPDFTELIAPLYALIPKSPKNYVPWQIEHSTTLETLITKLNGAEYLQGRKGDKTLIMKVNASYTTGYIRYYNEGEKKPISYVSIVFSKTELKFTELEKLLTTVHKGLLKALDLSMGQNIHVYSPIVSMQNIQKTPQTAKKALASRWLSWLSYLEDPRIRFFYDPQMPALKDLPAVDTGKDNKKHPSNFQHIFYTDGSAITSPTKEGHLNAGMGIVYFINKDGNLQKQQEWSISLGNHTAQFAEIAAFEFALKKCLPLGGNILVVTDSNYVAKAYNEELDVWASNGFVNNRKKPLKHISKWKSVADLKRLRPDVVVTHEPGHQKLDSSPHAYGNNLADQLATQASFKVHAGKRTADGSEFEKRTADGSEFESPKKKAKVE

SEQ ID NO: 7309 - protein, 2095 aa, synthetic construct
MPAAKRVKLDGGDKKYSIGLDIGTNSVGWAVITDEYKVPSKKFKVLGNTDRHSIKKNLIGALLFDSGETAEATRLKRTARRRYTRRKNRICYLQEIFSNEMAKVDDSFFHRLEESFLVEEDKKHERHPIFGNIVDEVAYHEKYPTIYHLRKKLVDSTDKADLRLIYLALAHMIKFRGHFLIEGDLNPDNSDVDKLFIQLVQTYNQLFEENPINASGVDAKAILSARLSKSRRLENLIAQLPGEKKNGLFGNLIALSLGLTPNFKSNFDLAEDAKLQLSKDTYDDDLDNLLAQIGDQYADLFLAAKNLSDAILLSDILRVNTEITKAPLSASMIKRYDEHHQDLTLLKALVRQQLPEKYKEIFFDQSKNGYAGYIDGGASQEEFYKFIKPILEKMDGTEELLVKLNREDLLRKQRTFDNGSIPHQIHLGELHAILRRQEDFYPFLKDNREKIEKILTFRIPYYVGPLARGNSRFAWMTRKSEETITPWNFEEVVDKGASAQSFIERMTNFDKNLPNEKVLPKHSLLYEYFTVYNELTKVKYVTEGMRKPAFLSGEQKKAIVDLLFKTNRKVTVKQLKEDYFKKIECFDSVEISGVEDRFNASLGTYHDLLKIIKDKDFLDNEENEDILEDIVLTLTLFEDREMIEERLKTYAHLFDDKVMKQLKRRRYTGWGRLSRKLINGIRDKQSGKTILDFLKSDGFANRNFMQLIHDDSLTFKEDIQKAQVSGQGDSLHEHIANLAGSPAIKKGILQTVKVVDELVKVMGRHKPENIVIEMARENQTTQKGQKNSRERMKRIEEGIKELGSQILKEHPVENTQLQNEKLYLYYLQNGRDMYVDQELDINRLSDYDVDHIVPQSFLKDDSIDNKVLTRSDKARGKSDNVPSEEVVKKMKNYWRQLLNAKLITQRKFDNLTKAERGGLSELDKAGFIKRQLVETRQITKHVAQILDSRMNTKYDENDKLIREVKVITLKSKLVSDFRKDFQFYKVREINNYHHAHDAYLNAVVGTALIKKYPKLESEFVYGDYKVYDVRKMIAKSEQEIGKATAKYFFYSNIMNFFKTEITLANGEIRKRPLIETNGETGEIVWDKGRDFATVRKVLSMPQVNIVKKTEVQTGGFSKESILPKRNSDKLIARKKDWDPKKYGGFDSPTVAYSVLVVAKVEKGKSKKLKSVKELLGITIMERSSFEKNPIDFLEAKGYKEVKKDLIIKLPKYSLFELENGRKRMLASAGELQKGNELALPSKYVNFLYLASHYEKLKGSPEDNEQKQLFVEQHKHYLDEIIEQISEFSKRVILADANLDKVLSAYNKHRDKPIREQAENIIHLFTLTNLGAPAAFKYFDTTIDRKRYTSTKEVLDATLIHQSITGLYETRIDLSQLGGDGGGSSEAAAKGGGGGTLQLEEEYRLFEPESTQKQEMDIWLKNFPQAWAETGGMGTAHCQAPVLIQLKATATPISIRQYPMPHEAYQGIKPHIRRMLDQGILKPCQSPWNTPLLPVKKPGTEDYRPVQDLREVNKRVEDIHPTVPNPYNLLSTLPPSHPWYTVLDLKDAFFCLRLHSESQLLFAFEWRDPEIGLSGQLTWTRLPQGFKNSPTLFNEALHSDLADFRVRYPALVLLQYVDDLLLAAATRTECLEGTKALLETLGNKGYRASAKKAQICLQEVTYLGYSLKDGQRWLTKARKEAILSIPVPKNSRQVREFLGKAGYCRLFIPGFAELAAPLYPLTRPGTLFQWGTEQQLAFEDIKKALLSSPALGLPDITKPFELFIDENSGFAKGVLVQKLGPWKRPVAYLSKKLDTVASGWPPCLRMVAAIAILVKDAGKLTLGQPLTILTSHPVEALVRQPPNKWLSNARMTHYQAMLLDAERVHFGPTVSLNPATLLPLPSGGNHHDCLQILAETHGTRPDLTDQPLPDADLTWYTDGSSFIRNGEREAGAAVTTESEVIWAAPLPPGTSAQRAELIALTQALKMAEGKKLTVYTDSRYAFATTHVHGEIYRRRGWLTSEGKEIKNKNEILALLEALFLPKRLSIIHCPGHQKGDSPQAKGNRLADDTAKKAATETHSSLTVLPAGKRTADGSEFEKRTADGSEFESPKKKAKVE

SEQ ID NO: 7310 - protein, 2094 aa, synthetic construct
MPAAKRVKLDGGDKKYSIGLDIGTNSVGWAVITDEYKVPSKKFKVLGNTDRHSIKKNLIGALLFDSGETAEATRLKRTARRRYTRRKNRICYLQEIFSNEMAKVDDSFFHRLEESFLVEEDKKHERHPIFGNIVDEVAYHEKYPTIYHLRKKLVDSTDKADLRLIYLALAHMIKFRGHFLIEGDLNPDNSDVDKLFIQLVQTYNQLFEENPINASGVDAKAILSARLSKSRRLENLIAQLPGEKKNGLFGNLIALSLGLTPNFKSNFDLAEDAKLQLSKDTYDDDLDNLLAQIGDQYADLFLAAKNLSDAILLSDILRVNTEITKAPLSASMIKRYDEHHQDLTLLKALVRQQLPEKYKEIFFDQSKNGYAGYIDGGASQEEFYKFIKPILEKMDGTEELLVKLNREDLLRKQRTFDNGSIPHQIHLGELHAILRRQEDFYPFLKDNREKIEKILTFRIPYYVGPLARGNSRFAWMTRKSEETITPWNFEEVVDKGASAQSFIERMTNFDKNLPNEKVLPKHSLLYEYFTVYNELTKVKYVTEGMRKPAFLSGEQKKAIVDLLFKTNRKVTVKQLKEDYFKKIECFDSVEISGVEDRFNASLGTYHDLLKIIKDKDFLDNEENEDILEDIVLTLTLFEDREMIEERLKTYAHLFDDKVMKQLKRRRYTGWGRLSRKLINGIRDKQSGKTILDFLKSDGFANRNFMQLIHDDSLTFKEDIQKAQVSGQGDSLHEHIANLAGSPAIKKGILQTVKVVDELVKVMGRHKPENIVIEMARENQTTQKGQKNSRERMKRIEEGIKELGSQILKEHPVENTQLQNEKLYLYYLQNGRDMYVDQELDINRLSDYDVDHIVPQSFLKDDSIDNKVLTRSDKARGKSDNVPSEEVVKKMKNYWRQLLNAKLITQRKFDNLTKAERGGLSELDKAGFIKRQLVETRQITKHVAQILDSRMNTKYDENDKLIREVKVITLKSKLVSDFRKDFQFYKVREINNYHHAHDAYLNAVVGTALIKKYPKLESEFVYGDYKVYDVRKMIAKSEQEIGKATAKYFFYSNIMNFFKTEITLANGEIRKRPLIETNGETGEIVWDKGRDFATVRKVLSMPQVNIVKKTEVQTGGFSKESILPKRNSDKLIARKKDWDPKKYGGFDSPTVAYSVLVVAKVEKGKSKKLKSVKELLGITIMERSSFEKNPIDFLEAKGYKEVKKDLIIKLPKYSLFELENGRKRMLASAGELQKGNELALPSKYVNFLYLASHYEKLKGSPEDNEQKQLFVEQHKHYLDEIIEQISEFSKRVILADANLDKVLSAYNKHRDKPIREQAENIIHLFTLTNLGAPAAFKYFDTTIDRKRYTSTKEVLDATLIHQSITGLYETRIDLSQLGGDGGGSSEAAAKGGGGGVLNLEEEYRLHEKPVPSSIDPSWLQLFPTVWAERAGMGLANQVPPVVVELRSGASPVAVRQYPMSKEAREGIRPHIQKFLDLGVLVPCRSPWNTPLLPVKKPGTNDYRPVQDLREINKRVQDIHPTVPNPYNLLSSLPPSYTWYSVLDLKDAFFCLRLHPNSQPLFAFEWKDPEKGNTGQLTWTRLPQGFKNSPTLFNEALHRDLAPFRALNPQVVLLQYVDDLLVAAPTYEDCKKGTQKLLQELSKLGYRVSAKKAQLCQREVTYLGYLLKEGKRWLTPARKATVMKIPVPTTPRQVREFLGKAGFCRLFIPGFASLAAPLYPLTKPSIPFIWTEEHQQAFDHIKKALLSAPALALPDLTKPFTLYIDERAGVARGVLTQTLGPWRRPVAYLSKKLDPVASGWPTCLKAVAAVALLLKDADKLTLGQNVTVIASHSLESIVRQPPDRWMTNARMTHYQSLLLNERVSFAPPAVLNPATLLPVESEATPVHRCSEILAEETGTRRDLEDQPLPGVPTWYTDGSSFITEGKRRAGAPIVDGKRTVWASSLPEGTSAQKAELVALTQALRLAEGKNINIYTDSRYAFATAHIHGAIYKQRGWLTSAGKDIKNKEEILALLEAIHLPRRVAIIHCPGHQRGSNPVATGNRRADEAAKQAALSTRVLAGTTKPAGKRTADGSEFEKRTADGSEFESPKKKAKVE

SEQ ID NO: 7311 - protein, 2218 aa, synthetic construct
MPAAKRVKLDGGDKKYSIGLDIGTNSVGWAVITDEYKVPSKKFKVLGNTDRHSIKKNLIGALLFDSGETAEATRLKRTARRRYTRRKNRICYLQEIFSNEMAKVDDSFFHRLEESFLVEEDKKHERHPIFGNIVDEVAYHEKYPTIYHLRKKLVDSTDKADLRLIYLALAHMIKFRGHFLIEGDLNPDNSDVDKLFIQLVQTYNQLFEENPINASGVDAKAILSARLSKSRRLENLIAQLPGEKKNGLFGNLIALSLGLTPNFKSNFDLAEDAKLQLSKDTYDDDLDNLLAQIGDQYADLFLAAKNLSDAILLSDILRVNTEITKAPLSASMIKRYDEHHQDLTLLKALVRQQLPEKYKEIFFDQSKNGYAGYIDGGASQEEFYKFIKPILEKMDGTEELLVKLNREDLLRKQRTFDNGSIPHQIHLGELHAILRRQEDFYPFLKDNREKIEKILTFRIPYYVGPLARGNSRFAWMTRKSEETITPWNFEEVVDKGASAQSFIERMTNFDKNLPNEKVLPKHSLLYEYFTVYNELTKVKYVTEGMRKPAFLSGEQKKAIVDLLFKTNRKVTVKQLKEDYFKKIECFDSVEISGVEDRFNASLGTYHDLLKIIKDKDFLDNEENEDILEDIVLTLTLFEDREMIEERLKTYAHLFDDKVMKQLKRRRYTGWGRLSRKLINGIRDKQSGKTILDFLKSDGFANRNFMQLIHDDSLTFKEDIQKAQVSGQGDSLHEHIANLAGSPAIKKGILQTVKVVDELVKVMGRHKPENIVIEMARENQTTQKGQKNSRERMKRIEEGIKELGSQILKEHPVENTQLQNEKLYLYYLQNGRDMYVDQELDINRLSDYDVDHIVPQSFLKDDSIDNKVLTRSDKARGKSDNVPSEEVVKKMKNYWRQLLNAKLITQRKFDNLTKAERGGLSELDKAGFIKRQLVETRQITKHVAQILDSRMNTKYDENDKLIREVKVITLKSKLVSDFRKDFQFYKVREINNYHHAHDAYLNAVVGTALIKKYPKLESEFVYGDYKVYDVRKMIAKSEQEIGKATAKYFFYSNIMNFFKTEITLANGEIRKRPLIETNGETGEIVWDKGRDFATVRKVLSMPQVNIVKKTEVQTGGFSKESILPKRNSDKLIARKKDWDPKKYGGFDSPTVAYSVLVVAKVEKGKSKKLKSVKELLGITIMERSSFEKNPIDFLEAKGYKEVKKDLIIKLPKYSLFELENGRKRMLASAGELQKGNELALPSKYVNFLYLASHYEKLKGSPEDNEQKQLFVEQHKHYLDEIIEQISEFSKRVILADANLDKVLSAYNKHRDKPIREQAENIIHLFTLTNLGAPAAFKYFDTTIDRKRYTSTKEVLDATLIHQSITGLYETRIDLSQLGGDGGGSSEAAAKGGGGGTLGDQGSRGSDPLPEPRVTLTVEGIPTEFLVNTGAEHSVLTKPMGKMGSKRTVVAGATGSKVYPWTTKRLLKIGQKQVTHSFLVIPECPAPLLGRDLLTKLKAQIQFSTEGPQVTWEDRPAMCLVLNLEEEYRLHEKPVPPSIDPSWLQLFPMVWAEKAGMGLANQVPPVVVELKSDASPVAVRQYPMSKEAREGIRPHIQRFLDLGILVPCQSPWNTPLLPVKKPGTNDYRPVQDLREVNKRVQDIHPTVPNPYNLLSSLPPSHTWYSVLDLKDAFFCLKLHPNSQPLFAFEWRDPEKGNTGQLTWTRLPQGFKNSPTLFNEALHRDLASFRALNPQVVMLQYVDDLLVAAPTYRDCKEGTRRLLQELSKLGYRVSAKKAQLCREEVTYLGYLLKGGKRWLTPARKATVMKIPTPTTPRQVREFLGTAGFCRLWIPGFASLAAPLYPLTRPKVPFTWTEAHQEAFGRIKEALLSAPALALPDLTKPFALYVDEKEGVARGVLTQTLGPWRRPVAYLSKKLDPVASGWPTCLKAIAAVALLLKDADKLTLGQNVLVIAPHNLESIVRQPPDRWMTNARMTHYQSLLLNERVSFAPPAILNPATLLPVESDDTPIHICSEILAEETGTRPDLRDQPLPGVPAWYTDGSSFIMDGRRQAGAAIVDNKRTVWASNLPEGTSAQKAELIALTQALRLAEGKSINIYTDSRYAFATAHVHGAIYKQRGWLTSAGKDIKNKEEILALLEAIHLPKRVAIIHCPGHQRGTDPVATGNRKADEAAKQAAQSTRILTETTKNAGKRTADGSEFEKRTADGSEFESPKKKAKVE

SEQ ID NO: 7312 - protein, 2096 aa, synthetic construct
MPAAKRVKLDGGDKKYSIGLDIGTNSVGWAVITDEYKVPSKKFKVLGNTDRHSIKKNLIGALLFDSGETAEATRLKRTARRRYTRRKNRICYLQEIFSNEMAKVDDSFFHRLEESFLVEEDKKHERHPIFGNIVDEVAYHEKYPTIYHLRKKLVDSTDKADLRLIYLALAHMIKFRGHFLIEGDLNPDNSDVDKLFIQLVQTYNQLFEENPINASGVDAKAILSARLSKSRRLENLIAQLPGEKKNGLFGNLIALSLGLTPNFKSNFDLAEDAKLQLSKDTYDDDLDNLLAQIGDQYADLFLAAKNLSDAILLSDILRVNTEITKAPLSASMIKRYDEHHQDLTLLKALVRQQLPEKYKEIFFDQSKNGYAGYIDGGASQEEFYKFIKPILEKMDGTEELLVKLNREDLLRKQRTFDNGSIPHQIHLGELHAILRRQEDFYPFLKDNREKIEKILTFRIPYYVGPLARGNSRFAWMTRKSEETITPWNFEEVVDKGASAQSFIERMTNFDKNLPNEKVLPKHSLLYEYFTVYNELTKVKYVTEGMRKPAFLSGEQKKAIVDLLFKTNRKVTVKQLKEDYFKKIECFDSVEISGVEDRFNASLGTYHDLLKIIKDKDFLDNEENEDILEDIVLTLTLFEDREMIEERLKTYAHLFDDKVMKQLKRRRYTGWGRLSRKLINGIRDKQSGKTILDFLKSDGFANRNFMQLIHDDSLTFKEDIQKAQVSGQGDSLHEHIANLAGSPAIKKGILQTVKVVDELVKVMGRHKPENIVIEMARENQTTQKGQKNSRERMKRIEEGIKELGSQILKEHPVENTQLQNEKLYLYYLQNGRDMYVDQELDINRLSDYDVDHIVPQSFLKDDSIDNKVLTRSDKARGKSDNVPSEEVVKKMKNYWRQLLNAKLITQRKFDNLTKAERGGLSELDKAGFIKRQLVETRQITKHVAQILDSRMNTKYDENDKLIREVKVITLKSKLVSDFRKDFQFYKVREINNYHHAHDAYLNAVVGTALIKKYPKLESEFVYGDYKVYDVRKMIAKSEQEIGKATAKYFFYSNIMNFFKTEITLANGEIRKRPLIETNGETGEIVWDKGRDFATVRKVLSMPQVNIVKKTEVQTGGFSKESILPKRNSDKLIARKKDWDPKKYGGFDSPTVAYSVLVVAKVEKGKSKKLKSVKELLGITIMERSSFEKNPIDFLEAKGYKEVKKDLIIKLPKYSLFELENGRKRMLASAGELQKGNELALPSKYVNFLYLASHYEKLKGSPEDNEQKQLFVEQHKHYLDEIIEQISEFSKRVILADANLDKVLSAYNKHRDKPIREQAENIIHLFTLTNLGAPAAFKYFDTTIDRKRYTSTKEVLDATLIHQSITGLYETRIDLSQLGGDGGGSSEAAAKGGGGGLGIEDEYRLHETSTEPDVSLGSTWLSDFPQAWAETGGMGLAVRQAPLIIPLKATSTPVSIQQYPMSHEARLGIKPHIQRLLDQGILVPCQSPWNTPLLPVKKPGTNDYRPVQDLREVNKRVEDIHPTVPNPYNLLSGLPPSHQWYTVLDLKDAFFCLRLHPTSQPLFAFEWRDPGMGISGQLTWTRLPQGFKNSPTLFNEALHRDLADFRIQHPDLILLQYVDDILLAATSELDCQQGTRALLQTLGDLGYRASAKKAQICQKQVKYLGYLLREGQRWLTEARKETVMGQPVPKTPRQLREFLGKAGFCRLFIPGFAEMAAPLYPLTKPGTLFSWGPDQQKAYQEIKQALLTAPALGLPDLTKPFELFVDEKQGYAKGVLTQKLGPWRRPVAYLSKKLDPVAAGWPPCLRMVAAIAVLTKDAGKLTMGQPLVILAPHAVEALVKQPPDRWLSNARMTHYQAMLLDTDRVQFGPVVALNPATLLPLPEEGAPHDCLEILAETHGTRPDLTDQPIPDADHTWYTDGSSFLQEGQRKAGAAVTTETEVIWAGALPAGTSAQRAELIALTQALKMAEGKRLNVYTDSRYAFATAHIHGEIYRRRGWLTSEGREIKNKSEILALLKALFLPKRLSIIHCLGHQKGDSAEARGNRLADQAAREAAIKTPPDTSTLLIAGKRTADGSEFEKRTADGSEFESPKKKAKVE

SEQ ID NO: 7313 - protein, 2116 aa, synthetic construct
MPAAKRVKLDGGDKKYSIGLDIGTNSVGWAVITDEYKVPSKKFKVLGNTDRHSIKKNLIGALLFDSGETAEATRLKRTARRRYTRRKNRICYLQEIFSNEMAKVDDSFFHRLEESFLVEEDKKHERHPIFGNIVDEVAYHEKYPTIYHLRKKLVDSTDKADLRLIYLALAHMIKFRGHFLIEGDLNPDNSDVDKLFIQLVQTYNQLFEENPINASGVDAKAILSARLSKSRRLENLIAQLPGEKKNGLFGNLIALSLGLTPNFKSNFDLAEDAKLQLSKDTYDDDLDNLLAQIGDQYADLFLAAKNLSDAILLSDILRVNTEITKAPLSASMIKRYDEHHQDLTLLKALVRQQLPEKYKEIFFDQSKNGYAGYIDGGASQEEFYKFIKPILEKMDGTEELLVKLNREDLLRKQRTFDNGSIPHQIHLGELHAILRRQEDFYPFLKDNREKIEKILTFRIPYYVGPLARGNSRFAWMTRKSEETITPWNFEEVVDKGASAQSFIERMTNFDKNLPNEKVLPKHSLLYEYFTVYNELTKVKYVTEGMRKPAFLSGEQKKAIVDLLFKTNRKVTVKQLKEDYFKKIECFDSVEISGVEDRFNASLGTYHDLLKIIKDKDFLDNEENEDILEDIVLTLTLFEDREMIEERLKTYAHLFDDKVMKQLKRRRYTGWGRLSRKLINGIRDKQSGKTILDFLKSDGFANRNFMQLIHDDSLTFKEDIQKAQVSGQGDSLHEHIANLAGSPAIKKGILQTVKVVDELVKVMGRHKPENIVIEMARENQTTQKGQKNSRERMKRIEEGIKELGSQILKEHPVENTQLQNEKLYLYYLQNGRDMYVDQELDINRLSDYDVDHIVPQSFLKDDSIDNKVLTRSDKARGKSDNVPSEEVVKKMKNYWRQLLNAKLITQRKFDNLTKAERGGLSELDKAGFIKRQLVETRQITKHVAQILDSRMNTKYDENDKLIREVKVITLKSKLVSDFRKDFQFYKVREINNYHHAHDAYLNAVVGTALIKKYPKLESEFVYGDYKVYDVRKMIAKSEQEIGKATAKYFFYSNIMNFFKTEITLANGEIRKRPLIETNGETGEIVWDKGRDFATVRKVLSMPQVNIVKKTEVQTGGFSKESILPKRNSDKLIARKKDWDPKKYGGFDSPTVAYSVLVVAKVEKGKSKKLKSVKELLGITIMERSSFEKNPIDFLEAKGYKEVKKDLIIKLPKYSLFELENGRKRMLASAGELQKGNELALPSKYVNFLYLASHYEKLKGSPEDNEQKQLFVEQHKHYLDEIIEQISEFSKRVILADANLDKVLSAYNKHRDKPIREQAENIIHLFTLTNLGAPAAFKYFDTTIDRKRYTSTKEVLDATLIHQSITGLYETRIDLSQLGGDGGGSSEAAAKGGGGGTLNIEDEYRLHETSKEPDVSLGSTWLSDFPQAWAETGGMGLAVRQAPLIIPLKATSTPVSIKQYPMSQEARLGIKPHIQRLLDQGILVPCQSPWNTPLLPVKKPGTNDYRPVQDLREVNKRVEDIHPTVPNPYNLLSGLPPSHQWYTVLDLKDAFFCLRLHPTSQPLFAFEWRDPEMGISGQLTWTRLPQGFKNSPTLFNEALHRDLADFRIQHPDLILLQYVDDLLLAATSELDCQQGTRALLQTLGNLGYRASAKKAQICQKQVKYLGYLLKEGQRWLTEARKETVMGQPTPKTPRQLREFLGKAGFCRLFIPGFAEMAAPLYPLTKPGTLFNWGPDQQKAYQEIKQALLTAPALGLPDLTKPFELFVDEKQGYAKGVLTQKLGPWRRPVAYLSKKLDPVAAGWPPCLRMVAAIAVLTKDAGKLTMGQPLVILAPHAVEALVKQPPDRWLSNARMTHYQALLLDTDRVQFGPVVALNPATLLPLPEEGLQHNCLDILAEAHGTRPDLTDQPLPDADHTWYTDGSSLLQEGQRKAGAAVTTETEVIWAKALPAGTSAQRAELIALTQALKMAEGKKLNVYTDSRYAFATAHIHGEIYRRRGWLTSEGKEIKNKDEILALLKALFLPKRLSIIHCPGHQKGHSAEARGNRMADQAARKAAITETPDTSTLLIENSSPSGGSKRTADGSEFEAGKRTADGSEFEKRTADGSEFESPKKKAKVE

SEQ ID NO: 7314 - protein, 2116 aa, synthetic construct; identical to SEQ ID NO: 7313

SEQ ID NO: 7315 - protein, 2087 aa, synthetic construct
MPAAKRVKLDGGDKKYSIGLDIGTNSVGWAVITDEYKVPSKKFKVLGNTDRHSIKKNLIGALLFDSGETAEATRLKRTARRRYTRRKNRICYLQEIFSNEMAKVDDSFFHRLEESFLVEEDKKHERHPIFGNIVDEVAYHEKYPTIYHLRKKLVDSTDKADLRLIYLALAHMIKFRGHFLIEGDLNPDNSDVDKLFIQLVQTYNQLFEENPINASGVDAKAILSARLSKSRRLENLIAQLPGEKKNGLFGNLIALSLGLTPNFKSNFDLAEDAKLQLSKDTYDDDLDNLLAQIGDQYADLFLAAKNLSDAILLSDILRVNTEITKAPLSASMIKRYDEHHQDLTLLKALVRQQLPEKYKEIFFDQSKNGYAGYIDGGASQEEFYKFIKPILEKMDGTEELLVKLNREDLLRKQRTFDNGSIPHQIHLGELHAILRRQEDFYPFLKDNREKIEKILTFRIPYYVGPLARGNSRFAWMTRKSEETITPWNFEEVVDKGASAQSFIERMTNFDKNLPNEKVLPKHSLLYEYFTVYNELTKVKYVTEGMRKPAFLSGEQKKAIVDLLFKTNRKVTVKQLKEDYFKKIECFDSVEISGVEDRFNASLGTYHDLLKIIKDKDFLDNEENEDILEDIVLTLTLFEDREMIEERLKTYAHLFDDKVMKQLKRRRYTGWGRLSRKLINGIRDKQSGKTILDFLKSDGFANRNFMQLIHDDSLTFKEDIQKAQVSGQGDSLHEHIANLAGSPAIKKGILQTVKVVDELVKVMGRHKPENIVIEMARENQTTQKGQKNSRERMKRIEEGIKELGSQILKEHPVENTQLQNEKLYLYYLQNGRDMYVDQELDINRLSDYDVDHIVPQSFLKDDSIDNKVLTRSDKARGKSDNVPSEEVVKKMKNYWRQLLNAKLITQRKFDNLTKAERGGLSELDKAGFIKRQLVETRQITKHVAQILDSRMNTKYDENDKLIREVKVITLKSKLVSDFRKDFQFYKVREINNYHHAHDAYLNAVVGTALIKKYPKLESEFVYGDYKVYDVRKMIAKSEQEIGKATAKYFFYSNIMNFFKTEITLANGEIRKRPLIETNGETGEIVWDKGRDFATVRKVLSMPQVNIVKKTEVQTGGFSKESILPKRNSDKLIARKKDWDPKKYGGFDSPTVAYSVLVVAKVEKGKSKKLKSVKELLGITIMERSSFEKNPIDFLEAKGYKEVKKDLIIKLPKYSLFELENGRKRMLASAGELQKGNELALPSKYVNFLYLASHYEKLKGSPEDNEQKQLFVEQHKHYLDEIIEQISEFSKRVILADANLDKVLSAYNKHRDKPIREQAENIIHLFTLTNLGAPAAFKYFDTTIDRKRYTSTKEVLDATLIHQSITGLYETRIDLSQLGGDGGGSSEAAAKGGGGGIPWLMKKPLQLTTLVPLQEYEERLLKQTMLTGSYKEKLQSLFLKYDALWQHWENQVGHRRIKPHHIATGTVNPRPQKQYPINPKAKASIQTVINDLLKQGVLIQQNSIMNTPVYPVPKPDGKWRMVLDYREVNKTIPLIAAQNQHSAGILSSIFRGKYKTTLDLSNGFWAHSITPESYWLTAFTWLGQQYCWTRLPQGFLNSPALFNADVVDLLKEVPNVQVYVDDIYISHDDPREHLEQLEKVFSLLLNAGYVVSLKKSEIAQHEVEFLGFNITKEGRGLTETFKQKLLNITPPRDLKQLQSILGLLNFARNFIPNFSELVKPLYNIIATAPGKYITWTTDNSQQLQNIISMLNSAENLEERNPEVRLIMKVNTSPSAGYIRFYNEFAKRPIMYLNYVYTKAEVKFTNTEKLLTTIHKGLIKALDLGMGQEILVYSPIVSMTKIQKTPLPERKALPIRWITWMSYLEDPRIQFHYDKTLPELQQVPTVTDDIIAKIKHPSEFSMVFYTDGSAIKHPNVNKSHNAGMGIAQVQFKPEFTVINTWSIPLGDHTAQLAEVAAVEFACKKALKIDGPVLIVTDSFYVAESVNKELPYWQSNGFFNNKKKPLKHVSKWKSIADCIQLKPDIIIIHEKGHQPTASTFHTEGNNLADKLATQGSYVVNAGKRTADGSEFEKRTADGSEFESPKKKAKVE

SEQ ID NO: 7316 - protein, 2096 aa, synthetic construct
MPAAKRVKLDGGDKKYSIGLDIGTNSVGWAVITDEYKVPSKKFKVLGNTDRHSIKKNLIGALLFDSGETAEATRLKRTARRRYTRRKNRICYLQEIFSNEMAKVDDSFFHRLEESFLVEEDKKHERHPIFGNIVDEVAYHEKYPTIYHLRKKLVDSTDKADLRLIYLALAHMIKFRGHFLIEGDLNPDNSDVDKLFIQLVQTYNQLFEENPINASGVDAKAILSARLSKSRRLENLIAQLPGEKKNGLFGNLIALSLGLTPNFKSNFDLAEDAKLQLSKDTYDDDLDNLLAQIGDQYADLFLAAKNLSDAILLSDILRVNTEITKAPLSASMIKRYDEHHQDLTLLKALVRQQLPEKYKEIFFDQSKNGYAGYIDGGASQEEFYKFIKPILEKMDGTEELLVKLNREDLLRKQRTFDNGSIPHQIHLGELHAILRRQEDFYPFLKDNREKIEKILTFRIPYYVGPLARGNSRFAWMTRKSEETITPWNFEEVVDKGASAQSFIERMTNFDKNLPNEKVLPKHSLLYEYFTVYNELTKVKYVTEGMRKPAFLSGEQKKAIVDLLFKTNRKVTVKQLKEDYFKKIECFDSVEISGVEDRFNASLGTYHDLLKIIKDKDFLDNEENEDILEDIVLTLTLFEDREMIEERLKTYAHLFDDKVMKQLKRRRYTGWGRLSRKLINGIRDKQSGKTILDFLKSDGFANRNFMQLIHDDSLTFKEDIQKAQVSGQGDSLHEHIANLAGSPAIKKGILQTVKVVDELVKVMGRHKPENIVIEMARENQTTQKGQKNSRERMKRIEEGIKELGSQILKEHPVENTQLQNEKLYLYYLQNGRDMYVDQELDINRLSDYDVDHIVPQSFLKDDSIDNKVLTRSDKARGKSDNVPSEEVVKKMKNYWRQLLNAKLITQRKFDNLTKAERGGLSELDKAGFIKRQLVETRQITKHVAQILDSRMNTKYDENDKLIREVKVITLKSKLVSDFRKDFQFYKVREINNYHHAHDAYLNAVVGTALIKKYPKLESEFVYGDYKVYDVRKMIAKSEQEIGKATAKYFFYSNIMNFFKTEITLANGEIRKRPLIETNGETGEIVWDKGRDFATVRKVLSMPQVNIVKKTEVQTGGFSKESILPKRNSDKLIARKKDWDPKKYGGFDSPTVAYSVLVVAKVEKGKSKKLKSVKELLGITIMERSSFEKNPIDFLEAKGYKEVKKDLIIKLPKYSLFELENGRKRMLASAGELQKGNELALPSKYVNFLYLASHYEKLKGSPEDNEQKQLFVEQHKHYLDEIIEQISEFSKRVILADANLDKVLSAYNKHRDKPIREQAENIIHLFTLTNLGAPAAFKYFDTTIDRKRYTSTKEVLDATLIHQSITGLYETRIDLSQLGGDGGGSSEAAAKGGGGGTLNIEDEYRLHETSKEPDVPLGSTWLSDFPQAWAETGGMGLAVRQAPLIIPLKATSTPVSIKQYPMSQEARLGIKPHIQRLLDQGILVPCQSPWNTPLLPVKKPGTNDYRPVQDLREVNKRVEDIHPTVPNPYNLLSGLPPSHQWYTVLDLKDAFFCLRLHPTSQPLFAFEWRDPEMGISGQLTWTRLPQGFKNSPTLFNEALHRDLADFRIQHPDLILLQYVDDLLLAATSEQDCQRGTRALLQTLGNLGYRASAKKAQICQKQVKYLGYLLKEGQRWLTEARKETVMGQPTPKTPRQLREFLGTAGFCRLWIPGFAEMAAPLYPLTKPGTLFNWGPDQQKAYQEIKQALLTAPALGLPDLTKPFELFVDEKQGYAKGVLTQKLGPWRRPVAYLSKKLDPVAAGWPPCLRMVAAIAVLTKDAGKLTMGQPLVILAPHAVEALVKQPPDRWLSNARMTHYQAMLLDTDRVQFGPVVALNPATLLPLPEKEAPHDCLEILAETHGTRPDLTDQPIPDADYTWYTDGSSFLQEGQRRAGAAVTTETEVIWARALPAGTSAQRAELIALTQALKMAEGKKLNVYTDSRYAFATAHVHGEIYRRRGWLTSEGREIKNKNEILALLKALFLPKRLSIIHCPGHQKGNSAEARGNRMADQAAREAAMKAVLETSTLLAGKRTADGSEFEKRTADGSEFESPKKKAKVE

SEQ ID NO: 7317 - protein, 2096 aa, synthetic construct
MPAAKRVKLDGGDKKYSIGLDIGTNSVGWAVITDEYKVPSKKFKVLGNTDRHSIKKNLIGALLFDSGETAEATRLKRTARRRYTRRKNRICYLQEIFSNEMAKVDDSFFHRLEESFLVEEDKKHERHPIFGNIVDEVAYHEKYPTIYHLRKKLVDSTDKADLRLIYLALAHMIKFRGHFLIEGDLNPDNSDVDKLFIQLVQTYNQLFEENPINASGVDAKAILSARLSKSRRLENLIAQLPGEKKNGLFGNLIALSLGLTPNFKSNFDLAEDAKLQLSKDTYDDDLDNLLAQIGDQYADLFLAAKNLSDAILLSDILRVNTEITKAPLSASMIKRYDEHHQDLTLLKALVRQQLPEKYKEIFFDQSKNGYAGYIDGGASQEEFYKFIKPILEKMDGTEELLVKLNREDLLRKQRTFDNGSIPHQIHLGELHAILRRQEDFYPFLKDNREKIEKILTFRIPYYVGPLARGNSRFAWMTRKSEETITPWNFEEVVDKGASAQSFIERMTNFDKNLPNEKVLPKHSLLYEYFTVYNELTKVKYVTEGMRKPAFLSGEQKKAIVDLLFKTNRKVTVKQLKEDYFKKIECFDSVEISGVEDRFNASLGTYHDLLKIIKDKDFLDNEENEDILEDIVLTLTLFEDREMIEERLKTYAHLFDDKVMKQLKRRRYTGWGRLSRKLINGIRDKQSGKTILDFLKSDGFANRNFMQLIHDDSLTFKEDIQKAQVSGQGDSLHEHIANLAGSPAIKKGILQTVKVVDELVKVMGRHKPENIVIEMARENQTTQKGQKNSRERMKRIEEGIKELGSQILKEHPVENTQLQNEKLYLYYLQNGRDMYVDQELDINRLSDYDVDHIVPQSFLKDDSIDNKVLTRSDKARGKSDNVPSEEVVKKMKNYWRQLLNAKLITQRKFDNLTKAERGGLSELDKAGFIKRQLVETRQITKHVAQILDSRMNTKYDENDKLIREVKVITLKSKLVSDFRKDFQFYKVREINNYHHAHDAYLNAVVGTALIKKYPKLESEFVYGDYKVYDVRKMIAKSEQEIGKATAKYFFYSNIMNFFKTEITLANGEIRKRPLIETNGETGEIVWDKGRDFATVRKVLSMPQVNIVKKTEVQTGGFSKESILPKRNSDKLIARKKDWDPKKYGGFDSPTVAYSVLVVAKVEKGKSKKLKSVKELLGITIMERSSFEKNPIDFLEAKGYKEVKKDLIIKLPKYSLFELENGRKRMLASAGELQKGNELALPSKYVNFLYLASHYEKLKGSPEDNEQKQLFVEQHKHYLDEIIEQISEFSKRVILADANLDKVLSAYNKHRDKPIREQAENIIHLFTLTNLGAPAAFKYFDTTIDRKRYTSTKEVLDATLIHQSITGLYETRIDLSQLGGDGGGSSEAAAKGGGGGTLNIEDEYRLHETSKEPDVPLGSTWLSDFPQAWAETGGMGLAVRQAPLIIPLKATSTPVSIKQYPMSQEARLGIKPHIQRLLDQGILVPCQSPWNTPLLPVKKPGTNDYRPVQDLREVNKRVEDIHPTVPNPYNLLSGLPPSHQWYTVLDLKDAFFCLRLHPTSQPLFAFEWRDPEMGISGQLTWTRLPQGFKNSPTLFNEALHRDLADFRIQHPDLILLQYVDDLLLAATSEQDCQRGTRALLQTLGNLGYRASAKKAQICQKQVKYLGYLLKEGQRWLTEARKETVMGQPTPKTPRQLREFLGKAGFCRLFIPGFAEMAAPLYPLTKPGTLFNWGPDQQKAYQEIKQALLTAPALGLPDLTKPFELFVDEKQGYAKGVLTQKLGPWRRPVAYLSKKLDPVAAGWPPCLRMVAAIAVLTKDAGKLTMGQPLVILAPHAVEALVKQPPDRWLSNARMTHYQAMLLDTDRVQFGPVVALNPATLLPLPEKEAPHDCLEILAETHGTRPDLTDQPIPDADYTWYTDGSSFLQEGQRRAGAAVTTETEVIWARALPAGTSAQRAELIALTQALKMAEGKKLNVYTDSRYAFATAHVHGEIYRRRGWLTSEGREIKNKNEILALLKALFLPKRLSIIHCPGHQKGNSAEARGNRMADQAAREAAMKAVLETSTLLAGKRTADGSEFEKRTADGSEFESPKKKAKVE

SEQ ID NO: 7318 - protein, 2098 aa, synthetic construct
MPAAKRVKLDGGDKKYSIGLDIGTNSVGWAVITDEYKVPSKKFKVLGNTDRHSIKKNLIGALLFDSGETAEATRLKRTARRRYTRRKNRICYLQEIFSNEMAKVDDSFFHRLEESFLVEEDKKHERHPIFGNIVDEVAYHEKYPTIYHLRKKLVDSTDKADLRLIYLALAHMIKFRGHFLIEGDLNPDNSDVDKLFIQLVQTYNQLFEENPINASGVDAKAILSARLSKSRRLENLIAQLPGEKKNGLFGNLIALSLGLTPNFKSNFDLAEDAKLQLSKDTYDDDLDNLLAQIGDQYADLFLAAKNLSDAILLSDILRVNTEITKAPLSASMIKRYDEHHQDLTLLKALVRQQLPEKYKEIFFDQSKNGYAGYIDGGASQEEFYKFIKPILEKMDGTEELLVKLNREDLLRKQRTFDNGSIPHQIHLGELHAILRRQEDFYPFLKDNREKIEKILTFRIPYYVGPLARGNSRFAWMTRKSEETITPWNFEEVVDKGASAQSFIERMTNFDKNLPNEKVLPKHSLLYEYFTVYNELTKVKYVTEGMRKPAFLSGEQKKAIVDLLFKTNRKVTVKQLKEDYFKKIECFDSVEISGVEDRFNASLGTYHDLLKIIKDKDFLDNEENEDILEDIVLTLTLFEDREMIEERLKTYAHLFDDKVMKQLKRRRYTGWGRLSRKLINGIRDKQSGKTILDFLKSDGFANRNFMQLIHDDSLTFKEDIQKAQVSGQGDSLHEHIANLAGSPAIKKGILQTVKVVDELVKVMGRHKPENIVIEMARENQTTQKGQKNSRERMKRIEEGIKELGSQILKEHPVENTQLQNEKLYLYYLQNGRDMYVDQELDINRLSDYDVDHIVPQSFLKDDSIDNKVLTRSDKARGKSDNVPSEEVVKKMKNYWRQLLNAKLITQRKFDNLTKAERGGLSELDKAGFIKRQLVETRQITKHVAQILDSRMNTKYDENDKLIREVKVITLKSKLVSDFRKDFQFYKVREINNYHHAHDAYLNAVVGTALIKKYPKLESEFVYGDYKVYDVRKMIAKSEQEIGKATAKYFFYSNIMNFFKTEITLANGEIRKRPLIETNGETGEIVWDKGRDFATVRKVLSMPQVNIVKKTEVQTGGFSKESILPKRNSDKLIARKKDWDPKKYGGFDSPTVAYSVLVVAKVEKGKSKKLKSVKELLGITIMERSSFEKNPIDFLEAKGYKEVKKDLIIKLPKYSLFELENGRKRMLASAGELQKGNELALPSKYVNFLYLASHYEKLKGSPEDNEQKQLFVEQHKHYLDEIIEQISEFSKRVILADANLDKVLSAYNKHRDKPIREQAENIIHLFTLTNLGAPAAFKYFDTTIDRKRYTSTKEVLDATLIHQSITGLYETRIDLSQLGGDGGEAAAKGGGGSSGGTAPLEEEYRLFLEAPIQNVTLLEQWKREIPKVWAEINPPGLASTQAPIHVQLLSTALPVRVRQYPITLEAKRSLRETIRKFRAAGILRPVHSPWNTPLLPVRKSGTSEYRMVQDLREVNKRVETIHPTVPNPYTLLSLLPPDRIWYSVLDLKDAFFCIPLAPESQLIFAFEWADAEEGESGQLTWTRLPQGFKNSPTLFDEALNRDLQGFRLDHPSVSLLQYVDDLLIAADTQAACLSATRDLLMTLAELGYRVSGKKAQLCQEEVTYLGFKIHKGSRSLSNSRTQAILQIPVPKTKRQVREFLGTIGYCRLWIPGFAELAQPLYAATRGGNDPLVWGEKEEEAFQSLKLALTQPPALALPSLDKPFQLFVEETSGAAKGVLTQALGPWKRPVAYLSKRLDPVAAGWPRCLRAIAAAALLTREASKLTFGQDIEITSSHNLESLLRSPPDKWLTNARITQYQVLLLDPPRVRFKQTAALNPATLLPETDDTLPIHHCLDTLDSLTSTRPDLTDQPLAQAEATLFTDGSSYIRDGKRYAGAAVVTLDSVIWAEPLPIGTSAQKAELIALTKALEWSKDKSVNIYTDSRYAFATLHVHGMIYRERGLLTAGGKAIKNAPEILALLTAVWLPKRVAVMHCKGHQKDDAPTSTGNRRADEVAREVAIRPLSTQATISAGKRTADGSEFEKRTADGSEFESPKKKAKVE

SEQ ID NO: 7319 - protein, 2098 aa, synthetic construct
MPAAKRVKLDGGDKKYSIGLDIGTNSVGWAVITDEYKVPSKKFKVLGNTDRHSIKKNLIGALLFDSGETAEATRLKRTARRRYTRRKNRICYLQEIFSNEMAKVDDSFFHRLEESFLVEEDKKHERHPIFGNIVDEVAYHEKYPTIYHLRKKLVDSTDKADLRLIYLALAHMIKFRGHFLIEGDLNPDNSDVDKLFIQLVQTYNQLFEENPINASGVDAKAILSARLSKSRRLENLIAQLPGEKKNGLFGNLIALSLGLTPNFKSNFDLAEDAKLQLSKDTYDDDLDNLLAQIGDQYADLFLAAKNLSDAILLSDILRVNTEITKAPLSASMIKRYDEHHQDLTLLKALVRQQLPEKYKEIFFDQSKNGYAGYIDGGASQEEFYKFIKPILEKMDGTEELLVKLNREDLLRKQRTFDNGSIPHQIHLGELHAILRRQEDFYPFLKDNREKIEKILTFRIPYYVGPLARGNSRFAWMTRKSEETITPWNFEEVVDKGASAQSFIERMTNFDKNLPNEKVLPKHSLLYEYFTVYNELTKVKYVTEGMRKPAFLSGEQKKAIVDLLFKTNRKVTVKQLKEDYFKKIECFDSVEISGVEDRFNASLGTYHDLLKIIKDKDFLDNEENEDILEDIVLTLTLFEDREMIEERLKTYAHLFDDKVMKQLKRRRYTGWGRLSRKLINGIRDKQSGKTILDFLKSDGFANRNFMQLIHDDSLTFKEDIQKAQVSGQGDSLHEHIANLAGSPAIKKGILQTVKVVDELVKVMGRHKPENIVIEMARENQTTQKGQKNSRERMKRIEEGIKELGSQILKEHPVENTQLQNEKLYLYYLQNGRDMYVDQELDINRLSDYDVDHIVPQSFLKDDSIDNKVLTRSDKARGKSDNVPSEEVVKKMKNYWRQLLNAKLITQRKFDNLTKAERGGLSELDKAGFIKRQLVETRQITKHVAQILDSRMNTKYDENDKLIREVKVITLKSKLVSDFRKDFQFYKVREINNYHHAHDAYLNAVVGTALIKKYPKLESEFVYGDYKVYDVRKMIAKSEQEIGKATAKYFFYSNIMNFFKTEITLANGEIRKRPLIETNGETGEIVWDKGRDFATVRKVLSMPQVNIVKKTEVQTGGFSKESILPKRNSDKLIARKKDWDPKKYGGFDSPTVAYSVLVVAKVEKGKSKKLKSVKELLGITIMERSSFEKNPIDFLEAKGYKEVKKDLIIKLPKYSLFELENGRKRMLASAGELQKGNELALPSKYVNFLYLASHYEKLKGSPEDNEQKQLFVEQHKHYLDEIIEQISEFSKRVILADANLDKVLSAYNKHRDKPIREQAENIIHLFTLTNLGAPAAFKYFDTTIDRKRYTSTKEVLDATLIHQSITGLYETRIDLSQLGGDGGEAAAKGGGGSSGGTAPLEEEYRLFLEAPIQNVTLLEQWKREIPKVWAEINPPGLASTQAPIHVQLLSTALPVRVRQYPITLEAKRSLRETIRKFRAAGILRPVHSPWNTPLLPVRKSGTSEYRMVQDLREVNKRVETIHPTVPNPYTLLSLLPPDRIWYSVLDLKDAFFCIPLAPESQLIFAFEWADAEEGESGQLTWTRLPQGFKNSPTLFNEALNRDLQGFRLDHPSVSLLQYVDDLLIAADTQAACLSATRDLLMTLAELGYRVSGKKAQLCQEEVTYLGFKIHKGSRSLSNSRTQAILQIPVPKTKRQVREFLGTIGYCRLWIPGFAELAQPLYAATRPGNDPLVWGEKEEEAFQSLKLALTQPPALALPSLDKPFQLFVEETSGAAKGVLTQALGPWKRPVAYLSKRLDPVAAGWPRCLRAIAAAALLTREASKLTFGQDIEITSSHNLESLLRSPPDKWLTNARITQYQVLLLDPPRVRFKQTAALNPATLLPETDDTLPIHHCLDTLDSLTSTRPDLTDQPLAQAEATLFTDGSSYIRDGKRYAGAAVVTLDSVIWAEPLPIGTSAQKAELIALTKALEWSKDKSVNIYTDSRYAFATLHVHGMIYRERGWLTAGGKAIKNAPEILALLTAVWLPKRVAVMHCKGHQKDDAPTSTGNRRADEVAREVAIRPLSTQATISAGKRTADGSEFEKRTADGSEFESPKKKAKVE

SEQ ID NO: 7320 - protein, 2098 aa, synthetic construct
MPAAKRVKLDGGDKKYSIGLDIGTNSVGWAVITDEYKVPSKKFKVLGNTDRHSIKKNLIGALLFDSGETAEATRLKRTARRRYTRRKNRICYLQEIFSNEMAKVDDSFFHRLEESFLVEEDKKHERHPIFGNIVDEVAYHEKYPTIYHLRKKLVDSTDKADLRLIYLALAHMIKFRGHFLIEGDLNPDNSDVDKLFIQLVQTYNQLFEENPINASGVDAKAILSARLSKSRRLENLIAQLPGEKKNGLFGNLIALSLGLTPNFKSNFDLAEDAKLQLSKDTYDDDLDNLLAQIGDQYADLFLAAKNLSDAILLSDILRVNTEITKAPLSASMIKRYDEHHQDLTLLKALVRQQLPEKYKEIFFDQSKNGYAGYIDGGASQEEFYKFIKPILEKMDGTEELLVKLNREDLLRKQRTFDNGSIPHQIHLGELHAILRRQEDFYPFLKDNREKIEKILTFRIPYYVGPLARGNSRFAWMTRKSEETITPWNFEEVVDKGASAQSFIERMTNFDKNLPNEKVLPKHSLLYEYFTVYNELTKVKYVTEGMRKPAFLSGEQKKAIVDLLFKTNRKVTVKQLKEDYFKKIECFDSVEISGVEDRFNASLGTYHDLLKIIKDKDFLDNEENEDILEDIVLTLTLFEDREMIEERLKTYAHLFDDKVMKQLKRRRYTGWGRLSRKLINGIRDKQSGKTILDFLKSDGFANRNFMQLIHDDSLTFKEDIQKAQVSGQGDSLHEHIANLAGSPAIKKGILQTVKVVDELVKVMGRHKPENIVIEMARENQTTQKGQKNSRERMKRIEEGIKELGSQILKEHPVENTQLQNEKLYLYYLQNGRDMYVDQELDINRLSDYDVDHIVPQSFLKDDSIDNKVLTRSDKARGKSDNVPSEEVVKKMKNYWRQLLNAKLITQRKFDNLTKAERGGLSELDKAGFIKRQLVETRQITKHVAQILDSRMNTKYDENDKLIREVKVITLKSKLVSDFRKDFQFYKVREINNYHHAHDAYLNAVVGTALIKKYPKLESEFVYGDYKVYDVRKMIAKSEQEIGKATAKYFFYSNIMNFFKTEITLANGEIRKRPLIETNGETGEIVWDKGRDFATVRKVLSMPQVNIVKKTEVQTGGFSKESILPKRNSDKLIARKKDWDPKKYGGFDSPTVAYSVLVVAKVEKGKSKKLKSVKELLGITIMERSSFEKNPIDFLEAKGYKEVKKDLIIKLPKYSLFELENGRKRMLASAGELQKGNELALPSKYVNFLYLASHYEKLKGSPEDNEQKQLFVEQHKHYLDEIIEQISEFSKRVILADANLDKVLSAYNKHRDKPIREQAENIIHLFTLTNLGAPAAFKYFDTTIDRKRYTSTKEVLDATLIHQSITGLYETRIDLSQLGGDGGEAAAKGGGGSSGGTAPLEEEYRLFLEAPIQNVTLLEQWKREIPKVWAEINPPGLASTQAPIHVQLLSTALPVRVRQYPITLEAKRSLRETIRKFRAAGILRPVHSPWNTPLLPVRKSGTSEYRMVQDLREVNKRVETIHPTVPNPYTLLSLLPPDRIWYSVLDLKDAFFCIPLAPESQLIFAFEWADAEEGESGQLTWTRLPQGFKNSPTLFNEALNRDLQGFRLDHPSVSLLQYVDDLLIAADTQAACLSATRDLLMTLAELGYRVSGKKAQLCQEEVTYLGFKIHKGSRSLSNSRTQAILQIPVPKTKRQVREFLGKIGYCRLFIPGFAELAQPLYAATRPGNDPLVWGEKEEEAFQSLKLALTQPPALALPSLDKPFQLFVEETSGAAKGVLTQALGPWKRPVAYLSKRLDPVAAGWPRCLRAIAAAALLTREASKLTFGQDIEITSSHNLESLLRSPPDKWLTNARITQYQVLLLDPPRVRFKQTAALNPATLLPETDDTLPIHHCLDTLDSLTSTRPDLTDQPLAQAEATLFTDGSSYIRDGKRYAGAAVVTLDSVIWAEPLPIGTSAQKAELIALTKALEWSKDKSVNIYTDSRYAFATLHVHGMIYRERGWLTAGGKAIKNAPEILALLTAVWLPKRVAVMHCKGHQKDDAPTSTGNRRADEVAREVAIRPLSTQATISAGKRTADGSEFEKRTADGSEFESPKKKAKVE

SEQ ID NO: 7321 - protein, 2102 aa, synthetic construct
MPAAKRVKLDGGDKKYSIGLDIGTNSVGWAVITDEYKVPSKKFKVLGNTDRHSIKKNLIGALLFDSGETAEATRLKRTARRRYTRRKNRICYLQEIFSNEMAKVDDSFFHRLEESFLVEEDKKHERHPIFGNIVDEVAYHEKYPTIYHLRKKLVDSTDKADLRLIYLALAHMIKFRGHFLIEGDLNPDNSDVDKLFIQLVQTYNQLFEENPINASGVDAKAILSARLSKSRRLENLIAQLPGEKKNGLFGNLIALSLGLTPNFKSNFDLAEDAKLQLSKDTYDDDLDNLLAQIGDQYADLFLAAKNLSDAILLSDILRVNTEITKAPLSASMIKRYDEHHQDLTLLKALVRQQLPEKYKEIFFDQSKNGYAGYIDGGASQEEFYKFIKPILEKMDGTEELLVKLNREDLLRKQRTFDNGSIPHQIHLGELHAILRRQEDFYPFLKDNREKIEKILTFRIPYYVGPLARGNSRFAWMTRKSEETITPWNFEEVVDKGASAQSFIERMTNFDKNLPNEKVLPKHSLLYEYFTVYNELTKVKYVTEGMRKPAFLSGEQKKAIVDLLFKTNRKVTVKQLKEDYFKKIECFDSVEISGVEDRFNASLGTYHDLLKIIKDKDFLDNEENEDILEDIVLTLTLFEDREMIEERLKTYAHLFDDKVMKQLKRRRYTGWGRLSRKLINGIRDKQSGKTILDFLKSDGFANRNFMQLIHDDSLTFKEDIQKAQVSGQGDSLHEHIANLAGSPAIKKGILQTVKVVDELVKVMGRHKPENIVIEMARENQTTQKGQKNSRERMKRIEEGIKELGSQILKEHPVENTQLQNEKLYLYYLQNGRDMYVDQELDINRLSDYDVDHIVPQSFLKDDSIDNKVLTRSDKARGKSDNVPSEEVVKKMKNYWRQLLNAKLITQRKFDNLTKAERGGLSELDKAGFIKRQLVETRQITKHVAQILDSRMNTKYDENDKLIREVKVITLKSKLVSDFRKDFQFYKVREINNYHHAHDAYLNAVVGTALIKKYPKLESEFVYGDYKVYDVRKMIAKSEQEIGKATAKYFFYSNIMNFFKTEITLANGEIRKRPLIETNGETGEIVWDKGRDFATVRKVLSMPQVNIVKKTEVQTGGFSKESILPKRNSDKLIARKKDWDPKKYGGFDSPTVAYSVLVVAKVEKGKSKKLKSVKELLGITIMERSSFEKNPIDFLEAKGYKEVKKDLIIKLPKYSLFELENGRKRMLASAGELQKGNELALPSKYVNFLYLASHYEKLKGSPEDNEQKQLFVEQHKHYLDEIIEQISEFSKRVILADANLDKVLSAYNKHRDKPIREQAENIIHLFTLTNLGAPAAFKYFDTTIDRKRYTSTKEVLDATLIHQSITGLYETRIDLSQLGGDGGEAAAKGGGGSSGGTVSLQDEHRLFDIPVTTSLPDVWLQDFPQAWAETGGLGRAKCQAPIIIDLKPTAVPVSIKQYPMSLEAHMGIRQHIIKFLELGVLRPCRSPWNTPLLPVKKPGTQDYRPVQDLREINKRTVDIHPTVPNPYNLLSTLKPDYSWYTVLDLKDAFFCLPLAPQSQELFAFEWKDPERGISGQLTWTRLPQGFKNSPTLFDEALHRDLTDFRTQHPEVTLLQYVDDLLLAAPTKKACTQGTRHLLQELGEKGYRASAKKAQICQTKVTYLGYILSEGKRWLTPGRIETVARIPPPRNPREVREFLGTAGFCRLWIPGFAELAAPLYALTKESTPFTWQTEHQLAFEALKKALLSAPALGLPDTSKPFTLFLDERQGIAKGVLTQKLGPWKRPVAYLSKKLDPVAAGWPPCLRIMAATAMLVKDSAKLTLGQPLTVITPHTLEAIVRQPPDRWITNARLTHYQALLLDTDRVQFGPPVTLNPATLLPVPENQPSPHDCRQVLAETHGTREDLKDQELPDADHTWYTDGSSYLDSGTRRAGAAVVDGHNTIWAQSLPPGTSAQKAELIALTKALELSKGKKANIYTDSRYAFATAHTHGSIYERRGLLTSEGKEIKNKAEIIALLKALFLPQEVAIIHCPGHQKGQDPVAVGNRQADRVARQAAMAEVLTLATEPDNTSHITAGKRTADGSEFEKRTADGSEFESPKKKAKVE

SEQ ID NO: 7322 - protein, 2087 aa, synthetic construct
MPAAKRVKLDGGDKKYSIGLDIGTNSVGWAVITDEYKVPSKKFKVLGNTDRHSIKKNLIGALLFDSGETAEATRLKRTARRRYTRRKNRICYLQEIFSNEMAKVDDSFFHRLEESFLVEEDKKHERHPIFGNIVDEVAYHEKYPTIYHLRKKLVDSTDKADLRLIYLALAHMIKFRGHFLIEGDLNPDNSDVDKLFIQLVQTYNQLFEENPINASGVDAKAILSARLSKSRRLENLIAQLPGEKKNGLFGNLIALSLGLTPNFKSNFDLAEDAKLQLSKDTYDDDLDNLLAQIGDQYADLFLAAKNLSDAILLSDILRVNTEITKAPLSASMIKRYDEHHQDLTLLKALVRQQLPEKYKEIFFDQSKNGYAGYIDGGASQEEFYKFIKPILEKMDGTEELLVKLNREDLLRKQRTFDNGSIPHQIHLGELHAILRRQEDFYPFLKDNREKIEKILTFRIPYYVGPLARGNSRFAWMTRKSEETITPWNFEEVVDKGASAQSFIERMTNFDKNLPNEKVLPKHSLLYEYFTVYNELTKVKYVTEGMRKPAFLSGEQKKAIVDLLFKTNRKVTVKQLKEDYFKKIECFDSVEISGVEDRFNASLGTYHDLLKIIKDKDFLDNEENEDILEDIVLTLTLFEDREMIEERLKTYAHLFDDKVMKQLKRRRYTGWGRLSRKLINGIRDKQSGKTILDFLKSDGFANRNFMQLIHDDSLTFKEDIQKAQVSGQGDSLHEHIANLAGSPAIKKGILQTVKVVDELVKVMGRHKPENIVIEMARENQTTQKGQKNSRERMKRIEEGIKELGSQILKEHPVENTQLQNEKLYLYYLQNGRDMYVDQELDINRLSDYDVDHIVPQSFLKDDSIDNKVLTRSDKARGKSDNVPSEEVVKKMKNYWRQLLNAKLITQRKFDNLTKAERGGLSELDKAGFIKRQLVETRQITKHVAQILDSRMNTKYDENDKLIREVKVITLKSKLVSDFRKDFQFYKVREINNYHHAHDAYLNAVVGTALIKKYPKLESEFVYGDYKVYDVRKMIAKSEQEIGKATAKYFFYSNIMNFFKTEITLANGEIRKRPLIETNGETGEIVWDKGRDFATVRKVLSMPQVNIVKKTEVQTGGFSKESILPKRNSDKLIARKKDWDPKKYGGFDSPTVAYSVLVVAKVEKGKSKKLKSVKELLGITIMERSSFEKNPIDFLEAKGYKEVKKDLIIKLPKYSLFELENGRKRMLASAGELQKGNELALPSKYVNFLYLASHYEKLKGSPEDNEQKQLFVEQHKHYLDEIIEQISEFSKRVILADANLDKVLSAYNKHRDKPIREQAENIIHLFTLTNLGAPAAFKYFDTTIDRKRYTSTKEVLDATLIHQSITGLYETRIDLSQLGGDGGEAAAKGGGGSSGGVPWILKKPLELTIKLDLEEQQGTLLNNSILSKKGKEELKQLFEKYSALWQSWENQVGHRRIRPHKIATGTVKPTPQKQYHINPKAKPDIQIVINDLLKQGVLIQKESTMNTPVYPVPKPNGRWRMVLDYRAVNKVTPLIAVQNQHSYGILGSLFKGRYKTTIDLSNGFWAHPIVPEDYWITAFTWQGKQYCWTVLPQGFLNSPGLFTGDVVDLLQGIPNVEVYVDDVYISHDSEKEHLEYLDILFNRLKEAGYIISLKKSNIANSIVDFLGFQITNEGRGLTDTFKEKLENITAPTTLKQLQSILGLLNFARNFIPDFTELIAPLYALIPKSTKNYVPWQIEHSTTLETLITKLNGAEYLQGRKGDKTLIMKVNASYTTGYIRYYNEGEKKPISYVSIVFSKTELKFTELEKLLTTVHKGLLKALDLSMGQNIHVYSPIVSMQNIQKTPQTAKKALASRWLSWLSYLEDPRIRFFYDPQMPALKDLPAVDTGKDNKKHPSNFQHIFYTDGSAITSPTKEGHLNAGMGIVYFINKDGNLQKQQEWSISLGNHTAQFAEIAAFEFALKKCLPLGGNILVVTDSNYVAKAYNEELDVWASNGFVNNRKKPLKHISKWKSVADLKRLRPDVVVTHEPGHQKLDSSPHAYGNNLADQLATQASFKVHAGKRTADGSEFEKRTADGSEFESPKKKAKVE

SEQ ID NO: 7323 - protein, 2095 aa, synthetic construct
MPAAKRVKLDGGDKKYSIGLDIGTNSVGWAVITDEYKVPSKKFKVLGNTDRHSIKKNLIGALLFDSGETAEATRLKRTARRRYTRRKNRICYLQEIFSNEMAKVDDSFFHRLEESFLVEEDKKHERHPIFGNIVDEVAYHEKYPTIYHLRKKLVDSTDKADLRLIYLALAHMIKFRGHFLIEGDLNPDNSDVDKLFIQLVQTYNQLFEENPINASGVDAKAILSARLSKSRRLENLIAQLPGEKKNGLFGNLIALSLGLTPNFKSNFDLAEDAKLQLSKDTYDDDLDNLLAQIGDQYADLFLAAKNLSDAILLSDILRVNTEITKAPLSASMIKRYDEHHQDLTLLKALVRQQLPEKYKEIFFDQSKNGYAGYIDGGASQEEFYKFIKPILEKMDGTEELLVKLNREDLLRKQRTFDNGSIPHQIHLGELHAILRRQEDFYPFLKDNREKIEKILTFRIPYYVGPLARGNSRFAWMTRKSEETITPWNFEEVVDKGASAQSFIERMTNFDKNLPNEKVLPKHSLLYEYFTVYNELTKVKYVTEGMRKPAFLSGEQKKAIVDLLFKTNRKVTVKQLKEDYFKKIECFDSVEISGVEDRFNASLGTYHDLLKIIKDKDFLDNEENEDILEDIVLTLTLFEDREMIEERLKTYAHLFDDKVMKQLKRRRYTGWGRLSRKLINGIRDKQSGKTILDFLKSDGFANRNFMQLIHDDSLTFKEDIQKAQVSGQGDSLHEHIANLAGSPAIKKGILQTVKVVDELVKVMGRHKPENIVIEMARENQTTQKGQKNSRERMKRIEEGIKELGSQILKEHPVENTQLQNEKLYLYYLQNGRDMYVDQELDINRLSDYDVDHIVPQSFLKDDSIDNKVLTRSDKARGKSDNVPSEEVVKKMKNYWRQLLNAKLITQRKFDNLTKAERGGLSELDKAGFIKRQLVETRQITKHVAQILDSRMNTKYDENDKLIREVKVITLKSKLVSDFRKDFQFYKVREINNYHHAHDAYLNAVVGTALIKKYPKLESEFVYGDYKVYDVRKMIAKSEQEIGKATAKYFFYSNIMNFFKTEITLANGEIRKRPLIETNGETGEIVWDKGRDFATVRKVLSMPQVNIVKKTEVQTGGFSKESILPKRNSDKLIARKKDWDPKKYGGFDSPTVAYSVLVVAKVEKGKSKKLKSVKELLGITIMERSSFEKNPIDFLEAKGYKEVKKDLIIKLPKYSLFELENGRKRMLASAGELQKGNELALPSKYVNFLYLASHYEKLKGSPEDNEQKQLFVEQHKHYLDEIIEQISEFSKRVILADANLDKVLSAYNKHRDKPIREQAENIIHLFTLTNLGAPAAFKYFDTTIDRKRYTSTKEVLDATLIHQSITGLYETRIDLSQLGGDGGEAAAKGGGGSSGGTLQLEEEYRLFEPESTQKQEMDIWLKNFPQAWAETGGMGTAHCQAPVLIQLKATATPISIRQYPMPHEAYQGIKPHIRRMLDQGILKPCQSPWNTPLLPVKKPGTEDYRPVQDLREVNKRVEDIHPTVPNPYNLLSTLPPSHPWYTVLDLKDAFFCLRLHSESQLLFAFEWRDPEIGLSGQLTWTRLPQGFKNSPTLFNEALHSDLADFRVRYPALVLLQYVDDLLLAAATRTECLEGTKALLETLGNKGYRASAKKAQICLQEVTYLGYSLKDGQRWLTKARKEAILSIPVPKNSRQVREFLGTAGYCRLWIPGFAELAAPLYPLTRPGTLFQWGTEQQLAFEDIKKALLSSPALGLPDITKPFELFIDENSGFAKGVLVQKLGPWKRPVAYLSKKLDTVASGWPPCLRMVAAIAILVKDAGKLTLGQPLTILTSHPVEALVRQPPNKWLSNARMTHYQAMLLDAERVHFGPTVSLNPATLLPLPSGGNHHDCLQILAETHGTRPDLTDQPLPDADLTWYTDGSSFIRNGEREAGAAVTTESEVIWAAPLPPGTSAQRAELIALTQALKMAEGKKLTVYTDSRYAFATTHVHGEIYRRRGWLTSEGKEIKNKNEILALLEALFLPKRLSIIHCPGHQKGDSPQAKGNRLADDTAKKAATETHSSLTVLPAGKRTADGSEFEKRTADGSEFESPKKKAKVE

SEQ ID NO: 7324 - protein, 2095 aa, synthetic construct
MPAAKRVKLDGGDKKYSIGLDIGTNSVGWAVITDEYKVPSKKFKVLGNTDRHSIKKNLIGALLFDSGETAEATRLKRTARRRYTRRKNRICYLQEIFSNEMAKVDDSFFHRLEESFLVEEDKKHERHPIFGNIVDEVAYHEKYPTIYHLRKKLVDSTDKADLRLIYLALAHMIKFRGHFLIEGDLNPDNSDVDKLFIQLVQTYNQLFEENPINASGVDAKAILSARLSKSRRLENLIAQLPGEKKNGLFGNLIALSLGLTPNFKSNFDLAEDAKLQLSKDTYDDDLDNLLAQIGDQYADLFLAAKNLSDAILLSDILRVNTEITKAPLSASMIKRYDEHHQDLTLLKALVRQQLPEKYKEIFFDQSKNGYAGYIDGGASQEEFYKFIKPILEKMDGTEELLVKLNREDLLRKQRTFDNGSIPHQIHLGELHAILRRQEDFYPFLKDNREKIEKILTFRIPYYVGPLARGNSRFAWMTRKSEETITPWNFEEVVDKGASAQSFIERMTNFDKNLPNEKVLPKHSLLYEYFTVYNELTKVKYVTEGMRKPAFLSGEQKKAIVDLLFKTNRKVTVKQLKEDYFKKIECFDSVEISGVEDRFNASLGTYHDLLKIIKDKDFLDNEENEDILEDIVLTLTLFEDREMIEERLKTYAHLFDDKVMKQLKRRRYTGWGRLSRKLINGIRDKQSGKTILDFLKSDGFANRNFMQLIHDDSLTFKEDIQKAQVSGQGDSLHEHIANLAGSPAIKKGILQTVKVVDELVKVMGRHKPENIVIEMARENQTTQKGQKNSRERMKRIEEGIKELGSQILKEHPVENTQLQNEKLYLYYLQNGRDMYVDQELDINRLSDYDVDHIVPQSFLKDDSIDNKVLTRSDKARGKSDNVPSEEVVKKMKNYWRQLLNAKLITQRKFDNLTKAERGGLSELDKAGFIKRQLVETRQITKHVAQILDSRMNTKYDENDKLIREVKVITLKSKLVSDFRKDFQFYKVREINNYHHAHDAYLNAVVGTALIKKYPKLESEFVYGDYKVYDVRKMIAKSEQEIGKATAKYFFYSNIMNFFKTEITLANGEIRKRPLIETNGETGEIVWDKGRDFATVRKVLSMPQVNIVKKTEVQTGGFSKESILPKRNSDKLIARKKDWDPKKYGGFDSPTVAYSVLVVAKVEKGKSKKLKSVKELLGITIMERSSFEKNPIDFLEAKGYKEVKKDLIIKLPKYSLFELENGRKRMLASAGELQKGNELALPSKYVNFLYLASHYEKLKGSPEDNEQKQLFVEQHKHYLDEIIEQISEFSKRVILADANLDKVLSAYNKHRDKPIREQAENIIHLFTLTNLGAPAAFKYFDTTIDRKRYTSTKEVLDATLIHQSITGLYETRIDLSQLGGDGGEAAAKGGGGSSGGTLQLEEEYRLFEPESTQKQEMDIWLKNFPQAWAETGGMGTAHCQAPVLIQLKATATPISIRQYPMPHEAYQGIKPHIRRMLDQGILKPCQSPWNTPLLPVKKPGTEDYRPVQDLREVNKRVEDIHPTVPNPYNLLSTLPPSHPWYTVLDLKDAFFCLRLHSESQLLFAFEWRDPEIGLSGQLTWTRLPQGFKNSPTLFNEALHSDLADFRVRYPALVLLQYVDDLLLAAATRTECLEGTKALLETLGNKGYRASAKKAQICLQEVTYLGYSLKDGQRWLTKARKEAILSIPVPKNSRQVREFLGKAGYCRLFIPGFAELAAPLYPLTRPGTLFQWGTEQQLAFEDIKKALLSSPALGLPDITKPFELFIDENSGFAKGVLVQKLGPWKRPVAYLSKKLDTVASGWPPCLRMVAAIAILVKDAGKLTLGQPLTILTSHPVEALVRQPPNKWLSNARMTHYQAMLLDAERVHFGPTVSLNPATLLPLPSGGNHHDCLQILAETHGTRPDLTDQPLPDADLTWYTDGSSFIRNGEREAGAAVTTESEVIWAAPLPPGTSAQRAELIALTQALKMAEGKKLTVYTDSRYAFATTHVHGEIYRRRGWLTSEGKEIKNKNEILALLEALFLPKRLSIIHCPGHQKGDSPQAKGNRLADDTAKKAATETHSSLTVLPAGKRTADGSEFEKRTADGSEFESPKKKAKVE

SEQ ID NO: 7325 - protein, 2176 aa, synthetic construct
MPAAKRVKLDGGDKKYSIGLDIGTNSVGWAVITDEYKVPSKKFKVLGNTDRHSIKKNLIGALLFDSGETAEATRLKRTARRRYTRRKNRICYLQEIFSNEMAKVDDSFFHRLEESFLVEEDKKHERHPIFGNIVDEVAYHEKYPTIYHLRKKLVDSTDKADLRLIYLALAHMIKFRGHFLIEGDLNPDNSDVDKLFIQLVQTYNQLFEENPINASGVDAKAILSARLSKSRRLENLIAQLPGEKKNGLFGNLIALSLGLTPNFKSNFDLAEDAKLQLSKDTYDDDLDNLLAQIGDQYADLFLAAKNLSDAILLSDILRVNTEITKAPLSASMIKRYDEHHQDLTLLKALVRQQLPEKYKEIFFDQSKNGYAGYIDGGASQEEFYKFIKPILEKMDGTEELLVKLNREDLLRKQRTFDNGSIPHQIHLGELHAILRRQEDFYPFLKDNREKIEKILTFRIPYYVGPLARGNSRFAWMTRKSEETITPWNFEEVVDKGASAQSFIERMTNFDKNLPNEKVLPKHSLLYEYFTVYNELTKVKYVTEGMRKPAFLSGEQKKAIVDLLFKTNRKVTVKQLKEDYFKKIECFDSVEISGVEDRFNASLGTYHDLLKIIKDKDFLDNEENEDILEDIVLTLTLFEDREMIEERLKTYAHLFDDKVMKQLKRRRYTGWGRLSRKLINGIRDKQSGKTILDFLKSDGFANRNFMQLIHDDSLTFKEDIQKAQVSGQGDSLHEHIANLAGSPAIKKGILQTVKVVDELVKVMGRHKPENIVIEMARENQTTQKGQKNSRERMKRIEEGIKELGSQILKEHPVENTQLQNEKLYLYYLQNGRDMYVDQELDINRLSDYDVDHIVPQSFLKDDSIDNKVLTRSDKARGKSDNVPSEEVVKKMKNYWRQLLNAKLITQRKFDNLTKAERGGLSELDKAGFIKRQLVETRQITKHVAQILDSRMNTKYDENDKLIREVKVITLKSKLVSDFRKDFQFYKVREINNYHHAHDAYLNAVVGTALIKKYPKLESEFVYGDYKVYDVRKMIAKSEQEIGKATAKYFFYSNIMNFFKTEITLANGEIRKRPLIETNGETGEIVWDKGRDFATVRKVLSMPQVNIVKKTEVQTGGFSKESILPKRNSDKLIARKKDWDPKKYGGFDSPTVAYSVLVVAKVEKGKSKKLKSVKELLGITIMERSSFEKNPIDFLEAKGYKEVKKDLIIKLPKYSLFELENGRKRMLASAGELQKGNELALPSKYVNFLYLASHYEKLKGSPEDNEQKQLFVEQHKHYLDEIIEQISEFSKRVILADANLDKVLSAYNKHRDKPIREQAENIIHLFTLTNLGAPAAFKYFDTTIDRKRYTSTKEVLDATLIHQSITGLYETRIDLSQLGGDGGEAAAKGGGGSSGGMNPLQLLQPLPAEIKGTKLLAHWNSGATITCIPESFLEDEQPIKKTLIKTIHGEKQQNVYYVTFKVKGRKVEAEVIASPYEYILLSPTDVPWLTQQPLQLTILVPLQEYQEKILSKTALPEDQKQQLKTLFVKYDNLWQHWENQVGHRKIRPHNIATGDYPPRPQKQYPINPKAKPSIQIVIDDLLKQGVLTPQNSTMNTPVYPVPKPDGRWRMVLDYREVNKTIPLTAAQNQHSAGILATIVRQKYKTTLDLANGFWAHPITPESYWLTAFTWQGKQYCWTRLPQGFLNSPALFTADVVDLLKEIPNVQVYVDDIYLSHDDPKEHVQQLEKVFQILLQAGYVVSLKKSEIGQKTVEFLGFNITKEGRGLTDTFKTKLLNITPPKDLKQLQSILGLLNFARNFIPNFAELVQPLYNLIASAKGKYIEWSEENTKQLNMVIEALNTASNLEERLPEQRLVIKVNTSPSAGYVRYYNETGKKPIMYLNYVFSKAELKFSMLEKLLTTMHKALIKAMDLAMGQEILVYSPIVSMTKIQKTPLPERKALPIRWITWMTYLEDPRIQFHYDKTLPELKHIPDVYTSSQSPVKHPSQYEGVFYTDGSAIKSPDPTKSNNAGMGIVHATYKPEYQVLNQWSIPLGNHTAQMAEIAAVEFACKKALKIPGPVLVITDSFYVAESANKELPYWKSNGFVNNKKKPLKHISKWKSIAECLSMKPDITIQHEKGISLQIPVFILKGNALADKLATQGSYVVNAGKRTADGSEFEKRTADGSEFESPKKKAKVE

SEQ ID NO: 7326 - protein, 2094 aa, synthetic construct
MPAAKRVKLDGGDKKYSIGLDIGTNSVGWAVITDEYKVPSKKFKVLGNTDRHSIKKNLIGALLFDSGETAEATRLKRTARRRYTRRKNRICYLQEIFSNEMAKVDDSFFHRLEESFLVEEDKKHERHPIFGNIVDEVAYHEKYPTIYHLRKKLVDSTDKADLRLIYLALAHMIKFRGHFLIEGDLNPDNSDVDKLFIQLVQTYNQLFEENPINASGVDAKAILSARLSKSRRLENLIAQLPGEKKNGLFGNLIALSLGLTPNFKSNFDLAEDAKLQLSKDTYDDDLDNLLAQIGDQYADLFLAAKNLSDAILLSDILRVNTEITKAPLSASMIKRYDEHHQDLTLLKALVRQQLPEKYKEIFFDQSKNGYAGYIDGGASQEEFYKFIKPILEKMDGTEELLVKLNREDLLRKQRTFDNGSIPHQIHLGELHAILRRQEDFYPFLKDNREKIEKILTFRIPYYVGPLARGNSRFAWMTRKSEETITPWNFEEVVDKGASAQSFIERMTNFDKNLPNEKVLPKHSLLYEYFTVYNELTKVKYVTEGMRKPAFLSGEQKKAIVDLLFKTNRKVTVKQLKEDYFKKIECFDSVEISGVEDRFNASLGTYHDLLKIIKDKDFLDNEENEDILEDIVLTLTLFEDREMIEERLKTYAHLFDDKVMKQLKRRRYTGWGRLSRKLINGIRDKQSGKTILDFLKSDGFANRNFMQLIHDDSLTFKEDIQKAQVSGQGDSLHEHIANLAGSPAIKKGILQTVKVVDELVKVMGRHKPENIVIEMARENQTTQKGQKNSRERMKRIEEGIKELGSQILKEHPVENTQLQNEKLYLYYLQNGRDMYVDQELDINRLSDYDVDHIVPQSFLKDDSIDNKVLTRSDKARGKSDNVPSEEVVKKMKNYWRQLLNAKLITQRKFDNLTKAERGGLSELDKAGFIKRQLVETRQITKHVAQILDSRMNTKYDENDKLIREVKVITLKSKLVSDFRKDFQFYKVREINNYHHAHDAYLNAVVGTALIKKYPKLESEFVYGDYKVYDVRKMIAKSEQEIGKATAKYFFYSNIMNFFKTEITLANGEIRKRPLIETNGETGEIVWDKGRDFATVRKVLSMPQVNIVKKTEVQTGGFSKESILPKRNSDKLIARKKDWDPKKYGGFDSPTVAYSVLVVAKVEKGKSKKLKSVKELLGITIMERSSFEKNPIDFLEAKGYKEVKKDLIIKLPKYSLFELENGRKRMLASAGELQKGNELALPSKYVNFLYLASHYEKLKGSPEDNEQKQLFVEQHKHYLDEIIEQISEFSKRVILADANLDKVLSAYNKHRDKPIREQAENIIHLFTLTNLGAPAAFKYFDTTIDRKRYTSTKEVLDATLIHQSITGLYETRIDLSQLGGDGGEAAAKGGGGSSGGVLNLEEEYRLHEKPVPSSIDPSWLQLFPTVWAERAGMGLANQVPPVVVELRSGASPVAVRQYPMSKEAREGIRPHIQKFLDLGVLVPCRSPWNTPLLPVKKPGTNDYRPVQDLREINKRVQDIHPTVPNPYNLLSSLPPSYTWYSVLDLKDAFFCLRLHPNSQPLFAFEWKDPEKGNTGQLTWTRLPQGFKNSPTLFNEALHRDLAPFRALNPQVVLLQYVDDLLVAAPTYEDCKKGTQKLLQELSKLGYRVSAKKAQLCQREVTYLGYLLKEGKRWLTPARKATVMKIPVPTTPRQVREFLGTAGFCRLWIPGFASLAAPLYPLTKPSIPFIWTEEHQQAFDHIKKALLSAPALALPDLTKPFTLYIDERAGVARGVLTQTLGPWRRPVAYLSKKLDPVASGWPTCLKAVAAVALLLKDADKLTLGQNVTVIASHSLESIVRQPPDRWMTNARMTHYQSLLLNERVSFAPPAVLNPATLLPVESEATPVHRCSEILAEETGTRRDLEDQPLPGVPTWYTDGSSFITEGKRRAGAPIVDGKRTVWASSLPEGTSAQKAELVALTQALRLAEGKNINIYTDSRYAFATAHIHGAIYKQRGWLTSAGKDIKNKEEILALLEAIHLPRRVAIIHCPGHQRGSNPVATGNRRADEAAKQAALSTRVLAGTTKPAGKRTADGSEFEKRTADGSEFESPKKKAKVE

SEQ ID NO: 7327 - protein, 2218 aa, synthetic construct
MPAAKRVKLDGGDKKYSIGLDIGTNSVGWAVITDEYKVPSKKFKVLGNTDRHSIKKNLIGALLFDSGETAEATRLKRTARRRYTRRKNRICYLQEIFSNEMAKVDDSFFHRLEESFLVEEDKKHERHPIFGNIVDEVAYHEKYPTIYHLRKKLVDSTDKADLRLIYLALAHMIKFRGHFLIEGDLNPDNSDVDKLFIQLVQTYNQLFEENPINASGVDAKAILSARLSKSRRLENLIAQLPGEKKNGLFGNLIALSLGLTPNFKSNFDLAEDAKLQLSKDTYDDDLDNLLAQIGDQYADLFLAAKNLSDAILLSDILRVNTEITKAPLSASMIKRYDEHHQDLTLLKALVRQQLPEKYKEIFFDQSKNGYAGYIDGGASQEEFYKFIKPILEKMDGTEELLVKLNREDLLRKQRTFDNGSIPHQIHLGELHAILRRQEDFYPFLKDNREKIEKILTFRIPYYVGPLARGNSRFAWMTRKSEETITPWNFEEVVDKGASAQSFIERMTNFDKNLPNEKVLPKHSLLYEYFTVYNELTKVKYVTEGMRKPAFLSGEQKKAIVDLLFKTNRKVTVKQLKEDYFKKIECFDSVEISGVEDRFNASLGTYHDLLKIIKDKDFLDNEENEDILEDIVLTLTLFEDREMIEERLKTYAHLFDDKVMKQLKRRRYTGWGRLSRKLINGIRDKQSGKTILDFLKSDGFANRNFMQLIHDDSLTFKEDIQKAQVSGQGDSLHEHIANLAGSPAIKKGILQTVKVVDELVKVMGRHKPENIVIEMARENQTTQKGQKNSRERMKRIEEGIKELGSQILKEHPVENTQLQNEKLYLYYLQNGRDMYVDQELDINRLSDYDVDHIVPQSFLKDDSIDNKVLTRSDKARGKSDNVPSEEVVKKMKNYWRQLLNAKLITQRKFDNLTKAERGGLSELDKAGFIKRQLVETRQITKHVAQILDSRMNTKYDENDKLIREVKVITLKSKLVSDFRKDFQFYKVREINNYHHAHDAYLNAVVGTALIKKYPKLESEFVYGDYKVYDVRKMIAKSEQEIGKATAKYFFYSNIMNFFKTEITLANGEIRKRPLIETNGETGEIVWDKGRDFATVRKVLSMPQVNIVKKTEVQTGGFSKESILPKRNSDKLIARKKDWDPKKYGGFDSPTVAYSVLVVAKVEKGKSKKLKSVKELLGITIMERSSFEKNPIDFLEAKGYKEVKKDLIIKLPKYSLFELENGRKRMLASAGELQKGNELALPSKYVNFLYLASHYEKLKGSPEDNEQKQLFVEQHKHYLDEIIEQISEFSKRVILADANLDKVLSAYNKHRDKPIREQAENIIHLFTLTNLGAPAAFKYFDTTIDRKRYTSTKEVLDATLIHQSITGLYETRIDLSQLGGDGGEAAAKGGGGSSGGTLGDQGSRGSDPLPEPRVTLTVEGIPTEFLVNTGAEHSVLTKPMGKMGSKRTVVAGATGSKVYPWTTKRLLKIGQKQVTHSFLVIPECPAPLLGRDLLTKLKAQIQFSTEGPQVTWEDRPAMCLVLNLEEEYRLHEKPVPPSIDPSWLQLFPMVWAEKAGMGLANQVPPVVVELKSDASPVAVRQYPMSKEAREGIRPHIQRFLDLGILVPCQSPWNTPLLPVKKPGTNDYRPVQDLREVNKRVQDIHPTVPNPYNLLSSLPPSHTWYSVLDLKDAFFCLKLHPNSQPLFAFEWRDPEKGNTGQLTWTRLPQGFKNSPTLFNEALHRDLASFRALNPQVVMLQYVDDLLVAAPTYRDCKEGTRRLLQELSKLGYRVSAKKAQLCREEVTYLGYLLKGGKRWLTPARKATVMKIPTPTTPRQVREFLGTAGFCRLWIPGFASLAAPLYPLTRPKVPFTWTEAHQEAFGRIKEALLSAPALALPDLTKPFALYVDEKEGVARGVLTQTLGPWRRPVAYLSKKLDPVASGWPTCLKAIAAVALLLKDADKLTLGQNVLVIAPHNLESIVRQPPDRWMTNARMTHYQSLLLNERVSFAPPAILNPATLLPVESDDTPIHICSEILAEETGTRPDLRDQPLPGVPAWYTDGSSFIMDGRRQAGAAIVDNKRTVWASNLPEGTSAQKAELIALTQALRLAEGKSINIYTDSRYAFATAHVHGAIYKQRGWLTSAGKDIKNKEEILALLEAIHLPKRVAIIHCPGHQRGTDPVATGNRKADEAAKQAAQSTRILTETTKNAGKRTADGSEFEKRTADGSEFESPKKKAKVE

SEQ ID NO: 7328 - protein, 2096 aa, synthetic construct
MPAAKRVKLDGGDKKYSIGLDIGTNSVGWAVITDEYKVPSKKFKVLGNTDRHSIKKNLIGALLFDSGETAEATRLKRTARRRYTRRKNRICYLQEIFSNEMAKVDDSFFHRLEESFLVEEDKKHERHPIFGNIVDEVAYHEKYPTIYHLRKKLVDSTDKADLRLIYLALAHMIKFRGHFLIEGDLNPDNSDVDKLFIQLVQTYNQLFEENPINASGVDAKAILSARLSKSRRLENLIAQLPGEKKNGLFGNLIALSLGLTPNFKSNFDLAEDAKLQLSKDTYDDDLDNLLAQIGDQYADLFLAAKNLSDAILLSDILRVNTEITKAPLSASMIKRYDEHHQDLTLLKALVRQQLPEKYKEIFFDQSKNGYAGYIDGGASQEEFYKFIKPILEKMDGTEELLVKLNREDLLRKQRTFDNGSIPHQIHLGELHAILRRQEDFYPFLKDNREKIEKILTFRIPYYVGPLARGNSRFAWMTRKSEETITPWNFEEVVDKGASAQSFIERMTNFDKNLPNEKVLPKHSLLYEYFTVYNELTKVKYVTEGMRKPAFLSGEQKKAIVDLLFKTNRKVTVKQLKEDYFKKIECFDSVEISGVEDRFNASLGTYHDLLKIIKDKDFLDNEENEDILEDIVLTLTLFEDREMIEERLKTYAHLFDDKVMKQLKRRRYTGWGRLSRKLINGIRDKQSGKTILDFLKSDGFANRNFMQLIHDDSLTFKEDIQKAQVSGQGDSLHEHIANLAGSPAIKKGILQTVKVVDELVKVMGRHKPENIVIEMARENQTTQKGQKNSRERMKRIEEGIKELGSQILKEHPVENTQLQNEKLYLYYLQNGRDMYVDQELDINRLSDYDVDHIVPQSFLKDDSIDNKVLTRSDKARGKSDNVPSEEVVKKMKNYWRQLLNAKLITQRKFDNLTKAERGGLSELDKAGFIKRQLVETRQITKHVAQILDSRMNTKYDENDKLIREVKVITLKSKLVSDFRKDFQFYKVREINNYHHAHDAYLNAVVGTALIKKYPKLESEFVYGDYKVYDVRKMIAKSEQEIGKATAKYFFYSNIMNFFKTEITLANGEIRKRPLIETNGETGEIVWDKGRDFATVRKVLSMPQVNIVKKTEVQTGGFSKESILPKRNSDKLIARKKDWDPKKYGGFDSPTVAYSVLVVAKVEKGKSKKLKSVKELLGITIMERSSFEKNPIDFLEAKGYKEVKKDLIIKLPKYSLFELENGRKRMLASAGELQKGNELALPSKYVNFLYLASHYEKLKGSPEDNEQKQLFVEQHKHYLDEIIEQISEFSKRVILADANLDKVLSAYNKHRDKPIREQAENIIHLFTLTNLGAPAAFKYFDTTIDRKRYTSTKEVLDATLIHQSITGLYETRIDLSQLGGDGGEAAAKGGGGSSGGTLGIEDEYRLHETSTEPDVSLGSTWLSDFPQAWAETGGMGLAVRQAPLIIPLKATSTPVSIQQYPMSHEARLGIKPHIQRLLDQGILVPCQSPWNTPLLPVKKPGTNDYRPVQDLREVNKRVEDIHPTVPNPYNLLSGLPPSHQWYTVLDLKDAFFCLRLHPTSQPLFAFEWRDPGMGISGQLTWTRLPQGFKNSPTLFNEALHRDLADFRIQHPDLILLQYVDDILLAATSELDCQQGTRALLQTLGDLGYRASAKKAQICQKQVKYLGYLLREGQRWLTEARKETVMGQPVPKTPRQLREFLGTAGFCRLWIPGFAEMAAPLYPLTKPGTLFSWGPDQQKAYQEIKQALLTAPALGLPDLTKPFELFVDEKQGYAKGVLTQKLGPWRRPVAYLSKKLDPVAAGWPPCLRMVAAIAVLTKDAGKLTMGQPLVILAPHAVEALVKQPPDRWLSNARMTHYQAMLLDTDRVQFGPVVALNPATLLPLPEEGAPHDCLEILAETHGTRPDLTDQPIPDADHTWYTDGSSFLQEGQRKAGAAVTTETEVIWAGALPAGTSAQRAELIALTQALKMAEGKRLNVYTDSRYAFATAHIHGEIYRRRGWLTSEGREIKNKSEILALLKALFLPKRLSIIHCLGHQKGDSAEARGNRLADQAAREAAIKTPPDTSTLLAGKRTADGSEFEKRTADGSEFESPKKKAKVE

SEQ ID NO: 7329 - protein, 2096 aa, synthetic construct
MPAAKRVKLDGGDKKYSIGLDIGTNSVGWAVITDEYKVPSKKFKVLGNTDRHSIKKNLIGALLFDSGETAEATRLKRTARRRYTRRKNRICYLQEIFSNEMAKVDDSFFHRLEESFLVEEDKKHERHPIFGNIVDEVAYHEKYPTIYHLRKKLVDSTDKADLRLIYLALAHMIKFRGHFLIEGDLNPDNSDVDKLFIQLVQTYNQLFEENPINASGVDAKAILSARLSKSRRLENLIAQLPGEKKNGLFGNLIALSLGLTPNFKSNFDLAEDAKLQLSKDTYDDDLDNLLAQIGDQYADLFLAAKNLSDAILLSDILRVNTEITKAPLSASMIKRYDEHHQDLTLLKALVRQQLPEKYKEIFFDQSKNGYAGYIDGGASQEEFYKFIKPILEKMDGTEELLVKLNREDLLRKQRTFDNGSIPHQIHLGELHAILRRQEDFYPFLKDNREKIEKILTFRIPYYVGPLARGNSRFAWMTRKSEETITPWNFEEVVDKGASAQSFIERMTNFDKNLPNEKVLPKHSLLYEYFTVYNELTKVKYVTEGMRKPAFLSGEQKKAIVDLLFKTNRKVTVKQLKEDYFKKIECFDSVEISGVEDRFNASLGTYHDLLKIIKDKDFLDNEENEDILEDIVLTLTLFEDREMIEERLKTYAHLFDDKVMKQLKRRRYTGWGRLSRKLINGIRDKQSGKTILDFLKSDGFANRNFMQLIHDDSLTFKEDIQKAQVSGQGDSLHEHIANLAGSPAIKKGILQTVKVVDELVKVMGRHKPENIVIEMARENQTTQKGQKNSRERMKRIEEGIKELGSQILKEHPVENTQLQNEKLYLYYLQNGRDMYVDQELDINRLSDYDVDHIVPQSFLKDDSIDNKVLTRSDKARGKSDNVPSEEVVKKMKNYWRQLLNAKLITQRKFDNLTKAERGGLSELDKAGFIKRQLVETRQITKHVAQILDSRMNTKYDENDKLIREVKVITLKSKLVSDFRKDFQFYKVREINNYHHAHDAYLNAVVGTALIKKYPKLESEFVYGDYKVYDVRKMIAKSEQEIGKATAKYFFYSNIMNFFKTEITLANGEIRKRPLIETNGETGEIVWDKGRDFATVRKVLSMPQVNIVKKTEVQTGGFSKESILPKRNSDKLIARKKDWDPKKYGGFDSPTVAYSVLVVAKVEKGKSKKLKSVKELLGITIMERSSFEKNPIDFLEAKGYKEVKKDLIIKLPKYSLFELENGRKRMLASAGELQKGNELALPSKYVNFLYLASHYEKLKGSPEDNEQKQLFVEQHKHYLDEIIEQISEFSKRVILADANLDKVLSAYNKHRDKPIREQAENIIHLFTLTNLGAPAAFKYFDTTIDRKRYTSTKEVLDATLIHQSITGLYETRIDLSQLGGDGGEAAAKGGGGSSGGTLNIEDEYRLHETSKGPDVPLGSTWLSDFPQAWAETGGMGLAVRQAPLIIPLKATSTPVSIKQYPMSQEARLGIKPHIQRLLDQGILVPCQSPWNTPLLPVKKPGTNDYRPVQDLREVNKRVEDIHPTVPNPYNLLSGLPPSHQWYTVLDLKDAFFCLRLHPTSQSLFAFEWRDPEMGISGQLTWTRLPQGFKNSPTLFNEALHRDLADFRIQHPDLILLQYVDDLLLAATSELDCQQGTRALLQTLGDLGYRASAKKAQICQKQVKYLGYLLKEGQRWLTEARKETVMGQPTPKTPRQLREFLGKAGFCRLFIPGFAEMAAPLYPLTKPGTLFEWGPDQQKAYQEIKQALLTAPALGLPDLTKPFELFVDEKQGYAKGVLTQKLGPWRRPVAYLSKKLDPVAAGWPPCLRMVAAIAVLTKDAGKLTMGQPLVILAPHAVEALVKQPPDRWLSNARMTHYQALLLDTDRVQFGPIVALNPATLLPLPEEGLQHDCLDILAEAHGTRPDLTDQPLPDADHTWYTDGSSFLQEGQRKAGAAVTTETEVVWAKALPAGTSAQRAELIALTQALKMAEGKKLNVYTDSRYAFATAHIHGEIYRRRGWLTSEGKEIKNKDEILALLKALFLPKRLSIIHCPGHQKGNRAEARGNRMADQAAREVATRETPETSTLLAGKRTADGSEFEKRTADGSEFESPKKKAKVE

SEQ ID NO: 7330 - protein, 2096 aa, synthetic construct
MPAAKRVKLDGGDKKYSIGLDIGTNSVGWAVITDEYKVPSKKFKVLGNTDRHSIKKNLIGALLFDSGETAEATRLKRTARRRYTRRKNRICYLQEIFSNEMAKVDDSFFHRLEESFLVEEDKKHERHPIFGNIVDEVAYHEKYPTIYHLRKKLVDSTDKADLRLIYLALAHMIKFRGHFLIEGDLNPDNSDVDKLFIQLVQTYNQLFEENPINASGVDAKAILSARLSKSRRLENLIAQLPGEKKNGLFGNLIALSLGLTPNFKSNFDLAEDAKLQLSKDTYDDDLDNLLAQIGDQYADLFLAAKNLSDAILLSDILRVNTEITKAPLSASMIKRYDEHHQDLTLLKALVRQQLPEKYKEIFFDQSKNGYAGYIDGGASQEEFYKFIKPILEKMDGTEELLVKLNREDLLRKQRTFDNGSIPHQIHLGELHAILRRQEDFYPFLKDNREKIEKILTFRIPYYVGPLARGNSRFAWMTRKSEETITPWNFEEVVDKGASAQSFIERMTNFDKNLPNEKVLPKHSLLYEYFTVYNELTKVKYVTEGMRKPAFLSGEQKKAIVDLLFKTNRKVTVKQLKEDYFKKIECFDSVEISGVEDRFNASLGTYHDLLKIIKDKDFLDNEENEDILEDIVLTLTLFEDREMIEERLKTYAHLFDDKVMKQLKRRRYTGWGRLSRKLINGIRDKQSGKTILDFLKSDGFANRNFMQLIHDDSLTFKEDIQKAQVSGQGDSLHEHIANLAGSPAIKKGILQTVKVVDELVKVMGRHKPENIVIEMARENQTTQKGQKNSRERMKRIEEGIKELGSQILKEHPVENTQLQNEKLYLYYLQNGRDMYVDQELDINRLSDYDVDHIVPQSFLKDDSIDNKVLTRSDKARGKSDNVPSEEVVKKMKNYWRQLLNAKLITQRKFDNLTKAERGGLSELDKAGFIKRQLVETRQITKHVAQILDSRMNTKYDENDKLIREVKVITLKSKLVSDFRKDFQFYKVREINNYHHAHDAYLNAVVGTALIKKYPKLESEFVYGDYKVYDVRKMIAKSEQEIGKATAKYFFYSNIMNFFKTEITLANGEIRKRPLIETNGETGEIVWDKGRDFATVRKVLSMPQVNIVKKTEVQTGGFSKESILPKRNSDKLIARKKDWDPKKYGGFDSPTVAYSVLVVAKVEKGKSKKLKSVKELLGITIMERSSFEKNPIDFLEAKGYKEVKKDLIIKLPKYSLFELENGRKRMLASAGELQKGNELALPSKYVNFLYLASHYEKLKGSPEDNEQKQLFVEQHKHYLDEIIEQISEFSKRVILADANLDKVLSAYNKHRDKPIREQAENIIHLFTLTNLGAPAAFKYFDTTIDRKRYTSTKEVLDATLIHQSITGLYETRIDLSQLGGDGGEAAAKGGGGSSGGTLNIEDEHRLHETSKEPDVSLGSTWLSDFPQAWAETGGMGLAVRQAPLIIPLKATSTPVSIKQYPMSQEARLGIKPHIQRLLDQGILVPCQSPWNTPLLPVKKPGTNDYRPVQDLREVNKRVEDIHPTVPNPYNLLSGLPPSHQWYTVLDLKDAFFCLRLHPTSQPLFAFEWRDPEMGISGQLTWTRLPQGFKNSPTLFDEALHRDLADFRIQHPDLILLQYVDDLLLAATSELDCQQGTRALLQTLGNLGYRASAKKAQICQKQVKYLGYLLKEGQRWLTEARKETVMGQPTPKTPRQLREFLGTAGFCRLWIPGFAEMAAPLYPLTKTGTLFNWGPDQQKAYQEIKQALLTAPALGLPDLTKPFELFVDEKQGYAKGVLTQKLGPWRRPVAYLSKKLDPVAAGWPPCLRMVAAIAVLTKDAGKLTMGQPLVILAPHAVEALVKQPPDRWLSNARMTHYQALLLDTDRVQFGPVVALNPATLLPLPEEGLQHNCLDILAEAHGTRPDLTDQPLPDADHTWYTDGSSLLQEGQRKAGAAVTTETEVIWAKALPAGTSAQRAELIALTQALKMAEGKKLNVYTDSRYAFATAHIHGEIYRRRGLLTSEGKEIKNKDEILALLKALFLPKRLSIIHCPGHQKGHSAEARGNRMADQAARKAAITETPDTSTLLAGKRTADGSEFEKRTADGSEFESPKKKAKVE

SEQ ID NO: 7331 - protein, 2096 aa, synthetic construct
MPAAKRVKLDGGDKKYSIGLDIGTNSVGWAVITDEYKVPSKKFKVLGNTDRHSIKKNLIGALLFDSGETAEATRLKRTARRRYTRRKNRICYLQEIFSNEMAKVDDSFFHRLEESFLVEEDKKHERHPIFGNIVDEVAYHEKYPTIYHLRKKLVDSTDKADLRLIYLALAHMIKFRGHFLIEGDLNPDNSDVDKLFIQLVQTYNQLFEENPINASGVDAKAILSARLSKSRRLENLIAQLPGEKKNGLFGNLIALSLGLTPNFKSNFDLAEDAKLQLSKDTYDDDLDNLLAQIGDQYADLFLAAKNLSDAILLSDILRVNTEITKAPLSASMIKRYDEHHQDLTLLKALVRQQLPEKYKEIFFDQSKNGYAGYIDGGASQEEFYKFIKPILEKMDGTEELLVKLNREDLLRKQRTFDNGSIPHQIHLGELHAILRRQEDFYPFLKDNREKIEKILTFRIPYYVGPLARGNSRFAWMTRKSEETITPWNFEEVVDKGASAQSFIERMTNFDKNLPNEKVLPKHSLLYEYFTVYNELTKVKYVTEGMRKPAFLSGEQKKAIVDLLFKTNRKVTVKQLKEDYFKKIECFDSVEISGVEDRFNASLGTYHDLLKIIKDKDFLDNEENEDILEDIVLTLTLFEDREMIEERLKTYAHLFDDKVMKQLKRRRYTGWGRLSRKLINGIRDKQSGKTILDFLKSDGFANRNFMQLIHDDSLTFKEDIQKAQVSGQGDSLHEHIANLAGSPAIKKGILQTVKVVDELVKVMGRHKPENIVIEMARENQTTQKGQKNSRERMKRIEEGIKELGSQILKEHPVENTQLQNEKLYLYYLQNGRDMYVDQELDINRLSDYDVDHIVPQSFLKDDSIDNKVLTRSDKARGKSDNVPSEEVVKKMKNYWRQLLNAKLITQRKFDNLTKAERGGLSELDKAGFIKRQLVETRQITKHVAQILDSRMNTKYDENDKLIREVKVITLKSKLVSDFRKDFQFYKVREINNYHHAHDAYLNAVVGTALIKKYPKLESEFVYGDYKVYDVRKMIAKSEQEIGKATAKYFFYSNIMNFFKTEITLANGEIRKRPLIETNGETGEIVWDKGRDFATVRKVLSMPQVNIVKKTEVQTGGFSKESILPKRNSDKLIARKKDWDPKKYGGFDSPTVAYSVLVVAKVEKGKSKKLKSVKELLGITIMERSSFEKNPIDFLEAKGYKEVKKDLIIKLPKYSLFELENGRKRMLASAGELQKGNELALPSKYVNFLYLASHYEKLKGSPEDNEQKQLFVEQHKHYLDEIIEQISEFSKRVILADANLDKVLSAYNKHRDKPIREQAENIIHLFTLTNLGAPAAFKYFDTTIDRKRYTSTKEVLDATLIHQSITGLYETRIDLSQLGGDGGEAAAKGGGGSSGGTLNIEDEYRLHEISTEPDVSPGSTWLSDFPQAWAETGGMGLAVRQAPLIIPLKATSTPVSIKQYPMSQEAKLGIKPHIQRLLDQGILVPCQSPWNTPLLPVKKPGTNDYRPVQGLREVNKRVEDIHPTVPNPYNLLSGLPTSHRWYTVLDLKDAFFCLRLHPTSQPLFASEWRDPGMGISGQLTWTRLPQGFKNSPTLFNEALHRGLADFRIQHPDLILLQYVDDLLLAATSELDCQQGTRALLKTLGNLGYRASAKKAQICQKQVKYLGYLLREGQRWLTEARKETVMGQPTPKTPRQLREFLGTAGFCRLWIPRFAEMAAPLYPLTKPGTLFNWGPDQQKAYHEIKQALLTAPALGLPDLTKPFELFVDEKQGYAKGVLTQKLGPWRRPVAYLSKKLDPVAAGWPPCLRMVAAIAVLTKDAGKLTMGQPLVILAPHAVEALVKQPPDRWLSNARMTHYQAMLLDTDRVQFGPVVALNPATLLPLPEEGAPHDCLEILAETHGTEPDLTDQPIPDADHTWYTDGSSFLQEGQRKAGAAVTTETEVIWARALPAGTSAQRAELIALTQALKMAEGKRLNVYTDSRYAFATAHIHGEIYKRRGWLTSEGREIKNKSEILALLKALFLPKRLSIIHCLGHQKGDSAEARGNRLADQAAREAAIKTPPDTSTLLAGKRTADGSEFEKRTADGSEFESPKKKAKVE

SEQ ID NO: 7332 - protein, 2087 aa, synthetic construct
MPAAKRVKLDGGDKKYSIGLDIGTNSVGWAVITDEYKVPSKKFKVLGNTDRHSIKKNLIGALLFDSGETAEATRLKRTARRRYTRRKNRICYLQEIFSNEMAKVDDSFFHRLEESFLVEEDKKHERHPIFGNIVDEVAYHEKYPTIYHLRKKLVDSTDKADLRLIYLALAHMIKFRGHFLIEGDLNPDNSDVDKLFIQLVQTYNQLFEENPINASGVDAKAILSARLSKSRRLENLIAQLPGEKKNGLFGNLIALSLGLTPNFKSNFDLAEDAKLQLSKDTYDDDLDNLLAQIGDQYADLFLAAKNLSDAILLSDILRVNTEITKAPLSASMIKRYDEHHQDLTLLKALVRQQLPEKYKEIFFDQSKNGYAGYIDGGASQEEFYKFIKPILEKMDGTEELLVKLNREDLLRKQRTFDNGSIPHQIHLGELHAILRRQEDFYPFLKDNREKIEKILTFRIPYYVGPLARGNSRFAWMTRKSEETITPWNFEEVVDKGASAQSFIERMTNFDKNLPNEKVLPKHSLLYEYFTVYNELTKVKYVTEGMRKPAFLSGEQKKAIVDLLFKTNRKVTVKQLKEDYFKKIECFDSVEISGVEDRFNASLGTYHDLLKIIKDKDFLDNEENEDILEDIVLTLTLFEDREMIEERLKTYAHLFDDKVMKQLKRRRYTGWGRLSRKLINGIRDKQSGKTILDFLKSDGFANRNFMQLIHDDSLTFKEDIQKAQVSGQGDSLHEHIANLAGSPAIKKGILQTVKVVDELVKVMGRHKPENIVIEMARENQTTQKGQKNSRERMKRIEEGIKELGSQILKEHPVENTQLQNEKLYLYYLQNGRDMYVDQELDINRLSDYDVDHIVPQSFLKDDSIDNKVLTRSDKARGKSDNVPSEEVVKKMKNYWRQLLNAKLITQRKFDNLTKAERGGLSELDKAGFIKRQLVETRQITKHVAQILDSRMNTKYDENDKLIREVKVITLKSKLVSDFRKDFQFYKVREINNYHHAHDAYLNAVVGTALIKKYPKLESEFVYGDYKVYDVRKMIAKSEQEIGKATAKYFFYSNIMNFFKTEITLANGEIRKRPLIETNGETGEIVWDKGRDFATVRKVLSMPQVNIVKKTEVQTGGFSKESILPKRNSDKLIARKKDWDPKKYGGFDSPTVAYSVLVVAKVEKGKSKKLKSVKELLGITIMERSSFEKNPIDFLEAKGYKEVKKDLIIKLPKYSLFELENGRKRMLASAGELQKGNELALPSKYVNFLYLASHYEKLKGSPEDNEQKQLFVEQHKHYLDEIIEQISEFSKRVILADANLDKVLSAYNKHRDKPIREQAENIIHLFTLTNLGAPAAFKYFDTTIDRKRYTSTKEVLDATLIHQSITGLYETRIDLSQLGGDGGEAAAKGGGGSSGGIPWLMKKPLQLTTLVPLQEYEERLLKQTMLTGSYKEKLQSLFLKYDALWQHWENQVGHRRIKPHHIATGTVNPRPQKQYPINPKAKASIQTVINDLLKQGVLIQQNSIMNTPVYPVPKPDGKWRMVLDYREVNKTIPLIAAQNQHSAGILSSIFRGKYKTTLDLSNGFWAHSITPESYWLTAFTWLGQQYCWTRLPQGFLNSPALFNADVVDLLKEVPNVQVYVDDIYISHDDPREHLEQLEKVFSLLLNAGYVVSLKKSEIAQHEVEFLGFNITKEGRGLTETFKQKLLNITPPRDLKQLQSILGLLNFARNFIPNFSELVKPLYNIIATAPGKYITWTTDNSQQLQNIISMLNSAENLEERNPEVRLIMKVNTSPSAGYIRFYNEFAKRPIMYLNYVYTKAEVKFTNTEKLLTTIHKGLIKALDLGMGQEILVYSPIVSMTKIQKTPLPERKALPIRWITWMSYLEDPRIQFHYDKTLPELQQVPTVTDDIIAKIKHPSEFSMVFYTDGSAIKHPNVNKSHNAGMGIAQVQFKPEFTVINTWSIPLGDHTAQLAEVAAVEFACKKALKIDGPVLIVTDSFYVAESVNKELPYWQSNGFFNNKKKPLKHVSKWKSIADCIQLKPDIIIIHEKGHQPTASTFHTEGNNLADKLATQGSYVVNAGKRTADGSEFEKRTADGSEFESPKKKAKVE

SEQ ID NO: 7333 - protein, 2176 aa, synthetic construct
MPAAKRVKLDGGDKKYSIGLDIGTNSVGWAVITDEYKVPSKKFKVLGNTDRHSIKKNLIGALLFDSGETAEATRLKRTARRRYTRRKNRICYLQEIFSNEMAKVDDSFFHRLEESFLVEEDKKHERHPIFGNIVDEVAYHEKYPTIYHLRKKLVDSTDKADLRLIYLALAHMIKFRGHFLIEGDLNPDNSDVDKLFIQLVQTYNQLFEENPINASGVDAKAILSARLSKSRRLENLIAQLPGEKKNGLFGNLIALSLGLTPNFKSNFDLAEDAKLQLSKDTYDDDLDNLLAQIGDQYADLFLAAKNLSDAILLSDILRVNTEITKAPLSASMIKRYDEHHQDLTLLKALVRQQLPEKYKEIFFDQSKNGYAGYIDGGASQEEFYKFIKPILEKMDGTEELLVKLNREDLLRKQRTFDNGSIPHQIHLGELHAILRRQEDFYPFLKDNREKIEKILTFRIPYYVGPLARGNSRFAWMTRKSEETITPWNFEEVVDKGASAQSFIERMTNFDKNLPNEKVLPKHSLLYEYFTVYNELTKVKYVTEGMRKPAFLSGEQKKAIVDLLFKTNRKVTVKQLKEDYFKKIECFDSVEISGVEDRFNASLGTYHDLLKIIKDKDFLDNEENEDILEDIVLTLTLFEDREMIEERLKTYAHLFDDKVMKQLKRRRYTGWGRLSRKLINGIRDKQSGKTILDFLKSDGFANRNFMQLIHDDSLTFKEDIQKAQVSGQGDSLHEHIANLAGSPAIKKGILQTVKVVDELVKVMGRHKPENIVIEMARENQTTQKGQKNSRERMKRIEEGIKELGSQILKEHPVENTQLQNEKLYLYYLQNGRDMYVDQELDINRLSDYDVDHIVPQSFLKDDSIDNKVLTRSDKARGKSDNVPSEEVVKKMKNYWRQLLNAKLITQRKFDNLTKAERGGLSELDKAGFIKRQLVETRQITKHVAQILDSRMNTKYDENDKLIREVKVITLKSKLVSDFRKDFQFYKVREINNYHHAHDAYLNAVVGTALIKKYPKLESEFVYGDYKVYDVRKMIAKSEQEIGKATAKYFFYSNIMNFFKTEITLANGEIRKRPLIETNGETGEIVWDKGRDFATVRKVLSMPQVNIVKKTEVQTGGFSKESILPKRNSDKLIARKKDWDPKKYGGFDSPTVAYSVLVVAKVEKGKSKKLKSVKELLGITIMERSSFEKNPIDFLEAKGYKEVKKDLIIKLPKYSLFELENGRKRMLASAGELQKGNELALPSKYVNFLYLASHYEKLKGSPEDNEQKQLFVEQHKHYLDEIIEQISEFSKRVILADANLDKVLSAYNKHRDKPIREQAENIIHLFTLTNLGAPAAFKYFDTTIDRKRYTSTKEVLDATLIHQSITGLYETRIDLSQLGGDGGEAAAKGGGGSSGGMDPLQLLQPLEAEIKGTKLKAHWNSGATITCVPQAFLEEEVPIKNIWIKTIHGEKEQPVYYLTFKIQGRKVEAEVISSPYDYILVSPSDIPWLMKKPLQLTTLVPLQEYEERLLKQTMLTGSYKEKLQSLFLKYDALWQHWENQVGHRRIKPHHIATGTVNPRPQKQYPINPKAKASIQTVINDLLKQGVLIQQNSIMNTPVYPVPKPDGKWRMVLDYREVNKTIPLIAAQNQHSAGILSSIFRGKYKTTLDLSNGFWAHSITPESYWLTAFTWLGQQYCWTRLPQGFLNSPALFNADVVDLLKEVPNVQVYVDDIYISHDDPREHLEQLEKVFSLLLNAGYVVSLKKSEIAQHEVEFLGFNITKEGRGLTETFKQKLLNITPPRDLKQLQSILGKLNFARNFIPNFSELVKPLYNIIATAPGKYITWTTDNSQQLQNIISMLNSAENLEERNPEVRLIMKVNTSPSAGYIRFYNEFAKRPIMYLNYVYTKAEVKFTNTEKLLTTIHKGLIKALDLGMGQEILVYSPIVSMTKIQKTPLPERKALPIRWITWMSYLEDPRIQFHYDKTLPELQQVPTVTDDIIAKIKHPSEFSMVFYTDGSAIKHPNVNKSHNAGMGIAQVQFKPEFTVINTWSIPLGDHTAQLAEVAAVEFACKKALKIDGPVLIVTDSFYVAESVNKELPYWQSNGFFNNKKKPLKHVSKWKSIADCIQLKPDIIIIHEKGHQPTASTFHTEGNNLADKLATQGSYVVNAGKRTADGSEFEKRTADGSEFESPKKKAKVE

SEQ ID NO: 7334 - protein, 2087 aa, synthetic construct
MPAAKRVKLDGGDKKYSIGLDIGTNSVGWAVITDEYKVPSKKFKVLGNTDRHSIKKNLIGALLFDSGETAEATRLKRTARRRYTRRKNRICYLQEIFSNEMAKVDDSFFHRLEESFLVEEDKKHERHPIFGNIVDEVAYHEKYPTIYHLRKKLVDSTDKADLRLIYLALAHMIKFRGHFLIEGDLNPDNSDVDKLFIQLVQTYNQLFEENPINASGVDAKAILSARLSKSRRLENLIAQLPGEKKNGLFGNLIALSLGLTPNFKSNFDLAEDAKLQLSKDTYDDDLDNLLAQIGDQYADLFLAAKNLSDAILLSDILRVNTEITKAPLSASMIKRYDEHHQDLTLLKALVRQQLPEKYKEIFFDQSKNGYAGYIDGGASQEEFYKFIKPILEKMDGTEELLVKLNREDLLRKQRTFDNGSIPHQIHLGELHAILRRQEDFYPFLKDNREKIEKILTFRIPYYVGPLARGNSRFAWMTRKSEETITPWNFEEVVDKGASAQSFIERMTNFDKNLPNEKVLPKHSLLYEYFTVYNELTKVKYVTEGMRKPAFLSGEQKKAIVDLLFKTNRKVTVKQLKEDYFKKIECFDSVEISGVEDRFNASLGTYHDLLKIIKDKDFLDNEENEDILEDIVLTLTLFEDREMIEERLKTYAHLFDDKVMKQLKRRRYTGWGRLSRKLINGIRDKQSGKTILDFLKSDGFANRNFMQLIHDDSLTFKEDIQKAQVSGQGDSLHEHIANLAGSPAIKKGILQTVKVVDELVKVMGRHKPENIVIEMARENQTTQKGQKNSRERMKRIEEGIKELGSQILKEHPVENTQLQNEKLYLYYLQNGRDMYVDQELDINRLSDYDVDHIVPQSFLKDDSIDNKVLTRSDKARGKSDNVPSEEVVKKMKNYWRQLLNAKLITQRKFDNLTKAERGGLSELDKAGFIKRQLVETRQITKHVAQILDSRMNTKYDENDKLIREVKVITLKSKLVSDFRKDFQFYKVREINNYHHAHDAYLNAVVGTALIKKYPKLESEFVYGDYKVYDVRKMIAKSEQEIGKATAKYFFYSNIMNFFKTEITLANGEIRKRPLIETNGETGEIVWDKGRDFATVRKVLSMPQVNIVKKTEVQTGGFSKESILPKRNSDKLIARKKDWDPKKYGGFDSPTVAYSVLVVAKVEKGKSKKLKSVKELLGITIMERSSFEKNPIDFLEAKGYKEVKKDLIIKLPKYSLFELENGRKRMLASAGELQKGNELALPSKYVNFLYLASHYEKLKGSPEDNEQKQLFVEQHKHYLDEIIEQISEFSKRVILADANLDKVLSAYNKHRDKPIREQAENIIHLFTLTNLGAPAAFKYFDTTIDRKRYTSTKEVLDATLIHQSITGLYETRIDLSQLGGDGGEAAAKGGGGSSGGVPWLTQQPLQLTILVPLQEYQDRILNKTALPEEQKQQLKALFTKYDNLWQHWENQVGHRKIRPHNIATGDYPPRPQKQYPINPKAKPSIQIVIDDLLKQGVLTPQNSTMNTPVYPVPKPDGRWRMVLDYREVNKTIPLTAAQNQHSAGILATIVRQKYKTTLDLANGFWAHPITPDSYWLTAFTWQGKQYCWTRLPQGFLNSPALFNADAVDLLKEVPNVQVYVDDIYLSHDNPHEHIQQLEKVFQILLQAGYVVSLKKSEIGQRTVEFLGFNITKEGRGLTDTFKTKLLNVTPPKDLKQLQSILGKLNFARNFIPNFAELVQTLYNLIASSPGKYIEWTEDNTKQLNKVIEALNTASNLEERLPDQRLVIKVNTSPSAGYVRYYNESGKKPIMYLNYVFSKAELKFSMLEKLLTTMHKALIKAMDLAMGQEILVYSPIVSMTKIQKTPLPERKALPIRWITWMTYLEDPRIQFHYDKTLPELKHIPDVYTSSIPPLKHPSQYEGVFCTDGSAIKSPDPTKSNNAGMGIVHAIYNPEYKILNQWSIPLGHHTAQMAEIAAVEFACKKALKVPGPVLVITDSFYVAESANKELPYWKSNGFVNNKKEPLKHISKWKSIAECLSIKPDITIQHEKGHQPINTSIHTEGNALADKLATQGSYVVNAGKRTADGSEFEKRTADGSEFESPKKKAKVE

SEQ ID NO: 7335 - protein, 2094 aa, synthetic construct; identical to SEQ ID NO: 4531

SEQ ID NO: 7336 - protein, 2098 aa, synthetic construct
MPAAKRVKLDGGDKKYSIGLDIGTNSVGWAVITDEYKVPSKKFKVLGNTDRHSIKKNLIGALLFDSGETAEATRLKRTARRRYTRRKNRICYLQEIFSNEMAKVDDSFFHRLEESFLVEEDKKHERHPIFGNIVDEVAYHEKYPTIYHLRKKLVDSTDKADLRLIYLALAHMIKFRGHFLIEGDLNPDNSDVDKLFIQLVQTYNQLFEENPINASGVDAKAILSARLSKSRRLENLIAQLPGEKKNGLFGNLIALSLGLTPNFKSNFDLAEDAKLQLSKDTYDDDLDNLLAQIGDQYADLFLAAKNLSDAILLSDILRVNTEITKAPLSASMIKRYDEHHQDLTLLKALVRQQLPEKYKEIFFDQSKNGYAGYIDGGASQEEFYKFIKPILEKMDGTEELLVKLNREDLLRKQRTFDNGSIPHQIHLGELHAILRRQEDFYPFLKDNREKIEKILTFRIPYYVGPLARGNSRFAWMTRKSEETITPWNFEEVVDKGASAQSFIERMTNFDKNLPNEKVLPKHSLLYEYFTVYNELTKVKYVTEGMRKPAFLSGEQKKAIVDLLFKTNRKVTVKQLKEDYFKKIECFDSVEISGVEDRFNASLGTYHDLLKIIKDKDFLDNEENEDILEDIVLTLTLFEDREMIEERLKTYAHLFDDKVMKQLKRRRYTGWGRLSRKLINGIRDKQSGKTILDFLKSDGFANRNFMQLIHDDSLTFKEDIQKAQVSGQGDSLHEHIANLAGSPAIKKGILQTVKVVDELVKVMGRHKPENIVIEMARENQTTQKGQKNSRERMKRIEEGIKELGSQILKEHPVENTQLQNEKLYLYYLQNGRDMYVDQELDINRLSDYDVDHIVPQSFLKDDSIDNKVLTRSDKARGKSDNVPSEEVVKKMKNYWRQLLNAKLITQRKFDNLTKAERGGLSELDKAGFIKRQLVETRQITKHVAQILDSRMNTKYDENDKLIREVKVITLKSKLVSDFRKDFQFYKVREINNYHHAHDAYLNAVVGTALIKKYPKLESEFVYGDYKVYDVRKMIAKSEQEIGKATAKYFFYSNIMNFFKTEITLANGEIRKRPLIETNGETGEIVWDKGRDFATVRKVLSMPQVNIVKKTEVQTGGFSKESILPKRNSDKLIARKKDWDPKKYGGFDSPTVAYSVLVVAKVEKGKSKKLKSVKELLGITIMERSSFEKNPIDFLEAKGYKEVKKDLIIKLPKYSLFELENGRKRMLASAGELQKGNELALPSKYVNFLYLASHYEKLKGSPEDNEQKQLFVEQHKHYLDEIIEQISEFSKRVILADANLDKVLSAYNKHRDKPIREQAENIIHLFTLTNLGAPAAFKYFDTTIDRKRYTSTKEVLDATLIHQSITGLYETRIDLSQLGGDGGEAAAKGSSGGGGGTAPLEEEYRLFLEAPIQNVTLLEQWKREIPKVWAEINPPGLASTQAPIHVQLLSTALPVRVRQYPITLEAKRSLRETIRKFRAAGILRPVHSPWNTPLLPVRKSGTSEYRMVQDLREVNKRVETIHPTVPNPYTLLSLLPPDRIWYSVLDLKDAFFCIPLAPESQLIFAFEWADAEEGESGQLTWTRLPQGFKNSPTLFNEALNRDLQGFRLDHPSVSLLQYVDDLLIAADTQAACLSATRDLLMTLAELGYRVSGKKAQLCQEEVTYLGFKIHKGSRSLSNSRTQAILQIPVPKTKRQVREFLGTIGYCRLWIPGFAELAQPLYAATRPGNDPLVWGEKEEEAFQSLKLALTQPPALALPSLDKPFQLFVEETSGAAKGVLTQALGPWKRPVAYLSKRLDPVAAGWPRCLRAIAAAALLTREASKLTFGQDIEITSSHNLESLLRSPPDKWLTNARITQYQVLLLDPPRVRFKQTAALNPATLLPETDDTLPIHHCLDTLDSLTSTRPDLTDQPLAQAEATLFTDGSSYIRDGKRYAGAAVVTLDSVIWAEPLPIGTSAQKAELIALTKALEWSKDKSVNIYTDSRYAFATLHVHGMIYRERGWLTAGGKAIKNAPEILALLTAVWLPKRVAVMHCKGHQKDDAPTSTGNRRADEVAREVAIRPLSTQATISAGKRTADGSEFEKRTADGSEFESPKKKAKVE

SEQ ID NO: 7337 - protein, 2173 aa, synthetic construct
MPAAKRVKLDGGDKKYSIGLDIGTNSVGWAVITDEYKVPSKKFKVLGNTDRHSIKKNLIGALLFDSGETAEATRLKRTARRRYTRRKNRICYLQEIFSNEMAKVDDSFFHRLEESFLVEEDKKHERHPIFGNIVDEVAYHEKYPTIYHLRKKLVDSTDKADLRLIYLALAHMIKFRGHFLIEGDLNPDNSDVDKLFIQLVQTYNQLFEENPINASGVDAKAILSARLSKSRRLENLIAQLPGEKKNGLFGNLIALSLGLTPNFKSNFDLAEDAKLQLSKDTYDDDLDNLLAQIGDQYADLFLAAKNLSDAILLSDILRVNTEITKAPLSASMIKRYDEHHQDLTLLKALVRQQLPEKYKEIFFDQSKNGYAGYIDGGASQEEFYKFIKPILEKMDGTEELLVKLNREDLLRKQRTFDNGSIPHQIHLGELHAILRRQEDFYPFLKDNREKIEKILTFRIPYYVGPLARGNSRFAWMTRKSEETITPWNFEEVVDKGASAQSFIERMTNFDKNLPNEKVLPKHSLLYEYFTVYNELTKVKYVTEGMRKPAFLSGEQKKAIVDLLFKTNRKVTVKQLKEDYFKKIECFDSVEISGVEDRFNASLGTYHDLLKIIKDKDFLDNEENEDILEDIVLTLTLFEDREMIEERLKTYAHLFDDKVMKQLKRRRYTGWGRLSRKLINGIRDKQSGKTILDFLKSDGFANRNFMQLIHDDSLTFKEDIQKAQVSGQGDSLHEHIANLAGSPAIKKGILQTVKVVDELVKVMGRHKPENIVIEMARENQTTQKGQKNSRERMKRIEEGIKELGSQILKEHPVENTQLQNEKLYLYYLQNGRDMYVDQELDINRLSDYDVDHIVPQSFLKDDSIDNKVLTRSDKARGKSDNVPSEEVVKKMKNYWRQLLNAKLITQRKFDNLTKAERGGLSELDKAGFIKRQLVETRQITKHVAQILDSRMNTKYDENDKLIREVKVITLKSKLVSDFRKDFQFYKVREINNYHHAHDAYLNAVVGTALIKKYPKLESEFVYGDYKVYDVRKMIAKSEQEIGKATAKYFFYSNIMNFFKTEITLANGEIRKRPLIETNGETGEIVWDKGRDFATVRKVLSMPQVNIVKKTEVQTGGFSKESILPKRNSDKLIARKKDWDPKKYGGFDSPTVAYSVLVVAKVEKGKSKKLKSVKELLGITIMERSSFEKNPIDFLEAKGYKEVKKDLIIKLPKYSLFELENGRKRMLASAGELQKGNELALPSKYVNFLYLASHYEKLKGSPEDNEQKQLFVEQHKHYLDEIIEQISEFSKRVILADANLDKVLSAYNKHRDKPIREQAENIIHLFTLTNLGAPAAFKYFDTTIDRKRYTSTKEVLDATLIHQSITGLYETRIDLSQLGGDGGEAAAKGSSGGGGGMDLLKPLTVERKGVKIKGYWNSQADITCVPKDLLQGEEPVRQQNVTTIHGTQEGDVYYVNLKIDGRRINTEVIGTTLDYAIITPGDVPWILKKPLELTIKLDLEEQQGTLLNNSILSKKGKEELKQLFEKYSALWQSWENQVGHRRIRPHKIATGTVKPTPQKQYHINPKAKPDIQIVINDLLKQGVLIQKESTMNTPVYPVPKPNGRWRMVLDYRAVNKVTPLIAVQNQHSYGILGSLFKGRYKTTIDLSNGFWAHPIVPEDYWITAFTWQGKQYCWTVLPQGFLNSPGLFTGDVVDLLQGIPNVEVYVDDVYISHDSEKEHLEYLDILFNRLKEAGYIISLKKSNIANSIVDFLGFQITNEGRGLTDTFKEKLENITAPTTLKQLQSILGLLNFARNFIPDFTELIAPLYALIPKSTKNYVPWQIEHSTTLETLITKLNGAEYLQGRKGDKTLIMKVNASYTTGYIRYYNEGEKKPISYVSIVFSKTELKFTELEKLLTTVHKGLLKALDLSMGQNIHVYSPIVSMQNIQKTPQTAKKALASRWLSWLSYLEDPRIRFFYDPQMPALKDLPAVDTGKDNKKHPSNFQHIFYTDGSAITSPTKEGHLNAGMGIVYFINKDGNLQKQQEWSISLGNHTAQFAEIAAFEFALKKCLPLGGNILVVTDSNYVAKAYNEELDVWASNGFVNNRKKPLKHISKWKSVADLKRLRPDVVVTHEPGHQKLDSSPHAYGNNLADQLATQASFKVHAGKRTADGSEFEKRTADGSEFESPKKKAKVE

SEQ ID NO: 7338 - protein, 2127 aa, synthetic construct
MPAAKRVKLDGGDKKYSIGLDIGTNSVGWAVITDEYKVPSKKFKVLGNTDRHSIKKNLIGALLFDSGETAEATRLKRTARRRYTRRKNRICYLQEIFSNEMAKVDDSFFHRLEESFLVEEDKKHERHPIFGNIVDEVAYHEKYPTIYHLRKKLVDSTDKADLRLIYLALAHMIKFRGHFLIEGDLNPDNSDVDKLFIQLVQTYNQLFEENPINASGVDAKAILSARLSKSRRLENLIAQLPGEKKNGLFGNLIALSLGLTPNFKSNFDLAEDAKLQLSKDTYDDDLDNLLAQIGDQYADLFLAAKNLSDAILLSDILRVNTEITKAPLSASMIKRYDEHHQDLTLLKALVRQQLPEKYKEIFFDQSKNGYAGYIDGGASQEEFYKFIKPILEKMDGTEELLVKLNREDLLRKQRTFDNGSIPHQIHLGELHAILRRQEDFYPFLKDNREKIEKILTFRIPYYVGPLARGNSRFAWMTRKSEETITPWNFEEVVDKGASAQSFIERMTNFDKNLPNEKVLPKHSLLYEYFTVYNELTKVKYVTEGMRKPAFLSGEQKKAIVDLLFKTNRKVTVKQLKEDYFKKIECFDSVEISGVEDRFNASLGTYHDLLKIIKDKDFLDNEENEDILEDIVLTLTLFEDREMIEERLKTYAHLFDDKVMKQLKRRRYTGWGRLSRKLINGIRDKQSGKTILDFLKSDGFANRNFMQLIHDDSLTFKEDIQKAQVSGQGDSLHEHIANLAGSPAIKKGILQTVKVVDELVKVMGRHKPENIVIEMARENQTTQKGQKNSRERMKRIEEGIKELGSQILKEHPVENTQLQNEKLYLYYLQNGRDMYVDQELDINRLSDYDVDHIVPQSFLKDDSIDNKVLTRSDKARGKSDNVPSEEVVKKMKNYWRQLLNAKLITQRKFDNLTKAERGGLSELDKAGFIKRQLVETRQITKHVAQILDSRMNTKYDENDKLIREVKVITLKSKLVSDFRKDFQFYKVREINNYHHAHDAYLNAVVGTALIKKYPKLESEFVYGDYKVYDVRKMIAKSEQEIGKATAKYFFYSNIMNFFKTEITLANGEIRKRPLIETNGETGEIVWDKGRDFATVRKVLSMPQVNIVKKTEVQTGGFSKESILPKRNSDKLIARKKDWDPKKYGGFDSPTVAYSVLVVAKVEKGKSKKLKSVKELLGITIMERSSFEKNPIDFLEAKGYKEVKKDLIIKLPKYSLFELENGRKRMLASAGELQKGNELALPSKYVNFLYLASHYEKLKGSPEDNEQKQLFVEQHKHYLDEIIEQISEFSKRVILADANLDKVLSAYNKHRDKPIREQAENIIHLFTLTNLGAPAAFKYFDTTIDRKRYTSTKEVLDATLIHQSITGLYETRIDLSQLGGDGGEAAAKGSSGGGGGLLGRDLLTKLKAQIQFSTEGPQVTWEDRPAMCLVLNLEEEYRLHEKPVPPSIDPSWLQLFPMVWAEKAGMGLANQVPPVVVELKSDASPVAVRQYPMSKEAREGIRPHIQRFLDLGILVPCQSPWNTPLLPVKKPGTNDYRPVQDLREVNKRVQDIHPTVPNPYNLLSSLPPSHTWYSVLDLKDAFFCLKLHPNSQPLFAFEWRDPEKGNTGQLTWTRLPQGFKNSPTLFNEALHRDLASFRALNPQVVMLQYVDDLLVAAPTYRDCKEGTRRLLQELSKLGYRVSAKKAQLCREEVTYLGYLLKGGKRWLTPARKATVMKIPTPTTPRQVREFLGTAGFCRLWIPGFASLAAPLYPLTRPKVPFTWTEAHQEAFGRIKEALLSAPALALPDLTKPFALYVDEKEGVARGVLTQTLGPWRRPVAYLSKKLDPVASGWPTCLKAIAAVALLLKDADKLTLGQNVLVIAPHNLESIVRQPPDRWMTNARMTHYQSLLLNERVSFAPPAILNPATLLPVESDDTPIHICSEILAEETGTRPDLRDQPLPGVPAWYTDGSSFIMDGRRQAGAAIVDNKRTVWASNLPEGTSAQKAELIALTQALRLAEGKSINIYTDSRYAFATAHVHGAIYKQRGWLTSAGKDIKNKEEILALLEAIHLPKRVAIIHCPGHQRGTDPVATGNRKADEAAKQAAQSTRILTETTKNAGKRTADGSEFEKRTADGSEFESPKKKAKVE

SEQ ID NO: 7339 - protein, 2218 aa, synthetic construct
MPAAKRVKLDGGDKKYSIGLDIGTNSVGWAVITDEYKVPSKKFKVLGNTDRHSIKKNLIGALLFDSGETAEATRLKRTARRRYTRRKNRICYLQEIFSNEMAKVDDSFFHRLEESFLVEEDKKHERHPIFGNIVDEVAYHEKYPTIYHLRKKLVDSTDKADLRLIYLALAHMIKFRGHFLIEGDLNPDNSDVDKLFIQLVQTYNQLFEENPINASGVDAKAILSARLSKSRRLENLIAQLPGEKKNGLFGNLIALSLGLTPNFKSNFDLAEDAKLQLSKDTYDDDLDNLLAQIGDQYADLFLAAKNLSDAILLSDILRVNTEITKAPLSASMIKRYDEHHQDLTLLKALVRQQLPEKYKEIFFDQSKNGYAGYIDGGASQEEFYKFIKPILEKMDGTEELLVKLNREDLLRKQRTFDNGSIPHQIHLGELHAILRRQEDFYPFLKDNREKIEKILTFRIPYYVGPLARGNSRFAWMTRKSEETITPWNFEEVVDKGASAQSFIERMTNFDKNLPNEKVLPKHSLLYEYFTVYNELTKVKYVTEGMRKPAFLSGEQKKAIVDLLFKTNRKVTVKQLKEDYFKKIECFDSVEISGVEDRFNASLGTYHDLLKIIKDKDFLDNEENEDILEDIVLTLTLFEDREMIEERLKTYAHLFDDKVMKQLKRRRYTGWGRLSRKLINGIRDKQSGKTILDFLKSDGFANRNFMQLIHDDSLTFKEDIQKAQVSGQGDSLHEHIANLAGSPAIKKGILQTVKVVDELVKVMGRHKPENIVIEMARENQTTQKGQKNSRERMKRIEEGIKELGSQILKEHPVENTQLQNEKLYLYYLQNGRDMYVDQELDINRLSDYDVDHIVPQSFLKDDSIDNKVLTRSDKARGKSDNVPSEEVVKKMKNYWRQLLNAKLITQRKFDNLTKAERGGLSELDKAGFIKRQLVETRQITKHVAQILDSRMNTKYDENDKLIREVKVITLKSKLVSDFRKDFQFYKVREINNYHHAHDAYLNAVVGTALIKKYPKLESEFVYGDYKVYDVRKMIAKSEQEIGKATAKYFFYSNIMNFFKTEITLANGEIRKRPLIETNGETGEIVWDKGRDFATVRKVLSMPQVNIVKKTEVQTGGFSKESILPKRNSDKLIARKKDWDPKKYGGFDSPTVAYSVLVVAKVEKGKSKKLKSVKELLGITIMERSSFEKNPIDFLEAKGYKEVKKDLIIKLPKYSLFELENGRKRMLASAGELQKGNELALPSKYVNFLYLASHYEKLKGSPEDNEQKQLFVEQHKHYLDEIIEQISEFSKRVILADANLDKVLSAYNKHRDKPIREQAENIIHLFTLTNLGAPAAFKYFDTTIDRKRYTSTKEVLDATLIHQSITGLYETRIDLSQLGGDGGEAAAKGSSGGGGGTLGDQGSRGSDPLPEPRVTLTVEGIPTEFLVNTGAEHSVLTKPMGKMGSKRTVVAGATGSKVYPWTTKRLLKIGQKQVTHSFLVIPECPAPLLGRDLLTKLKAQIQFSTEGPQVTWEDRPAMCLVLNLEEEYRLHEKPVPPSIDPSWLQLFPMVWAEKAGMGLANQVPPVVVELKSDASPVAVRQYPMSKEAREGIRPHIQRFLDLGILVPCQSPWNTPLLPVKKPGTNDYRPVQDLREVNKRVQDIHPTVPNPYNLLSSLPPSHTWYSVLDLKDAFFCLKLHPNSQPLFAFEWRDPEKGNTGQLTWTRLPQGFKNSPTLFNEALHRDLASFRALNPQVVMLQYVDDLLVAAPTYRDCKEGTRRLLQELSKLGYRVSAKKAQLCREEVTYLGYLLKGGKRWLTPARKATVMKIPTPTTPRQVREFLGKAGFCRLFIPGFASLAAPLYPLTRPKVPFTWTEAHQEAFGRIKEALLSAPALALPDLTKPFALYVDEKEGVARGVLTQTLGPWRRPVAYLSKKLDPVASGWPTCLKAIAAVALLLKDADKLTLGQNVLVIAPHNLESIVRQPPDRWMTNARMTHYQSLLLNERVSFAPPAILNPATLLPVESDDTPIHICSEILAEETGTRPDLRDQPLPGVPAWYTDGSSFIMDGRRQAGAAIVDNKRTVWASNLPEGTSAQKAELIALTQALRLAEGKSINIYTDSRYAFATAHVHGAIYKQRGWLTSAGKDIKNKEEILALLEAIHLPKRVAIIHCPGHQRGTDPVATGNRKADEAAKQAAQSTRILTETTKNAGKRTADGSEFEKRTADGSEFESPKKKAKVE

SEQ ID NO: 7340 - protein, 2096 aa, synthetic construct
MPAAKRVKLDGGDKKYSIGLDIGTNSVGWAVITDEYKVPSKKFKVLGNTDRHSIKKNLIGALLFDSGETAEATRLKRTARRRYTRRKNRICYLQEIFSNEMAKVDDSFFHRLEESFLVEEDKKHERHPIFGNIVDEVAYHEKYPTIYHLRKKLVDSTDKADLRLIYLALAHMIKFRGHFLIEGDLNPDNSDVDKLFIQLVQTYNQLFEENPINASGVDAKAILSARLSKSRRLENLIAQLPGEKKNGLFGNLIALSLGLTPNFKSNFDLAEDAKLQLSKDTYDDDLDNLLAQIGDQYADLFLAAKNLSDAILLSDILRVNTEITKAPLSASMIKRYDEHHQDLTLLKALVRQQLPEKYKEIFFDQSKNGYAGYIDGGASQEEFYKFIKPILEKMDGTEELLVKLNREDLLRKQRTFDNGSIPHQIHLGELHAILRRQEDFYPFLKDNREKIEKILTFRIPYYVGPLARGNSRFAWMTRKSEETITPWNFEEVVDKGASAQSFIERMTNFDKNLPNEKVLPKHSLLYEYFTVYNELTKVKYVTEGMRKPAFLSGEQKKAIVDLLFKTNRKVTVKQLKEDYFKKIECFDSVEISGVEDRFNASLGTYHDLLKIIKDKDFLDNEENEDILEDIVLTLTLFEDREMIEERLKTYAHLFDDKVMKQLKRRRYTGWGRLSRKLINGIRDKQSGKTILDFLKSDGFANRNFMQLIHDDSLTFKEDIQKAQVSGQGDSLHEHIANLAGSPAIKKGILQTVKVVDELVKVMGRHKPENIVIEMARENQTTQKGQKNSRERMKRIEEGIKELGSQILKEHPVENTQLQNEKLYLYYLQNGRDMYVDQELDINRLSDYDVDHIVPQSFLKDDSIDNKVLTRSDKARGKSDNVPSEEVVKKMKNYWRQLLNAKLITQRKFDNLTKAERGGLSELDKAGFIKRQLVETRQITKHVAQILDSRMNTKYDENDKLIREVKVITLKSKLVSDFRKDFQFYKVREINNYHHAHDAYLNAVVGTALIKKYPKLESEFVYGDYKVYDVRKMIAKSEQEIGKATAKYFFYSNIMNFFKTEITLANGEIRKRPLIETNGETGEIVWDKGRDFATVRKVLSMPQVNIVKKTEVQTGGFSKESILPKRNSDKLIARKKDWDPKKYGGFDSPTVAYSVLVVAKVEKGKSKKLKSVKELLGITIMERSSFEKNPIDFLEAKGYKEVKKDLIIKLPKYSLFELENGRKRMLASAGELQKGNELALPSKYVNFLYLASHYEKLKGSPEDNEQKQLFVEQHKHYLDEIIEQISEFSKRVILADANLDKVLSAYNKHRDKPIREQAENIIHLFTLTNLGAPAAFKYFDTTIDRKRYTSTKEVLDATLIHQSITGLYETRIDLSQLGGDGGEAAAKGSSGGGGGTLGIEDEYRLHETSTEPDVSLGSTWLSDFPQAWAETGGMGLAVRQAPLIIPLKATSTPVSIQQYPMSHEARLGIKPHIQRLLDQGILVPCQSPWNTPLLPVKKPGTNDYRPVQDLREVNKRVEDIHPTVPNPYNLLSGLPPSHQWYTVLDLKDAFFCLRLHPTSQPLFAFEWRDPGMGISGQLTWTRLPQGFKNSPTLFNEALHRDLADFRIQHPDLILLQYVDDILLAATSELDCQQGTRALLQTLGDLGYRASAKKAQICQKQVKYLGYLLREGQRWLTEARKETVMGQPVPKTPRQLREFLGTAGFCRLWIPGFAEMAAPLYPLTKPGTLFSWGPDQQKAYQEIKQALLTAPALGLPDLTKPFELFVDEKQGYAKGVLTQKLGPWRRPVAYLSKKLDPVAAGWPPCLRMVAAIAVLTKDAGKLTMGQPLVILAPHAVEALVKQPPDRWLSNARMTHYQAMLLDTDRVQFGPVVALNPATLLPLPEEGAPHDCLEILAETHGTRPDLTDQPIPDADHTWYTDGSSFLQEGQRKAGAAVTTETEVIWAGALPAGTSAQRAELIALTQALKMAEGKRLNVYTDSRYAFATAHIHGEIYRRRGWLTSEGREIKNKSEILALLKALFLPKRLSIIHCLGHQKGDSAEARGNRLADQAAREAAIKTPPDTSTLLAGKRTADGSEFEKRTADGSEFESPKKKAKVE

SEQ ID NO: 7341 - protein, 2096 aa, synthetic construct
MPAAKRVKLDGGDKKYSIGLDIGTNSVGWAVITDEYKVPSKKFKVLGNTDRHSIKKNLIGALLFDSGETAEATRLKRTARRRYTRRKNRICYLQEIFSNEMAKVDDSFFHRLEESFLVEEDKKHERHPIFGNIVDEVAYHEKYPTIYHLRKKLVDSTDKADLRLIYLALAHMIKFRGHFLIEGDLNPDNSDVDKLFIQLVQTYNQLFEENPINASGVDAKAILSARLSKSRRLENLIAQLPGEKKNGLFGNLIALSLGLTPNFKSNFDLAEDAKLQLSKDTYDDDLDNLLAQIGDQYADLFLAAKNLSDAILLSDILRVNTEITKAPLSASMIKRYDEHHQDLTLLKALVRQQLPEKYKEIFFDQSKNGYAGYIDGGASQEEFYKFIKPILEKMDGTEELLVKLNREDLLRKQRTFDNGSIPHQIHLGELHAILRRQEDFYPFLKDNREKIEKILTFRIPYYVGPLARGNSRFAWMTRKSEETITPWNFEEVVDKGASAQSFIERMTNFDKNLPNEKVLPKHSLLYEYFTVYNELTKVKYVTEGMRKPAFLSGEQKKAIVDLLFKTNRKVTVKQLKEDYFKKIECFDSVEISGVEDRFNASLGTYHDLLKIIKDKDFLDNEENEDILEDIVLTLTLFEDREMIEERLKTYAHLFDDKVMKQLKRRRYTGWGRLSRKLINGIRDKQSGKTILDFLKSDGFANRNFMQLIHDDSLTFKEDIQKAQVSGQGDSLHEHIANLAGSPAIKKGILQTVKVVDELVKVMGRHKPENIVIEMARENQTTQKGQKNSRERMKRIEEGIKELGSQILKEHPVENTQLQNEKLYLYYLQNGRDMYVDQELDINRLSDYDVDHIVPQSFLKDDSIDNKVLTRSDKARGKSDNVPSEEVVKKMKNYWRQLLNAKLITQRKFDNLTKAERGGLSELDKAGFIKRQLVETRQITKHVAQILDSRMNTKYDENDKLIREVKVITLKSKLVSDFRKDFQFYKVREINNYHHAHDAYLNAVVGTALIKKYPKLESEFVYGDYKVYDVRKMIAKSEQEIGKATAKYFFYSNIMNFFKTEITLANGEIRKRPLIETNGETGEIVWDKGRDFATVRKVLSMPQVNIVKKTEVQTGGFSKESILPKRNSDKLIARKKDWDPKKYGGFDSPTVAYSVLVVAKVEKGKSKKLKSVKELLGITIMERSSFEKNPIDFLEAKGYKEVKKDLIIKLPKYSLFELENGRKRMLASAGELQKGNELALPSKYVNFLYLASHYEKLKGSPEDNEQKQLFVEQHKHYLDEIIEQISEFSKRVILADANLDKVLSAYNKHRDKPIREQAENIIHLFTLTNLGAPAAFKYFDTTIDRKRYTSTKEVLDATLIHQSITGLYETRIDLSQLGGDGGEAAAKGSSGGGGGTLGIEDEYRLHETSTEPDVSLGSTWLSDFPQAWAETGGMGLAVRQAPLIIPLKATSTPVSIQQYPMSHEARLGIKPHIQRLLDQGILVPCQSPWNTPLLPVKKPGTNDYRPVQDLREVNKRVEDIHPTVPNPYNLLSGLPPSHQWYTVLDLKDAFFCLRLHPTSQPLFAFEWRDPGMGISGQLTWTRLPQGFKNSPTLFDEALHRDLADFRIQHPDLILLQYVDDILLAATSELDCQQGTRALLQTLGDLGYRASAKKAQICQKQVKYLGYLLREGQRWLTEARKETVMGQPVPKTPRQLREFLGTAGFCRLWIPGFAEMAAPLYPLTKTGTLFSWGPDQQKAYQEIKQALLTAPALGLPDLTKPFELFVDEKQGYAKGVLTQKLGPWRRPVAYLSKKLDPVAAGWPPCLRMVAAIAVLTKDAGKLTMGQPLVILAPHAVEALVKQPPDRWLSNARMTHYQAMLLDTDRVQFGPVVALNPATLLPLPEEGAPHDCLEILAETHGTRPDLTDQPIPDADHTWYTDGSSFLQEGQRKAGAAVTTETEVIWAGALPAGTSAQRAELIALTQALKMAEGKRLNVYTDSRYAFATAHIHGEIYRRRGLLTSEGREIKNKSEILALLKALFLPKRLSIIHCLGHQKGDSAEARGNRLADQAAREAAIKTPPDTSTLLAGKRTADGSEFEKRTADGSEFESPKKKAKVE

SEQ ID NO: 7342 - protein, 2096 aa, synthetic construct
MPAAKRVKLDGGDKKYSIGLDIGTNSVGWAVITDEYKVPSKKFKVLGNTDRHSIKKNLIGALLFDSGETAEATRLKRTARRRYTRRKNRICYLQEIFSNEMAKVDDSFFHRLEESFLVEEDKKHERHPIFGNIVDEVAYHEKYPTIYHLRKKLVDSTDKADLRLIYLALAHMIKFRGHFLIEGDLNPDNSDVDKLFIQLVQTYNQLFEENPINASGVDAKAILSARLSKSRRLENLIAQLPGEKKNGLFGNLIALSLGLTPNFKSNFDLAEDAKLQLSKDTYDDDLDNLLAQIGDQYADLFLAAKNLSDAILLSDILRVNTEITKAPLSASMIKRYDEHHQDLTLLKALVRQQLPEKYKEIFFDQSKNGYAGYIDGGASQEEFYKFIKPILEKMDGTEELLVKLNREDLLRKQRTFDNGSIPHQIHLGELHAILRRQEDFYPFLKDNREKIEKILTFRIPYYVGPLARGNSRFAWMTRKSEETITPWNFEEVVDKGASAQSFIERMTNFDKNLPNEKVLPKHSLLYEYFTVYNELTKVKYVTEGMRKPAFLSGEQKKAIVDLLFKTNRKVTVKQLKEDYFKKIECFDSVEISGVEDRFNASLGTYHDLLKIIKDKDFLDNEENEDILEDIVLTLTLFEDREMIEERLKTYAHLFDDKVMKQLKRRRYTGWGRLSRKLINGIRDKQSGKTILDFLKSDGFANRNFMQLIHDDSLTFKEDIQKAQVSGQGDSLHEHIANLAGSPAIKKGILQTVKVVDELVKVMGRHKPENIVIEMARENQTTQKGQKNSRERMKRIEEGIKELGSQILKEHPVENTQLQNEKLYLYYLQNGRDMYVDQELDINRLSDYDVDHIVPQSFLKDDSIDNKVLTRSDKARGKSDNVPSEEVVKKMKNYWRQLLNAKLITQRKFDNLTKAERGGLSELDKAGFIKRQLVETRQITKHVAQILDSRMNTKYDENDKLIREVKVITLKSKLVSDFRKDFQFYKVREINNYHHAHDAYLNAVVGTALIKKYPKLESEFVYGDYKVYDVRKMIAKSEQEIGKATAKYFFYSNIMNFFKTEITLANGEIRKRPLIETNGETGEIVWDKGRDFATVRKVLSMPQVNIVKKTEVQTGGFSKESILPKRNSDKLIARKKDWDPKKYGGFDSPTVAYSVLVVAKVEKGKSKKLKSVKELLGITIMERSSFEKNPIDFLEAKGYKEVKKDLIIKLPKYSLFELENGRKRMLASAGELQKGNELALPSKYVNFLYLASHYEKLKGSPEDNEQKQLFVEQHKHYLDEIIEQISEFSKRVILADANLDKVLSAYNKHRDKPIREQAENIIHLFTLTNLGAPAAFKYFDTTIDRKRYTSTKEVLDATLIHQSITGLYETRIDLSQLGGDGGEAAAKGSSGGGGGTLNIEDEYRLHETSKEPDVSLGSTWLSDFPQAWAETGGMGLAVRQAPLIIPLKATSTPVSIKQYPMSQEARLGIKPHIQRLLDQGILVPCQSPWNTPLLPVKKPGTNDYRPVQDLREVNKRVEDIHPTVPNPYNLLSGLPPSHQWYTVLDLKDAFFCLRLHPTSQPLFAFEWRDPEMGISGQLTWTRLPQGFKNSPTLFNEALHRDLAGFRIQHPDLILLQYVDDLLLAATSELDCQQGTRALLQTLGDLGYRASAKKAQICQKQVKYLGYLLKEGQRWLTEARKETVMGQPIPKTPRQLREFLGTAGFCRLWIPGFAEMAAPLYPLTKPGTLFNWGPDQQKAFQEIKQALLTAPALGLPDLTKPFELFVDEKQGYAKGVLTQKLGPWRRPVAYLSKKLDPVAAGWPPCLRMVAAIAVLTKDAGKLTMGQPLVILAPHAVEALVKQPPDRWLSNARMTHYQALLLDTDRVQFGPVVALNPATLLPLPEEGLQHDCLDILAEAHGTRSDLMDQPLPDADHTWYTDGSSFLQEGQRKAGAAVTTETEVIWARALPAGTSAQRAELIALTQALKMAEGKKLNVYTDSRYAFATAHIHGEIYRRRGWLTSEGKEIKNKDEILALLKALFLPKRLSIIHCPGHQKGNSAEARGNRMADQAAREVATRETPETSTLLAGKRTADGSEFEKRTADGSEFESPKKKAKVE

SEQ ID NO: 7343 - protein, 2096 aa, synthetic construct
MPAAKRVKLDGGDKKYSIGLDIGTNSVGWAVITDEYKVPSKKFKVLGNTDRHSIKKNLIGALLFDSGETAEATRLKRTARRRYTRRKNRICYLQEIFSNEMAKVDDSFFHRLEESFLVEEDKKHERHPIFGNIVDEVAYHEKYPTIYHLRKKLVDSTDKADLRLIYLALAHMIKFRGHFLIEGDLNPDNSDVDKLFIQLVQTYNQLFEENPINASGVDAKAILSARLSKSRRLENLIAQLPGEKKNGLFGNLIALSLGLTPNFKSNFDLAEDAKLQLSKDTYDDDLDNLLAQIGDQYADLFLAAKNLSDAILLSDILRVNTEITKAPLSASMIKRYDEHHQDLTLLKALVRQQLPEKYKEIFFDQSKNGYAGYIDGGASQEEFYKFIKPILEKMDGTEELLVKLNREDLLRKQRTFDNGSIPHQIHLGELHAILRRQEDFYPFLKDNREKIEKILTFRIPYYVGPLARGNSRFAWMTRKSEETITPWNFEEVVDKGASAQSFIERMTNFDKNLPNEKVLPKHSLLYEYFTVYNELTKVKYVTEGMRKPAFLSGEQKKAIVDLLFKTNRKVTVKQLKEDYFKKIECFDSVEISGVEDRFNASLGTYHDLLKIIKDKDFLDNEENEDILEDIVLTLTLFEDREMIEERLKTYAHLFDDKVMKQLKRRRYTGWGRLSRKLINGIRDKQSGKTILDFLKSDGFANRNFMQLIHDDSLTFKEDIQKAQVSGQGDSLHEHIANLAGSPAIKKGILQTVKVVDELVKVMGRHKPENIVIEMARENQTTQKGQKNSRERMKRIEEGIKELGSQILKEHPVENTQLQNEKLYLYYLQNGRDMYVDQELDINRLSDYDVDHIVPQSFLKDDSIDNKVLTRSDKARGKSDNVPSEEVVKKMKNYWRQLLNAKLITQRKFDNLTKAERGGLSELDKAGFIKRQLVETRQITKHVAQILDSRMNTKYDENDKLIREVKVITLKSKLVSDFRKDFQFYKVREINNYHHAHDAYLNAVVGTALIKKYPKLESEFVYGDYKVYDVRKMIAKSEQEIGKATAKYFFYSNIMNFFKTEITLANGEIRKRPLIETNGETGEIVWDKGRDFATVRKVLSMPQVNIVKKTEVQTGGFSKESILPKRNSDKLIARKKDWDPKKYGGFDSPTVAYSVLVVAKVEKGKSKKLKSVKELLGITIMERSSFEKNPIDFLEAKGYKEVKKDLIIKLPKYSLFELENGRKRMLASAGELQKGNELALPSKYVNFLYLASHYEKLKGSPEDNEQKQLFVEQHKHYLDEIIEQISEFSKRVILADANLDKVLSAYNKHRDKPIREQAENIIHLFTLTNLGAPAAFKYFDTTIDRKRYTSTKEVLDATLIHQSITGLYETRIDLSQLGGDGGEAAAKGSSGGGGGTLNIEDEHRLHETSKEPDVSLGSTWLSDFPQAWAETGGMGLAVRQAPLIIPLKATSTPVSIKQYPMSQEARLGIKPHIQRLLDQGILVPCQSPWNTPLLPVKKPGTNDYRPVQDLREVNKRVEDIHPTVPNPYNLLSGLPPSHQWYTVLDLKDAFFCLRLHPTSQPLFAFEWRDPEMGISGQLTWTRLPQGFKNSPTLFNEALHRDLADFRIQHPDLILLQYVDDLLLAATSELDCQQGTRALLQTLGNLGYRASAKKAQICQKQVKYLGYLLKEGQRWLTEARKETVMGQPTPKTPRQLREFLGTAGFCRLWIPGFAEMAAPLYPLTKPGTLFNWGPDQQKAYQEIKQALLTAPALGLPDLTKPFELFVDEKQGYAKGVLTQKLGPWRRPVAYLSKKLDPVAAGWPPCLRMVAAIAVLTKDAGKLTMGQPLVILAPHAVEALVKQPPDRWLSNARMTHYQALLLDTDRVQFGPVVALNPATLLPLPEEGLQHNCLDILAEAHGTRPDLTDQPLPDADHTWYTDGSSLLQEGQRKAGAAVTTETEVIWAKALPAGTSAQRAELIALTQALKMAEGKKLNVYTDSRYAFATAHIHGEIYRRRGWLTSEGKEIKNKDEILALLKALFLPKRLSIIHCPGHQKGHSAEARGNRMADQAARKAAITETPDTSTLLAGKRTADGSEFEKRTADGSEFESPKKKAKVE

SEQ ID NO: 7344 - protein, 2116 aa, synthetic construct
MPAAKRVKLDGGDKKYSIGLDIGTNSVGWAVITDEYKVPSKKFKVLGNTDRHSIKKNLIGALLFDSGETAEATRLKRTARRRYTRRKNRICYLQEIFSNEMAKVDDSFFHRLEESFLVEEDKKHERHPIFGNIVDEVAYHEKYPTIYHLRKKLVDSTDKADLRLIYLALAHMIKFRGHFLIEGDLNPDNSDVDKLFIQLVQTYNQLFEENPINASGVDAKAILSARLSKSRRLENLIAQLPGEKKNGLFGNLIALSLGLTPNFKSNFDLAEDAKLQLSKDTYDDDLDNLLAQIGDQYADLFLAAKNLSDAILLSDILRVNTEITKAPLSASMIKRYDEHHQDLTLLKALVRQQLPEKYKEIFFDQSKNGYAGYIDGGASQEEFYKFIKPILEKMDGTEELLVKLNREDLLRKQRTFDNGSIPHQIHLGELHAILRRQEDFYPFLKDNREKIEKILTFRIPYYVGPLARGNSRFAWMTRKSEETITPWNFEEVVDKGASAQSFIERMTNFDKNLPNEKVLPKHSLLYEYFTVYNELTKVKYVTEGMRKPAFLSGEQKKAIVDLLFKTNRKVTVKQLKEDYFKKIECFDSVEISGVEDRFNASLGTYHDLLKIIKDKDFLDNEENEDILEDIVLTLTLFEDREMIEERLKTYAHLFDDKVMKQLKRRRYTGWGRLSRKLINGIRDKQSGKTILDFLKSDGFANRNFMQLIHDDSLTFKEDIQKAQVSGQGDSLHEHIANLAGSPAIKKGILQTVKVVDELVKVMGRHKPENIVIEMARENQTTQKGQKNSRERMKRIEEGIKELGSQILKEHPVENTQLQNEKLYLYYLQNGRDMYVDQELDINRLSDYDVDHIVPQSFLKDDSIDNKVLTRSDKARGKSDNVPSEEVVKKMKNYWRQLLNAKLITQRKFDNLTKAERGGLSELDKAGFIKRQLVETRQITKHVAQILDSRMNTKYDENDKLIREVKVITLKSKLVSDFRKDFQFYKVREINNYHHAHDAYLNAVVGTALIKKYPKLESEFVYGDYKVYDVRKMIAKSEQEIGKATAKYFFYSNIMNFFKTEITLANGEIRKRPLIETNGETGEIVWDKGRDFATVRKVLSMPQVNIVKKTEVQTGGFSKESILPKRNSDKLIARKKDWDPKKYGGFDSPTVAYSVLVVAKVEKGKSKKLKSVKELLGITIMERSSFEKNPIDFLEAKGYKEVKKDLIIKLPKYSLFELENGRKRMLASAGELQKGNELALPSKYVNFLYLASHYEKLKGSPEDNEQKQLFVEQHKHYLDEIIEQISEFSKRVILADANLDKVLSAYNKHRDKPIREQAENIIHLFTLTNLGAPAAFKYFDTTIDRKRYTSTKEVLDATLIHQSITGLYETRIDLSQLGGDGGEAAAKGSSGGGGGVQEISDSRPMLHIYLNGRRFLGLLDTGADKTCIAGRDWPANWPIHQTESSLQGLGMACGVARSSQPLRWQHEDKSGIIHPFVIPTLPFTLWGRDIMKDIKVRLMTDSPDDSQDLMIGAIESNLFADQISWKSDQPVWLNQWPLKQEKLQALQQLVTEQLQLGHLEESNSPWNTPVFVIKKKSGKWRLLQDLRAVNATMHDMGALQPGLPSPVAVPKGWEIIIIDLQDCFFNIKLHPEDCKRFAFSVPSPNFKRPYQRFQWKVLPQGMKNSPTLCQKFVDKAILTVRDKYQDSYIVHYMDDILLAHPSRSIVDEILTSMIQALNKHGLVVSTEKIQKYDNLKYLGTHIQGDSVSYQKLQIRTDKLRTLNDFQKLLGNINWIRPFLKLTTGELKPLFEILNGDSNPISTRKLTPEACKALQLMNERLSTARVKRLDLSQPWSLCILKTEYTPTACLWQDGVVEWIHLPHISPKVITPYDIFCTQLIIKGRHRSKELFSKDPDYIVVPYTKVQFDLLLQEKEDWPISLLGFLGEVHFHLPKDPLLTFTLQTAIIFPHMTSTTPLEKGIVIFTDGSANGRSVTYIQGREPIIKENTQNTAQQAEIVAVITAFEEVSQPFNLYTDSKYVTGLFPEIETATLSPRTKIYTELKHLQRLIHKRQEKFYIGHIRGHTGLPGPLAQGNAYADSLTRILTAAGKRTADGSEFEKRTADGSEFESPKKKAKVE

SEQ ID NO: 7345 - protein, 2088 aa, synthetic construct
MPAAKRVKLDGGDKKYSIGLDIGTNSVGWAVITDEYKVPSKKFKVLGNTDRHSIKKNLIGALLFDSGETAEATRLKRTARRRYTRRKNRICYLQEIFSNEMAKVDDSFFHRLEESFLVEEDKKHERHPIFGNIVDEVAYHEKYPTIYHLRKKLVDSTDKADLRLIYLALAHMIKFRGHFLIEGDLNPDNSDVDKLFIQLVQTYNQLFEENPINASGVDAKAILSARLSKSRRLENLIAQLPGEKKNGLFGNLIALSLGLTPNFKSNFDLAEDAKLQLSKDTYDDDLDNLLAQIGDQYADLFLAAKNLSDAILLSDILRVNTEITKAPLSASMIKRYDEHHQDLTLLKALVRQQLPEKYKEIFFDQSKNGYAGYIDGGASQEEFYKFIKPILEKMDGTEELLVKLNREDLLRKQRTFDNGSIPHQIHLGELHAILRRQEDFYPFLKDNREKIEKILTFRIPYYVGPLARGNSRFAWMTRKSEETITPWNFEEVVDKGASAQSFIERMTNFDKNLPNEKVLPKHSLLYEYFTVYNELTKVKYVTEGMRKPAFLSGEQKKAIVDLLFKTNRKVTVKQLKEDYFKKIECFDSVEISGVEDRFNASLGTYHDLLKIIKDKDFLDNEENEDILEDIVLTLTLFEDREMIEERLKTYAHLFDDKVMKQLKRRRYTGWGRLSRKLINGIRDKQSGKTILDFLKSDGFANRNFMQLIHDDSLTFKEDIQKAQVSGQGDSLHEHIANLAGSPAIKKGILQTVKVVDELVKVMGRHKPENIVIEMARENQTTQKGQKNSRERMKRIEEGIKELGSQILKEHPVENTQLQNEKLYLYYLQNGRDMYVDQELDINRLSDYDVDHIVPQSFLKDDSIDNKVLTRSDKARGKSDNVPSEEVVKKMKNYWRQLLNAKLITQRKFDNLTKAERGGLSELDKAGFIKRQLVETRQITKHVAQILDSRMNTKYDENDKLIREVKVITLKSKLVSDFRKDFQFYKVREINNYHHAHDAYLNAVVGTALIKKYPKLESEFVYGDYKVYDVRKMIAKSEQEIGKATAKYFFYSNIMNFFKTEITLANGEIRKRPLIETNGETGEIVWDKGRDFATVRKVLSMPQVNIVKKTEVQTGGFSKESILPKRNSDKLIARKKDWDPKKYGGFDSPTVAYSVLVVAKVEKGKSKKLKSVKELLGITIMERSSFEKNPIDFLEAKGYKEVKKDLIIKLPKYSLFELENGRKRMLASAGELQKGNELALPSKYVNFLYLASHYEKLKGSPEDNEQKQLFVEQHKHYLDEIIEQISEFSKRVILADANLDKVLSAYNKHRDKPIREQAENIIHLFTLTNLGAPAAFKYFDTTIDRKRYTSTKEVLDATLIHQSITGLYETRIDLSQLGGDGGEAAAKGSSGGGGGLDDEYRLYSPLVKPDQNIQFWLEQFPQAWAETAGMGLAKQVPPQVIQLKASATPVSVRQYPLSKEAQEGIRPHVQRLIQQGILVPVQSPWNTPLLPVRKPGTNDYRPVQDLREVNKRVQDIHPTVPNPYNLLCALPPQRSWYTVLDLKDAFFCLRLHPTSQPLFAFEWRDPGTGRTGQLTWTRLPQGFKNSPTIFNEALHRDLANFRIQHPQVTLLQYVDDLLLAGATKQDCLEGTKALLLELSDLGYRASAKKAQICRREVTYLGYSLRDGQRWLTEARKKTVVQIPAPTTAKQVREFLGKAGFCRLFIPGFATLAAPLYPLTKPKGEFSWAPEHQKAFDAIKKALLSAPALALPDVTKPFTLYVDERKGVARGVLTQTLGPWRRPVAYLSKKLDPVASGWPVCLKAIAAVAILVKDADKLTLGQNITVIAPHALENIVRQPPDRWMTNARMTHYQSLLLTERVTFAPPAALNPATLLPEETDEPVTHDCHQLLIEETGVRKDLTDIPLTGEVLTWFTDGSSYVVEGKRMAGAAVVDGTRTIWASSLPEGTSAQKAELMALTQALRLAEGKSINIYTDSRYAFATAHVHGAIYKQRGWLTSAGREIKNKEEILSLLEALHLPKRLAIIHCPGHQKAKDPISRGNQMADRVAKQAAQGVNLLPAGKRTADGSEFEKRTADGSEFESPKKKAKVE

SEQ ID NO: 7346 - protein, 2088 aa, synthetic construct; identical to SEQ ID NO: 7345
